United States Patent Application Publication US 2007/0161031 A1 - sequence listing, part 8

SEQ ID NO: 9132 - DNA, 2300 bp, Homo sapien
tagaggtacacatgtatgggtttctgtattcaaccatatgttgatatatactcacatatatgtaagtgataatatcctgtttgttacttccacatttatgcactatcccttaaatatgtattatatatatttatattattcagaatccatcagcccttgttgaataaattagtgaataaaatatagagtcgagtctcattattcacagattctatataagaaaatttgtctattcactaaaattcctttgtaacaccaaaatcaatactgctggactttcatgggcattcacatgcatgtgcaaagtggtgaaaaatttgagctgccatgttcccaactaaggttgaacaaaatgaagctctgtcttcttgtttctgctcacatatgataaagaaatatccttttcacactgtatttattgccacatttttggcatttttgtgttttgtgtttctgagttgaatgtttcgaatgggccccaaagatagtgctgaagtgctctccggtgcacaagagtatctgagggaaaagatacatatgctgtataagcttcctccaggcctgaactacagtgttgttgacaactaattcaatgttaatgaatcaatagtatgtattaaataaagtgtctttaaacaaaacatacataaaacacagttctatattgaacaatttaccaaaatattgtgaccagaggcagacaggcatataactaaccccacatctctccaaggaacaatggttcaatatttgctaattcagtgttcccagcaactttataaaacataactactgcaacaagtatcaactgtacatataatatatattagacatattgtataattactgccctattaaaaatcatgtatctatgctgtgtctgcttatatagatatcttagatacataaatatgtattgtttacatacataggagcaagaatgtatttctaaaactccatgaagaacacattatattctatataaaagagtcagttgaagtaaaaagttaactcattttactagtctttaaagtaggactttaatgactctcaaaataacaatttctctcatacattgactccaaaactttagttgttgaatttattctgcagatatggccacataaaaccaaaatggcatatgatatattaagaacatctttaatatgaaatgattagatacaacctaaaagctgatgaatatagaaccagttgcatatattatggacaacttaataccctgctaccataagaaaaatgagaaagacttattaagattaagtatatagagaagataaaaaggtagagaatgatgtttaaggtatgctaccatttgcattgaaaaggaaaatattatgtacttaatgaaaaatccatattatatttctggataatgggacaagagttagaggaagaatctttgttttatttttttaatttgcattttcaactatatgcattttctcttggaaaagaaatgaacaaaatcaaaataaagtaacatcatgatggtggtaaggtcaagcaataccagagttgctctgagaagtacttggagtacactttgctctttttaacaaatccaaattctgtttgctttttgagcctgattccagtggtgtctcctttataaaactgaggccattctaatttaattctttatattatttttgtatctgttttgaatatctactctgtgcaaggggctaataggcacattttaaaactagaaggataaagaaaacatatatttgcttttataaattttacaatataggtgtgtagaaaagataataatttaaatttctataatttaaaatgttcatgtaatctggtgtgtgattctatattacttacttgtttcaaatttctctccacaaatttatttttctattaaattgtaatctccttaggctagaatttgtgtctgtctttcctacttttgtttccagcattgacctagcagagtggtaacgacatagtagaccctgagtgaatgttagtgaatggttgattgattgatgatgatcttgtggcttttcttatttctaaattatatattgtaaaaataaaataaactatactttttcttccttaataggtgattgtttcaaactgagcatcaacaacaaaaacatttgtatgatatctatatttcaatcatggaccaaaatcaacatttgaataaaacagcagaggcacaaccttcagagaataagaaaacaagatactgcaatggattgaaggtagaataagttttatgtttttgagctaaaataagtaaatagggaactttaatg

SEQ ID NO: 9133 - DNA, 2300 bp, Homo sapien
tgaatgctcttaagagcacccaagtcacttcttgaaagctttagtttgaaatttcttccaccagataccttaaattatgtctcttaagttcaaagttccactgatctctagtgcaggggcaaaatgctgccagtctttttactaaagcatagcaagaatcacctttgctccagttcccaataagttcctcatctccatctgagaacacctcagtctggactttattgtccatatcattatcagcattttggtcaaagccattcaacaagtctctaggaagtttcaaactttcccacatcttcctgtcttccgagcccttcaagcctgtaggaagctccaaactttcctacattttcctattttcttctgagccctccacactgttctaacctctgcctgttacccagttccaaagtcatttccacatttttgggtatctttacagcagcactccactctctgtaccaatttactgcattagtccatttcatactgctgtgaaaaaatacctgagactgggtaatttataaagaaaaagaggtttaatgaactcacagttccacatggctggggaagcctcacagtcatgatggaagatgcaggaggagcaaaggcatgtcttacatggtggcaagagagcatgtgccagggaactgccctttataaaaccatcagatcttgtgagacttattcactatcacagaacagcatgggaaaacccacccctatgatccaattacttcccagtgggtccctctcacagcatgtggggattatgggagctactattcaagatgagattttggtggggacacagccaaaccatatcacatggtaaatttggaggttaagtgctacatgggcactccaggtgacattactaccacagaatcacagactgatcaaatttgctgtcctcatgggtcttacagatgcttaataaaacactggggtaattaacaaagaataatgagaaaggcaaaagggagtcagaggactcaccccagagggtgattaaaatatttggacgttttataagaaatgaaataaataaaatgaaaattgatggggttgaaacaaaggtctttacaacactatcaagggttgagtggaccaaagggaacccctactgatcctccaacattaaagggccccatatcagttttctgcatttgccccagattggggaaattgaagaaacagcaaaaggcaaaggttataatgagggagctgaaattgcctggggcaaatctgaggcaaattaagatgaagattgaaaaaagagcccaagtcccttggctcaatcccttgctgggaactcaaatcatttttcaccagaaaaagtaaaatggtctgggggtagaaaagaaaagttcctcaaaccagaacataaaaatgtacaggttgataggattatgaaatttgagatgtctaaacagcctttatgtaaggtaattttaacttcttcacctaaatatcttgtgaaaattggtattgtatctgattgggggatgtttctcctatcaagtactatgaaactgaagtcatgtaaatgtgccctttgaggaatgttaattggacacactaaatggaaactagtaagattgcctgagcctacacaatgtagggtagaagctgaagggctagtagggacaaattctccacttcatatccatttgtggagcatttattagggcttatggtaaaagactgggagcacttcccaatgacaaatactagactagagaatttccagttgagggacatttactgccttgttatggaatgttaactgaagctacccctttgctaaaggaaataatggtaccccaaagagttccataataaagtaaaaattgtttgcataggatcttgctacctgaggatgcagaggagatacttatgagcagagagcattctttttcccctagggctgactctgactctgtaaggagctgctagattctacagtgcctggtaaacagctctcatataacaagaactgcttagcatgtgaatggcaattcaaggtgaacaaaggacatgttgtttggaaggctgatgctctggttaaagagtcaagagaatctttttcttttaaattatttattctttagagcaattgggtgaagtatgtttttatgagcaaatttacctttctctccaagttctcccaaatttggaaaccgtgagtattctggttttatgacaatatagttatttgcataagtttagtaagagtcttttgttttataacaggacaattggagacactgattattttaccaagtctttgacta

SEQ ID NO: 9134 - DNA, 2300 bp, Homo sapien
gtgagaaagcatactgaagcattacctgttcccatttgaatgctgagaaagagttagggaaataacatgattctccacttaataaaacttcagcatgtctttttcattagaagtgatgattgacagggatttgttggtgacactgtgtggtcctgggagcagaagtcactgtgtaaacaacactgtgctaacaaaagaggactgttcacatggctggcactagcacagcctcgagaagatgaaaagacggcacacggaatttcctgatttggggccaagatggacaacaatgactatgatattaaccgttggattttatggatttttattgaataaatggaatagattttgttaatttgtttattttcctccatgaagatgtttgaaatgtatctgaaaatataaaatattttcatcatataagttggaaaactagggaaagtttagggttaatttaatcccatgtaattcttttcaagtgcttagccttaaatattacctcttacttcagttaagataatagttttttaaccccttttttcaatatgttaaaacattttgaagcaaatcttccagacatagtgaaaaaacctgctctagatggttacttagtgtcacaattcatggagggaactatatagaattcccctatatggtgattttctgtggcactacctccagcttttatgccctctggctatatatgaaaaaatagacatttaatatagtaatgtttttagccacaaagaagagtgaaggcaattttgacgtgggagaagaataagttctctcccttagtgtttgatacggtgactatattgggctaagataatggttaggagagagagaagagaaaaggggagagagattgggttctaaatgcacgagaagaaagaaatgagggcagttcagaacaataacctgtgaattttttcaccacttacataccaagcaaattgcatttccttctacactgtctggttctattccaatgtgttttatttaaaagttttatctttcccaatgaaagtttaagttccttggaatctgggtccaagtatcttccacagaaacatacttctctcgctagtttatactctctgtaggcacgtacttggctttcttgctcactgctgaatgctggtgcgtagcaccatgactggcacagagtagatgttcaataagtatttgttgtatctgtgagagaatgtgttaaaataacaaaactcaaacataatagtgcagcgactatgccttgatgtgtgtgtgtttgggattcagcacatttgtagaggtaaagcagttggttttttaaaaaattagtgccattcaggatcacttgttaaatggatattgtttaaaggacttaattaattaatgctggggatactgttaagaaatcattctagaaactagaataaatattgccaaagtgaaacactttggttttgatacaaattattgccttagtttcaagatgtaaaacaaacaaaatctttgatgggattagtagaatttatttgagtttaattcaactttttgttttacatataaaaatgtgtgcctgtatgttatacatctgtacatatatttccacatatatctatacctattacgtatagctacatatagatacccatttatatgtttaatctcctaagtcttacatcttagtttgcaatcgtgggattattttccagatcatagaattgtttgttatttttactaggttgttttcatgattaaaattccgtgtctccccaggtttccatgtatcagcagtgccccagaaagtgtttcccttcctgagactctagggaagccttggaatgcaaataacttgaaaagagagcctggccaaaaaaagatttttgagccttggtagggttagtgaagcaggtttttagtacaaacacaactcaaagtatgtgtgttattaaaagtagctattttcatggaagtcttttggtactatttgttttggctagagaagtgaaaagctttcttttaaccatgtgaccattattttgcaagatcataacaaacaattctaatatctttaatctcactaaagagtcactaaagttatttgatgtaccttttgaaatagaaaaccaacaactaaatcttctctaacaccatgattttctaatctgtattaaagcgttccaggtatttttgtaatgcaatggatttcaattatgttgttcattttcagcacttacttcaaaagaatgatgctttacaattttgtagttaatttaacatatttttttgtttgcttgaaagggtagaagtaa

SEQ ID NO: 9135 - DNA, 2300 bp, Homo sapien
taactagatgtttgatgttgaactttatttaatgtcactggccctggtatgctttctacatcactgtatttaacgcagaacaggtgagacccaaactggggcttagccctcaagggttcttggctttgttcatgaaagagttcaggggcaagttggaggtagaagaaaacagctttattgaagaggcggtgttacagctctggcatttataactctgtgactgctcctgcagggcagggctaacccatatgcagagagtagcagcttacggcggttttgcagtcatatttatacccacttttaactacatgcagattaagggatggtttatgcggaaatttcaagggaagtggtagtaatttttgggtcatctggtcattgccctggaaagaggcagtaactcctgggtgttgttatagcaatggtaaactgacatggcacactagggggcgtgtcttatggaaagctgctttccattggccctgttttagctagttctcaatttggtctggtgttcaagccctgcctctggagtctagtcctgcctcctacctcatattcaccttgttaagtacattatcttcttacggaaatgcattatccttccatttcttttgattttttttcttttggaatatcagtaaatttcacagaaatattaaaattgtagaatcattgaataattagaacaaggattctaaacaagtttctttcctcctgaaatctctaccaaacaccttcaaacaatgttacaaagcttttaagaagtatatgaaatcaatgaactaatgtttctagttagagaacttcaatttttttaagattacacaggcatgcacattttcactgacaattgaaatttatttgctttacatgacactaagttgttctattaataactaagataccaaatataatttagaaatacaaaaaaagaggatgggtgcggtggctgacgcctgtaatcccagcactttgggaggcagaagtgggcggatcacctgaggttgggagttcgagaccagcctgaccaacatagagaatccccgtctccactaaaaatacaaaattagccatacatggtgatgcatgcctgtaatcccagctactctgtaggctgaggcaggagaatcacttgaacccgggaggcacaggttacagtgagccgagatcgcacccttgtactccagcctgggcaacaaagagtgaaacttcatctcaaaaaaaaagaaaaaaaaagaaagagagaaagaaatacaagaaaaagaaaaagcaatttggagaaaattttaaaaagcaaatcattttaaaagacaaactacaaagtactgtgtgagctaagccattcataatgttctcatggagctaatgggaaacaaatctgttctttcaaaataattgtaaaatttctgtgtaagaatgaatggaaaaggtcatccaaaaactacttgactacatatacctatggatctctatctaagtgctgaaaaatgaatttttttattcatttggttatgtagcatttgttcattctaattttgttttgttccctgtcatatctctggtacctagaataatccctaccacagagtaggtcttccattactcttatgcttttaaatctcccctcacctcattgtaaatgacttttgatttctcttttatgccctttttatacacctttcccttatatctccatttattcctgaagcttcatgggattcagccattgaggtcacttgggtttagatataccaaaagtctgtgatttctctgtttgcatatatgcacatttgttgttatccttacccttttctatcagttccttaccataacatacacttaattcttggaaattcactcatgtcttacaaagatggcaaattcaaacttctgctgtgtatgacacaccattaactgcacaaggacactgtgtatttgctacgttaatatttactgatgagttaatgtaataatgacccatccgcttctgctgcctgtgaggtactttctatctatagggatggaaattaatgacagaggctctctgagctgcctgatgtcagagctgagaaaggtgtgaggggtatataagagctggattactagttagcaaatgagggggtaaatattccagtggatacaagcttggactcttttcttgaagctttctttctatcagaagcatttgctgatattgctgacattgaaacattaaaaggtaaagaatttcctatttctgggaaagttttatttatttagagaaatgcacacttggtgttaaattcatggtttatttc

SEQ ID NO: 9136 - DNA, 2300 bp, Homo sapien
gtagatgtctattaggtccgcttggtgcagagctgagttcagttcctgggtatccttgttgactttctgtctcgttgatctgtctaatgttgacagtggggtgttaaagtctcccattattaatgtgtgggagtctaaatctctttgtaggtcactcaggacttgctttatgaatcttggtgctcctgtattgggtgcacatatatttaggatagttagctcttcttgttgaattgatccctttaccattatgtaatggccttctttgtctcttttgatctttgttggtttaaagtctgttttatcagagactaggattgcaacccctgcctttttttgttttccatttgcttggtagatcttcctccatccttttattttgagcctatgtgtgtctctgcacgtgagatgggtctcccgaatactgcacactgatgggtcttgactctttatccaatttgccagtctgtgtcttttaattggagcatttagtccatttacatttaaagttaatattgttatgtgtgaatttgatcctgtcattatgatgttagctggttattttgctcgttagttgatgcagtttcttcctagtctcgatggtctttacattttgccatgattttgcagcagctggtaccagtcgttcctttccatgtttagtgcttccttcaggagctcttgtaaggcaggcctggtggtgacaaaatctctcagcatttgtttgtctgtaaagtattttatttctccttcacttatgaagcttagtttggctggatatgaaattctgggttgaaaattcttttctttaagaaatttgaatattagcccccactctcttctggcttgtagggtttctgctgagagatccacttttagtctgatgggcttccctttgagggtaacccgacctttctctctggctgcccttaacattttttccttcatttcacctttggtgaatctgacaattatgtgtcttggagttgctcttctcgaggagtatctttgtggcgttctctgtatttcctgaatctgaacgttggcctgccttgctagactggggaagttgtcctggataatatcctgcagagtgttttccaacttggttccattctccccatcactttcaggtacaccaatcagacgtagatttggtcttttcacatagtcccatatttcttggaggctttgctcatttctttttattcttttttctctaaacttcccttctcacttcatttcattcatttcatcttccatcgctgataccgtttcttccagttgatcgcatcggctcctgaggcttctgcattcttcacgtagttctcgagccttggttttcagctccatcagctcctttaagcacttctctgtattggttattctagttatacattcttctaaattttttcagagttttcaacttctttgcctttggtttgaatgtcctcccgtagctcagagtaatttgatcgtctgaagccttcttctctcagctcgtcaaagtcattctccatccagctttgttccgttgctggtgaggaactgcgttcctttggaggaggagaggcgctctgctttttagagtttccagtttttctgttctgttttttccccatctttgtggttttatctacttttggtctttgatgatggtgatgtacagatgggtttttggtgtggatgtcctttctgtttgttagttttccttccaacagagaggaccctcagctgcaggtctgttggagtaccctgccgtttgaggtgtcagtgtgcccctgctggggggtgcctcccagttaggctgctcgggggtcaggggtcagggacccacttgaggaggcagtctgcccgttctcagatgtccagctgcgtgctgggagacccactgctctcttcaaagctgtcagacagggacatttaagtctgcagaggttactgctgtctttttgtttgtctgtgccctgcccccagaggtggagcctacagaggcaggcaggccttcttgagctgtggtgggctccacccagttcgagcttcacagctgctttgtttacctaatcaagcctgggcaatggcgggcgcccctcccccagtctcgctgctgccttgcagtttgatctcagactgctgtgctagcaatcagcgagactccatgggcgtaggaccctccgagccaggtgcgggatataatcttgtggcgcgccgttttttaagcctgttggaagagcgcagtattcgggtgggagtgacccgattttccaggtgcgtccgtcacccctttctttgactcagaa

SEQ ID NO: 9137 - DNA, 2300 bp, Homo sapien
cccagttttctttgcagttgccctttctcctaacctgtacctattgctgccctccctgtggataacatgtttcaagttacctacatcttacttttaacccactttacatccagtatatgtatctaatttaatcaacattaaggtgagatgcactgaaagttctttaacccttagacatttctaaaagttggatattcatgccagtgtggcaggcagctaggtcttatccctacatcacctttgacaaaaaagccagccttcacaaggggaagaaaaaaggagagtgtggagtcattacccctttacatttgaggagcctcctactactttgcttcccctcccacagacgatgatctccttccgtttcccctgggagcttaaattccactccattcttccttccgacttccataaagaggaaacccctgtcacaatatacaagaggatcctgaccctggacaatgaatctaaaaatctttagaaggacttcaggggagtttcatgctccaccaacttcctatttcgttgagcacatttttgttgaatacatactccctactaaacattggagatacaaagggagacaaaaataatccctgagattatgtaagcagtttatggtggtggtggggtcaggcagtaagaatttacaataaagtgggataagtctaaatttagaggatgacaaagtgctataagaacacacggagaggacacctagctgtcttgaggatgttagataaagtatcttaaaggggaagcaatggcttgatgaaaccaaaggttgatgagttagccagggaaaagtagttgggaaaaagatatgtgcaaatgctcagaaagaaaatggcatatcctgggatctggaagtgtagtgtggcctgaatggaacacagtgtgagtgagataatgtgaaaataagctgaagcaagatgagatctaaatgggcttaaggaatgtatttcctcctcctagaaatgaatgctttgtttggttgctatactagtaacaggaattagacacgtttattaaaccgcttaccatttaacttggtaaatcaaagaacaatgatttttacaggtatcagtaaatgcctgtaattagatacgtggtaggctttcctgttaatatataatggttattctcagtgtttaaagaattaaagggactcgggtaattaccagttttagagtgaaccatttgagagataataccttaccattacaaaacaactcctagggaaagttatatgagacagcaaaggtaatagtaaatagtaaaataatatgaatagtgaataatatagtaaaaacagttaaaaatgatttagcaatttcttaaaaacaattgaccacgaaaaaaattcacagtaaaaccgagactgggaatatttcattcaaccctcacacatgctgctattgactggaaatttaagaaatgttcatttgttttgacaaaatggaaagcaactgtacattcttcctggaaactttagctgaggtcaaagttgtaaatgaaaaggatgattttttagagaacaattcagtagtattgttttgccttgtcatgaagaatttttgtgcttccacaaacaaaaatcttggattgttaggtgaacggtggcaatcaagtggttttcagaagactcaagtttcttcatctacaaaaatgacaggagtggggtcaggatgttcccgaaggctccttctactcataagagcataaaatctgtgcctctaatttctcgcagaaacaaataatgagaacttcacaccaattcatttattatatgaatgttttgtcccgtgagaacactggtctatctttagatatgtaatttatcaaacttctttgggcaacccatcttctttacttttttatttttaattttttggttttctctttgtcaaattttcatggaataactacattcaggtgtagtaatagtaacgcaaagctctgaacaccacgagacaattcgttgcttccgaaacgcagccggcagcaggtactcgagatgagtagtgtgagctcccgagcacccgtaggtcggattatctggtaaggcaccggaagtgaccgcctcgcggctgcttcctctcctggagtccagagtcccgttgctccgccgcgatattcagtaaaccactgggagtccggcagcatggaggcagcgcgccctcccccgacggcagggaagttcgtggtggtcggcggcggcatcgcgggcgtcacttgtgcggagcaggtagggcggtgctcaggcggttccgcctctttccccgaccccaaaggggata

SEQ ID NO: 9138 - DNA, 2300 bp, Homo sapien
aaagccagccttcacaaggggaagaaaaaaggagagtgtggagtcattacccctttacatttgaggagcctcctactactttgcttcccctcccacagacgatgatctccttccgtttcccctgggagcttaaattccactccattcttccttccgacttccataaagaggaaacccctgtcacaatatacaagaggatcctgaccctggacaatgaatctaaaaatctttagaaggacttcaggggagtttcatgctccaccaacttcctatttcgttgagcacatttttgttgaatacatactccctactaaacattggagatacaaagggagacaaaaataatccctgagattatgtaagcagtttatggtggtggtggggtcaggcagtaagaatttacaataaagtgggataagtctaaatttagaggatgacaaagtgctataagaacacacggagaggacacctagctgtcttgaggatgttagataaagtatcttaaaggggaagcaatggcttgatgaaaccaaaggttgatgagttagccagggaaaagtagttgggaaaaagatatgtgcaaatgctcagaaagaaaatggcatatcctgggatctggaagtgtagtgtggcctgaatggaacacagtgtgagtgagataatgtgaaaataagctgaagcaagatgagatctaaatgggcttaaggaatgtatttcctcctcctagaaatgaatgctttgtttggttgctatactagtaacaggaattagacacgtttattaaaccgcttaccatttaacttggtaaatcaaagaacaatgatttttacaggtatcagtaaatgcctgtaattagatacgtggtaggctttcctgttaatatataatggttattctcagtgtttaaagaattaaagggactcgggtaattaccagttttagagtgaaccatttgagagataataccttaccattacaaaacaactcctagggaaagttatatgagacagcaaaggtaatagtaaatagtaaaataatatgaatagtgaataatatagtaaaaacagttaaaaatgatttagcaatttcttaaaaacaattgaccacgaaaaaaattcacagtaaaaccgagactgggaatatttcattcaaccctcacacatgctgctattgactggaaatttaagaaatgttcatttgttttgacaaaatggaaagcaactgtacattcttcctggaaactttagctgaggtcaaagttgtaaatgaaaaggatgattttttagagaacaattcagtagtattgttttgccttgtcatgaagaatttttgtgcttccacaaacaaaaatcttggattgttaggtgaacggtggcaatcaagtggttttcagaagactcaagtttcttcatctacaaaaatgacaggagtggggtcaggatgttcccgaaggctccttctactcataagagcataaaatctgtgcctctaatttctcgcagaaacaaataatgagaacttcacaccaattcatttattatatgaatgttttgtcccgtgagaacactggtctatctttagatatgtaatttatcaaacttctttgggcaacccatcttctttacttttttatttttaattttttggttttctctttgtcaaattttcatggaataactacattcaggtgtagtaatagtaacgcaaagctctgaacaccacgagacaattcgttgcttccgaaacgcagccggcagcaggtactcgagatgagtagtgtgagctcccgagcacccgtaggtcggattatctggtaaggcaccggaagtgaccgcctcgcggctgcttcctctcctggagtccagagtcccgttgctccgccgcgatattcagtaaaccactgggagtccggcagcatggaggcagcgcgccctcccccgacggcagggaagttcgtggtggtcggcggcggcatcgcgggcgtcacttgtgcggagcaggtagggcggtgctcaggcggttccgcctctttccccgaccccaaaggggatagcactggaggccttcctcccaccccctccctttttcttcttccgggttccttttttgctgcgcccttttccgcacttattgctcccagattttagaaactgcttggtggtcctcagatgacctcactagctttctcttaggcgcagggaggagtgggaggcaaattatagccgagaaaccaaagctggctgatccgtgctcagatccttgtaatgtcagagcagacatgaggactttgtatttagaca

SEQ ID NO: 9139 - DNA, 2300 bp, Homo sapien
gtcattcctaagcacggaaaatgttagaaagtaaattatatattgcagtgacctttcaaataagaaccacatggttcttttgacactaattttttatggaaaactctatatttcagcttaataacccacaacactcagaacgactaactctctagatttcagagaagtgtccaaagtcacataaacgtatacatgacaaatacagtagcaatgacactcagcaaacatccacaagatacaaagtgatgtaacaaaaaacagcaaacattcaacaggtctagcaccaattgctatgtgactaaattactatgttaggcaaagttgcatatgctgttcctccaagcctctttccctacctgtaaaactgggaggatggcaatcttataaataagttggatagattcaaatgtaccagattaagcaaaatacatcaacataaataataaaattaatcatctaacattttattgagcccttgcgttaaagaattacaatataagcccaatcttaaaagagaaactggtattctacagaaaagctagattttctaagttagaggtggggggaggggaaaatggtttgtaatgatttctaagtatctatgaatgactaaaacctaagcatgcatatggacaagtggaaaatggggctggagagtagaaactttaaattccccataatcctaaaaacacctcttctatctctctaatatggacattttctaaaactaagatgctctccaaaagtcacttctgcaacacctatccttagactgctgaccttacgccctttctacacagaattctgaagccaccactaggccggaaagataggctgactcttttttgccttgctaaagaatgtggaataaccacaccattaaaagaaggctaaataggagagtaaaccaaggatttctaattcttgatctatacaaacatctcttcacgtaatgaaaatgtaacattccttccatagactgtaaggtcctttagcagggctggggttcaatctcttcacctttgtatccgcacagcccaggaaaatgccttgatgtagtgagggctcaggtttgctaaggtagcaggggctgtttctacccttatgaaaagacacagtctatatccaattctcccccacgattttaaatgactcctttgattatgcggttaaaagactgctccttcccaaaatgatgtgatttaacagcaaaagatatctcaacataaaatgtatccagaaattgaactacagcaggtctgtcactcagcagtataagctaggcatccacaggaagaatgttacagggtgacagccagtcatcaatgttggaggaaacgccactgagataccataggctaaatcctctctctccccgccacctgcatttagaggcaatagtaatttaatattaataacgcccgcccttccgctactgtgaagcagggggtggaagaagcatccccagtagtatttaccaacaaatggcagctgctaataaacaggctttggtggccaatcctcctgcatggaaaagaatggggagatcagaagaccggtcagcaggcgaacgtgcccctaaaggcccgagttctcagagcagggcagtgattaactttccggtttctcctccgccaatgtgtgggcgaaaggaagtgatccgctacagaccggcctcgccctgcagcaggaaagggaaggatgaaacaaaaagcgcacacccttgacccttcaaagctgtaacagtagttatcccagagcctctccccaccgagaagcccggtctaactctccggtgtttgactgtccggtgtccgactgtcctgtgtccgactctccgatctccgactctcggatctccgacaccaaagcacccaggcctcgagcagatctttccgctactcgggagtaaaatcttcccgccagccagctgagagcatccacccttccgggtcggtccgttcagccaatcacagataactcccttctctaattggtcaaggggtgtggtcaccatgcgcgtcaccgaacaacattacgagttattggttgagattggaagcaggtttcgccaataggaagcgctcttaaagcggcagtgagggtggctgcgtgtttccggaagacgtggcggctctcgcctgggctgtttcccggcttcatttctcccgactcagcttcccaccctgggctttccgaggtgctgtcgccgctgtccccaccactgcagccatgatctccttaacggacacgcagagtaagcacctgctccggggcccccgcctcgagccgcgcacacc

SEQ ID NO: 9140 - DNA, 2300 bp, Homo sapien
caaaatgcatttggttcactaatcgttttatgtttcaatccactgtttcacctaaaacatgtgacaagtgaacagcaaagagtaaaatttcattgccctcacaaaatttaatgaagtgaggagaatgcttctcagggagaatgcccatagtccaaacccactctcttgtttttataaagcaggcactcatcactatattaagtcttcaaaaatataatttctatgcacagattattctcagatctcaaataaagtttatatcaagtcttcttaggtgatagtggggtacagtgcaaaaggtttctgagccagcacacctgggatcaagttttgtttctgtcactttttctttgaccatgcactcaatttcttttgtgcctcatttaacttatgaaaggggcatgcttctgtgagccttacagggctcttataagaattatgcataatgattcacatgaaagcacatggttaactgaaagaaaatacctttatataattgccagtaattattattacactagattcctatcccctcaagactacacttttattttctttgatcagaacaggccaggccaatggaccaaagtgggcggcaaccttggggcaggtggccccaagaggcagccccagtccagcctcaggagggaagacagcctgattggggggtggcagtgtgtgtaggaggccttagaagctctgtgaagttggtctgccatgacttgaatctccacaagaagactccactttaaaatagggcattttaaataaacttctatttttcacttcaattcactgtttaagtcttaaaatattgaaaatctgagttaactggagtgaaatgaaaggcgtggcagataaagcaaagtgagacaaaaagagactcttatgaacatcaaaatatgaggtacagagcttgggcagacataaatacaaaaattattaatattaacaaaaagcagtaggaaagtggaaatattataatgaaagaaaaggaaaccgatatcaatgctagctttagagatgaaataggcctggagaactctgtggcaggcagagagcgatgctaaaataataaaacaagccacaaagcacaatatacaatactaacgaaatatatcctttaatggcacacaaagtggcttttctctactgcttgaaactttagcaggtagaaaagtgagaatgtttcaagagacttctaaaaggttgcttacagtactggcaaaaagcgaatattcaaaatgccacatttaagcgtaaggacattttcaaaaagagcctactgtaggtgacatttaaaataccgcctcccaaataaccagccagccagggacttgtagaggacccgaagtgtgtcatgcgcataaacgatcccgagagtgggccgcgggcaccacgcaaactttctcttgtggcaagcccctagaacaaagcgcccatctcactggggatgaggagatcagcgcgaccctggaatgagacagactctgggctaaagctcccctcccaacatagggcgtcccaccctgccccacagactcttctcccaggtcaggtccgccagtccaagtctagccccggcatcccgaaggcagccccttagggtcccagcagccctagctctgtctcgcaggccaccgcccccaacccagagcttcattcattgaccccggcggaggggcgagacccagccgggcgatgggtgtgcgcggctcgaggcgggggccccggagcaggtgcttactctgcgtgtccgttaaggagatcatggctgcagtggtggggacagcggcgacagcacctcggaaagcccagggtgggaagctgagtcgggagaaatgaagccgggaaacagcccaggcgagagccgccacgtcttccggaaacacgcagccaccctcactgccgctttaagagcgcttcctattggcgaaacctgcttccaatctcaaccaataactcgtaatgttgttcggtgacgcgcatggtgaccacaccccttgaccaattagagaagggagttatctgtgattggctgaacggaccgacccggaagggtggatgctctcagctggctggcgggaagattttactcccgagtagcggaaagatctgctcgaggcctgggtgctttggtgtcggagatccgagagtcggagatcggagagtcggacacaggacagtcggacaccggacagtcaaacaccggagagttagaccgggcttctcggtggggagaggctctgggataactactgttacagctttgaagggtcaagggtgtgcgctttttgttt

SEQ ID NO: 9141 - DNA, 2300 bp, Homo sapien
agtttcagcccagcctgaacaacatagtgagaccctgtctttaaaataacaataacaataataataacagtaaaaaaaattctcattttttcctttcccttcttttgtgacatctgtaaaagagattgtttattcttggctttaatttatcatatcatattcactattcaaccaactccaatcttgcttctatcctcaaaaccatcatattccaaatccagtggatgtttcttggagctaatgttgcttgacctcccaatactactggatcttcacttggcttccatgatatcagggtcccctggaatttctcctttctttctgactctacctcaacctccttttctggctcttcctctgctcattctctatgcgtttgttttcatagctctgtccctgccactcttctttagccctattcactccctaagtgttgtgtttaatctcatccctttactggttgtaaaattcttagaattcttaaaattcttaaagctaatcatttctgccccccaccaaaaagaaaatctgtaggctggtgacctcttggctgacctctatcaagttttgcatttctaaccttctattttgtacttgtacttggatatttttaatatacattttaattttaatatgcctatatggcaagtgttaatttccctctcataacttgcttcttaagaagtttctctaatttcagtaaattacttcataatttacccacagttttatccataaacctaagaatcatccttgatttatttttctcacactttcatatcccttttatatacaagttctatattttctacctccacaacatgtattccaaattcatttacagctcttctttccctgtgtgtaccatcccagtgtaagccatcatcatctattgcttataatcgtatttccacatcaactggcccatttcttcttctccaatctcatttcaaagcacctcccccgttcacccacacaacgctgcctccattggcctctttcctagtccccaagcaagtcatgctctttgctgtccacagattttgcttttctttcttctattgagaatgcctggaatactaattcctgcccagcttctcccattacttcaccttatccttcaagactaccctctgtttttaaccttccctaaagtagcccaccacttatcctatcacatcaccttgcttacttttacttaacaatttaaaacattctgtagttacagtagtccctgcttatccacggtttcactttccatggtttcagttacccatggtcaactacagtctgaaaatattaaatgggaaattccagaattaataagtttaaattgtgagctttaaatctgagtagggtgttgaaatctctcactgtccagctccagcccacccaagacatgaaccatctttttgtccagcatgtccatatgtaaacaccactctcccattaatcagttagtaaccatcttggtgaacagataaaaaaaaatagtataataaggcatatacgtatcagtggtttcaggcatccactgtgggtcttgaaacatgctcctccaccccacacacacctacgattaaggggtaactactgtgtcttatttatctattcatcagtttactgtgtaccttaactagtaggtaacttagatcaaagcagagaccatgtcttttcagtgcatggctgtgtcccttgaaatacaaggattgtgtgtctcataggcactcaataaatatttgctaaacaacagaatgaattgataattaagtgaatgactgatgtcaaattccattgagattcccaaaccttttcatacatctttagccatcagtgatagactgatggctagttacccaagaaaagttttctgatttattcttttacttttgattctgccttggactattgattgttttcattaataataataataacatgttactttgggcagctagtaggaaaagcaaggccaatgatgctgacacattctgaaggcctcctgggtgatgcaatcagtatttaaacaaataatttctgcccatcaatcattcctctacttcctgcaatgaagctccctggaggagtcatcagattctcaatcttgcttgaagactgacaagatgtccctgtggactcccaaactctactccagatggggaggtgcccttaacaccaagattttaaaagctccaatttcagagcaagagtcgaaaactcacagataaagttatagttatttcagggttctgaaaagacgcagaacatgaaggtaagtaaaggctttattaacttgagac

SEQ ID NO: 9142 - DNA, 2300 bp, Homo sapien
attagggaaagcttttactaaaccatcatatgtgttataaaaaaggctaagattactaaagtggttggcatagtaccaggcacaatgttaagtgacttatatagattatctcatccccattttatcaagaaaacaaaaacttaggtaagaaattggctcaagtttacacagcagataagtgatgccacaagtgcctaactcacaactaagcagttgatacctggaacagattgcaaataaataattcagccttatcatgtaagctggagaatatggatcattgtgctcctgtagcctgtgtgacactggatgaaccaatctcaaggctcctggaacagaaaactgcaaacgtgaaactctatcactgtcatcccattctcactcctgtcaacatgtccttagatttggttttactggaatgtgcacttgcaggactctcagaggttatgtgaacataagcaaaccattttataaaggagacaatcattttgatcatttgggatcatatgttttctattttagtacttgattttttttattagccatataatctttttctcacaacgcaaacaaatggataacaaactatgtacttaaatgtacttttctggacaaagataagaatcaactgtgtcacaaaatcatagatgacatttatttatttttgttttaattaattttttattttattttattttttaagagagtggttgttcaggttggccttaaactcctgggctcaagtgattcatccccctcagcctcctgagtagctggaacaacaggtgtgtactaccacatcaagctgacatatttaatctatttggcttacatagatttattaatgtaatataatgaaatgtggttctgcccatcttgagtcattaaaataagtgtaagtctataagaccaagtatatagaaaataatttaaaacctaataaaaggtgctaaaatagtattatcaagtaacaaattacaattctgattgtaattctaacttaaaggatattttgtatgagcttcagttctgctgctttagagaataataatgtaaaaatattgattttagctacatctgtaaagatggctcaaaattaagcttgcttgtgaatgcaccaactctctgtaggtacaatataggatatatgtgtatgggtgtgtaaataaattggaacatatatatttacaaacatagaaacacaagggaaaagcaaacatatgccatttatctgcagtctgatcctgatgatttttcttcccatgtttgaacatttacattgactgaattattctttatcaatttgataatatttgaaggaaatgtacaaacatgacaaagatttatttttactacctcattaaaattattgactgatgattattgaccagtcaaaattatgttttttttcatgttacacccaaagacatactcaaatttatgcttttttatagggaaagttttaagaaaagtaattgagaaaagggggctcaagatctctggctatcaccaaaattcaatttgtaagtgtagaataaaataactaggaatattttttaaaagctctagaaataggaatcaaaagaaagaagaatatttaggaaatccaaagggatttaaagcataaaaatatgtcccaatcagtctacatgtaatctaaggaggcctgcaaacttaatgaggggagttgccaatattgtatcactttggaaatgatgaaataagcattggtaactgtatgaatctaggagtctggtcaaaaggacaagggctaaaaggctgaacttgggtcatgccctgcctatcccaggaagtgcttacctatgtcctgaatcagagggtttttctgttgacagctctggattgtttgggtagatactgacagggcagataccgtcctcacaatacctgcccagaaagacgagaaagaggaggaagaattcctccttccaccaggaattctgtgggaagcacataagatttcatgctactagtttattcccaagagaagctaccaaagcctggtaactctaccaactctaacttttgtgcctgtaagttctcttctcctgggattacaactaattgaaacaggaattcaaaggagtctcggaggactgtaagaagaatgcttcgaggccgatccctctctgtaacatccctgggtgggcttccccagtgggaagtcgaagaacttcctgtggaggagttactgctctttgaagttgcttgggaagtgaccaataaaggtttgtactgctcctgaaggtggatcagtacaccttcactaggtgactgag

SEQ ID NO: 9143 - DNA, 2300 bp, Homo sapien
aataaactattaattataactatcaattatttaagtagtaagagactgtatgataaaactaaatagtttctttaggaacttaaattgaagtaaagaattgtacataaattagtaattcaaaaagagcaacattaaaatcacattacacttttttttagtgcttcgtgttcagacaatttaaaactatattataaatgttttattttaaattaatatttttctcatttaaattaattattctttgaacaattttatgtaaaactgtttttgaacaattttgattctgtttcatagatctaaatctgtttattaaaccacaatatattgaataagctcatggcaaaaaaaaataataaaataatccaatattgaaactaataatttaaaatattttattaataataatgatgataaataatatttttattttactaaattcatttctgccacctgtgtaaaggactattttctcccaataagctcagagtataaatcttcctttgaattcagtgggagtttgaaatgcaattttagtaaagggtttatcttggtgctataagaatttgttcttgaagttgtagcataatttatttctgattttttatataagaatgctgacttttttctgacacatatcactttattcaagaattgtttacctccagggactcatctgaatttttgtctggttaattgtaatggtcctatgtgtctctcttgatcagattaatttgagcatggaaagtttttagcaagtcaactccataactttaagcttggctctcccttcttaacaagataatgtgactagcaagttcttaacttctctgaacctgtttcctcatctataaaataaagataattatgccacctatgtactatgtaaaaagtacttagtacaatgtcaggtgtacagtaaaagttcagtaaatgctaggtgtagttatacattgctaggtgatagaagtgatattacatgtcctctagttcaggactttaattttagtgagaaaaagtgatattacatgtcctctagttcaggactttaattttagtgagaaaaaaaataaggcaaagtaggtgaagtagctattgaagaacttttagttagttaatgccatagctaccactagaattatgtcttctgattcccgtccaatgttctattacattatggctgttatttttcccagaacatctttttaaaatttttcatgttgatctatattgtgtacgtaaaatgaaagagaattaaaccatgctcactagacatgattatgcagatttcataattttcatcaaaattgtaaaaatatccaattaccctaacttgccagaagttgtggactaataggggatcttatttggctttaaatagcttttcccttcatatctgtttcagtcatagtagattctaccccacacttttgctcctatttccagagtctacaatgtactcctccaaaggtctccaagaaacatataacttaggttttaaggtccaattcaaaggcccattttgtgtagttctttctgatactcttctcctttaaattaagtagacccttatttataatttttaccccactttcataattatgctttatttgggtcttattctaggattttttttctttactgtagaataaaggagcatatattagaaaaatatggaggagaaaagttaaacattcctcaaaccaaaagtttagcatagtccccaactagaatccctgtgatttcacacacctagagagaagcaaagaattttattttctctgtaactatgacacagcaattctgctttgcactaaaattcttgaaagttaaaaggtcagacatgttgctatttgaaggcaaacgtcagcctttttggggaactatactggaatctactggagagtcacttattggagcagttccagttggtattcagtaatttgcatcataggtgaaattgcactaaaagaagaaaatattttttaaaataatgtaagaaataactgcaatgtctttttttttttttttaaacagtggctgtgtggagtggtgtgaatgtggcaggtgtttctctccaggaattgaatccagaaatgggaactgacaatgatagtgaaaattggaaggaagtgcataagatggtggttgaaaggtaagtgaaagggaacttgattttagatgattaatttcaactctacttaaataaaattataaacattttccatggctgtctgctcagataaactcttaatgtagtaattatgcagctgttatcttttgaaactgataagacttttaca

SEQ ID NO: 9144 - DNA, 2300 bp, Homo sapien
acattaacattcaattttataactacgtttctgggaattatttgtccttatctctaaattaattggtttagccatcattgcctgtatttttatgccataattcccccctttcttggattcctaattttgcttatttttcaatatgttggcatatagtttcccaatgatttttttcaaaatagaatggtatggggcatatattttctggatcattgtatatataaaattgtgttttacacataaaagataacttgccagggtatacaattctcaactatttgagaggggtagtatgctctcctggcatttagagttacatactagagcattcactttgttcaatcagattagaacaccttgtggcgaggaatggaaatgagggtagaggagggaaatagatacctcttttcattttttcctacctcatctccaaagttacacagtaatggggatggcaagaagaggaataagtggaaagatatttagaagtaaagtctaaatatctgacttgcaaagtaagtgaaaaagaaatctagggtaccttctagataacttgctaggctgacttggctattcttgcttcaaacttggatttagggttaatgtaatacttttgagattatcctccaagctcttttcctcaccatcacattttaatttgtaattggactgtatcttcagtcaaagtccccactagctgaatgatttatgctaggagagtttgaggcttatgaattcttctcaacaaacccttctcttagtgattctttactctgaatttttattgtactttaaccaaatttctattgccacttattgtaattgaaataggttgcctacttgtctgtctccaatggactaggaacacctcaaagggcataatcttatatttatgttttttaccaatgcttggcactgagaataaactgaagcaataattatagaattagtggtcatatacaagaaatatgcatttacaaaaaaaaacacttcacatacaggaagtttgtgagatggctatatttgaaagcattttaattataagaaaacagaactgaagccagactcttcagaattcctccaatttatcattcattcatttattcatcaatgctatatttaggtaccaagcactggctgagtgttgaagacagaatgaatgacaacatccagctttggagtcgattagggactaaaaaagaaagtgcatctcacttagtggtcccacatttcccctagagggcaaagcctgaccttgagaccaggtggaattgtaggggaacttcagatggcagggacaaagcctcattggtcttgtcaggcaacgagtaagcaatcattgcgtgtttgttgaaacaggttgaaaaaaatagtcattttcatcaaatgaactttaaaacggagatgatctaaattcagatgtatttttttaagtcctttaaagtttaactgaaatgcaacatagaaatttatttctggccgggcgcggtggctcaggcctgtaatcccagcactttgggaggccgaggcgggcggatcacgaggtcaggagatcgagaccatcctggctaacacggtgaaacccccctctctactaaaaatacaaaaaattagccgggcgaggtggcgggcgcctgtagtcccagctactcgggaggctgaggcaggagaatgtcgtgagcccgggaggcggagcttgcagtgagccgagatcgcgccactgcactccagcctgggcgacagagtgagactccgtctcaaaataaaaaaaagaaggaaagaaatttatttctatttgtactaaatctaatagaacaagagcgttaaagtccagaagagtcggggatgggcaagttttataaataacttggcctccgcattgaagagcctgcgagatgtgagaccagctgagagcggaagcctctggaaggagacctcctcatctggagggtgggggagggagtgtgcatacttgagcccttgtccttgaaggggattgagcgagccgaggggaggggtaggcggtactcggatttccaatcacaatggagaaacctaagaggctgcggtggttgtggggccccgccccctcctccctccttgcagagccggcgccggaggagacgcacgcagctgactttgtcttctccgcacgactgttacagaggtctccagagccttctctctcctggtaggtttcggctcaggaccctgaatcctggcccacaggcaagcctgatgggacgtgcggggtagtacttgtatggggagacgcgggaaggaggaagaagcacatctgt

SEQ ID NO: 9145 - DNA, 2300 bp, Homo sapien
agtttccagcaccctcttctgccagttacagaattttggagcccagagggactatactcaagaaatgcaacccttaaagccattatattctctgcttctggatcaatcctcttaaaacaggctcttattgtgtagttttctgatcaaaatctttccatggcttaccactacatactgaggactcctcagcttcttttgttgagcatttaaggctgtctatgcattttttaaggccccaatatgctttttcaactttgtatttttcattcattgattcaaaaatattttttgagcccatttataatttaaatggtgctagggccttgctacaaagatgaacaagtcacagccttgccctctagcagtccccagtttaagggagggggtacaggagtggtgggaatgggtgtgacgagtacatgaaaatctcattaagtattgagagtaggtggtaacagcgcctgcccagggagcactgaactcaagtgtccaatcctgctgtgtagccaacttggcttcatcaatgctgacgtgggctgtcttttctctgcttttctgtataccctaaatatatctaggcttacaaagcctagatcagatgccaaataatccatggatttttccttagtctcctactcttaaatatctctcatttgaattcccatgacattttaaaatttcctttcctattctaatcacatccctgcttgtattagagaatatctctcttactacaactgtctgcctcttaaaagcaacaactatgacatatatttatatatctctagacacataaacctaaaaaaagcttacaaaggtgttcagtaaatgttccccaggctaaaataatgaataataatgtgtacaaagtcaaaggtaaaatagaacaatggcgggaattgactatacaaactgattcttcatagacttgtaaaactattatactacataaattactgcaaaaattaatgacagtagaaaggaggactaccactaacaaactaggatcctgggcttacaggggttaaggagatctaaccacaaggagaaaaaaaaagttcttaatttgccttcattaaagactaattttaggtctttggctaattaaatgaatacattgtttatgctccatacactttcggctcgagtcttggaaaatacgtggaacttccaagaattaaagtttccattaacgcaagtgccaaaatcaggaggcttgacctgtgggaaaaagcacatttgtcttcgctggctccttttcaaaaagctatagatgtttattgtataaccttttttgtgcgcaaatgctgttttatcattcagacccatctagacagaggaagaagctgcaacatttcagaaagcaaccaattactgaggaccgaatgacctggccttatcagcgctgaagtgttaacggccgtccctgtttggggtaaaatttcttcattgggagccagtcagtggtttctttttttctttcttttccttaaggggccgggggtggtggggggcagtcgctgttttgaggtgtgtgtgtgtttaattccctgagaactggctttggctggtgaagaaatactttactatagtgggtttcagaacatcttccacctgtatctctcctagcaggtggaaatttaatgtaaataattgtgtgtgcccacagcttgaacgctttggaagaatattttctgacctctctgcttttattcagtccgaagtagcccagttatcatgaagtagcccagttatctacctagattacaaaataaaattaaaattaaatctccttacgtcagtgaacttggagtcagaaagttctctcccctgagcagagagccttttaaagacttgtgtgtcacgctggcggcagggggtcgcggctactggaaaggagctggctctgcaggtcccgccctcccccgggtcgtccctccctctggcctgctccctacctcccggggacttgcgctcgccccctccccgcccgccccctactccgcgacaacgtcggcttccgaggtctggcgtgcgtcaaagccctaactgggaggctgatttgtggagcatcgcccccccgcccccgcccccccagtccctcctccttccactgaagtggccaagggagttgagctgagcagggggaggggaagatctacacccatcccccttcctctagccctccctgcgtttagattcagttgcaccttttattattttaactcttctccttaggacacgcagcccccaatttgtccctccggcctgggcggcccctggtcccgcgcgccagcatg

SEQ ID NO: 9146 - DNA, 2300 bp, Homo sapien
catgactcttaccatcatctgcttaataacattgcttaatgacattgaacgttttgtgaggaggcaacctttgctgcaaagtgataaagctcatggtaacaacatacacaaaacatacacattcatccaccatagtattaataatatgatacacaagagcgtagaaataacttaatctttttttaaaaaaagtcacatttagtctatcaagtggcctataaataggccagcacataaagtatcttgaatgaaagaggatccagcaatgaatttgaccgaacttattgtacttgacagtacaaggagtgcttactattattatctgtaatgattacgatgactatagtactttgcatgtttattgtacttgacagtttatattattgaatttaatctacacaacagctctgtgagataaagaggtcagtttatgaacaacaacatggaactatagtaaatatagtttttttggggttcagattcaggaacaaggtaaacttctgtcactaagttagcagcttattttttccatggctagtaataatgcacagatactttaaggactttcagtgggattaaagttataaggcaattaagtgatcaaaaatcaactgacatttttcattaaaacactatgtttatgactgatcatgttaggttagcctgatccttatgagttcagacacatgatttcaggtcccatgtgaactatcaatgatttattctctttttaatagccataggctattaagattttaattcataatttattatttctgatctattattcctgaaagacataggttaagctaatcacccttgcctgctctaaatctatctggtaaaaggactgcagctgccattctgagcctgacatcttatctcacagggcaatatggtctctgcacaaaagtgataggattaactgcatatatcatggtggagaaacaacatcaacactgcacaaacctctataagtccatatgcagtatggagaaatttattaaaacttgatagtcatatcacagaatttacttctctatttgtaatgcattgtattattaaatcaatacaggagtgaatgacaaagatcctggtttttaaagagcttgtattctagttggggaacagacaataaaaaaagataagtaaaagtgtgtagaatatcagattctgataaatcccatagagagaaataaagtgaggaggataaagggaatactagaaggaaaagtactcagtaagggataaaaatactttttggttggtatgatcacataaacagaataaaaactctgaattcccttaggagaaatatataagaaagaaaaatcaccaccaaatatgtatattttttagagacacaagatttttttttattatactttaagttctggggtacatgtgcagaacatgcaggtttgttacataggtatacatgtgccatggtggtttgctgcacccatcaacccatcatctacattaggtatttctcctaatgctatccctcccctaaccccctacccctcgagaggccccagtgtgtgatgttccccaacctgtgtccatgtgttctcattgttcaactcccacttatgagtgagaacatgcagtatttggttttctgttcctgtgttagtttgctgagaatgatggtttccagcttcatccatttccctgcaaaggacattagctcatccttttcgatggctgcatagtattccatggtgtatatgtgccatattttctttatccactctatcattgatgggcatttgggttggttccaagtctttgctattgtgaacagtgctgccataaacataagtgtgcatgtgtctttaaagtagaatgatttataatcctttgggtatatacccagtaatgggattgctgagtcaaacggtgtttctagttctagatacttgaggaatcaccacatgcttaaatggaaaagtgggtctcctgaatttcaacccctaactaagaaataactttcaatttgtaaacaaatattattttacttgtgattttactatgtgtgtgtaacttctgtttctccttaacaggaaaaattgtcattgatgggatagacatttccaaattaccactgcacacactacgttctagactttcaatcattctgcaggatccaatactattcagtggttccattaggtaggtaacatatttagcaacacctgtatgccttaggatttagcctttgactcatagaaaggttttactcagagtcatttttcaggtatgagtgaactgatatcaaggcaataaaatcaaat

SEQ ID NO: 9147 - DNA, 2300 bp, Homo sapien
aagagacttggagttgcacgtattgtttctgtttacttattattggctctttcattgcttggaaagattaagtactaggaatgtgaggaaatgctgtctttagctgggcagccatggacaactttaaatttcaattaatatagaagcaaagaatgggtattggggagacagctagcaaagtgcaagtgtccacctctttgatcatgcgaatttctagtctgttcttctcacacaaaggacatacccctgccaaaggggagaacctctgagacgtagtcatttactgcatccagctcaaatatcaggatctttggtgatgctcagtcttctcatcataaacatatttggatccctgtggtctaataacctaaaaagtaaagacaagtccttcctccccacaacctgatatgtatatagtatagtatgaagtacatacagggtaactttaatgaataaagttcctttggaaaagcaaaagatgggaacacagtcactggaccatagaaatgatcaaattttgattgtcaggaaatgcaaagcctgctttagcagtggagtccttcttaaggaagcccatcttggagtttctagatggtttaaacatctgagaggaattcctagcccattatcctttgtgtcccctggctttgcccactggaagtttcctccttggggccatagacagcatggagtatgccctcttgtgctatgcacagatttcagagcttactccctcctggtgcagctttataaattcagaaatttgcaggtcacaatattgtagatgtttgtaagccaggtatgtggtttttgttggcaacacaattccttcaataactttgtaagtttcttccagtcaatttgatgtgcagtaaatcagcaaatagtctcatccagatgtagattttacatttgttttatcactcattcattcattcatttttcacctattttcagaaagaaataaggtttgccctactaaaagcatttaaaacttcaatactaatgcttacatttttataaatgtatgaatgtttatatactatttgtggagcaataaaaattatatctagccggtgcccatctgaagcttaaacaaaagttttttgtatgtagaggaagaagaggaggaagatgaggatgataacatgtccactgtaatgaggctcaggactaaaatgccatggaaaacctgctggcgctacctgacatctggaggattcttcctgctcatcctgatgattttctctaagcttttgaagcattcggtcattgtagctatagactattggctggccacatggacatcggagtacagtataaacaatactggaaaagctgatcaggtacaattggttcggttttgtttttaaatcatcaaggaaatattgagattaacagtgataccttcttatctagttagatgcttatatcccaaatgccataggacttctgtgataatttaataagttaataattacaacaggacctgaaatagaataaactatcaaaaatgttaaaatagaagctattattaatacttttaaagtttatcataagaaatatttaaatataatgtttagacttgtattcaagagagtttatacatatatttttatatatgttatacatatatacacacagaggacctttttgtatttgttcttatggtatttgatgttaactacctacatcagtatattagctggtcattttgagactaggaatgagaaaagtgagctctacaacatagaaagccaagaatatgccccaaacctgaaaacaaactctttctcttcatctgcttttaagcaagccttgaaggagagtgaagggagcaggtggaggcttggcctgtggaattatggtggggatactaccctgggcctcaaaaaattgcattccttcaaccgtctaaatgcatgcaaaataatgaagaaaacaatcttgtctgacattgacatttggttttctagtaagaaagaactccattgataatttcctatgtgctttttgtgttggttgctttttagacctactatgtggctggctttagcatactctgtggagcaggcattttcctttgccttgttacatccctcactgtagaatggatgggtctcacagctgccaaaaatcttcaccacaaccttctcaataagataatccttggaccaataaggtaaaacagtggttatttctcactcccacacataaaataataaaaatatgcatttttcaatttaagtggaatgtgaaagttagaagaatttctttagtccttgagcaaatgaataggg

SEQ ID NO: 9148 - DNA, 2300 bp, Homo sapien
tgcttatagctaatgaagggtgtaatttgcaaagcagcaggttatattttagcatctacctcaatgatactagtttataaatgtggccaactggaatattataattttggataagattataaaagttgctaaagtaaaaatcattttctagtttgtgcgaggaaagtttatatatgtctttcaattaagagtgggctttaagttttctttttatcatttctactaaataaaggaagtagtctaaaaaattcattactagctattagtttttagttttgtttttgtctgtctttgccagaaatacatctaacatacacctataaattaataacttccattttgctgttttttaaaaacttcaagtcccttttattcttttatccagattaataccttaatagcttgttagaatttacccagtgtataacttcaccttgaggttttaaaaatacaactttttaaaaaaagatgagggaaagactcaactagagagcatatcaactatttattataaaaagagcttatcaggaacaatatgtgagaggcattctgtataagtatctaagattgtaaatacacagactctttagctgaggcattcatataatgctttataaaacctttgcttgaaatttgatttctctaataatttacctaccattgacaatcttttctgtataacactgttttttcctaggaaaagtattgtttgtgaccattgctaaatcaattatcaatgaaaggaaagaaagaaaaggtactatgctagttaataaaatttttgccagccttttgtaatgcaactcagaatccattgtgacataaatatagaaactaggtctagtgaggttaaaatcttaaactgctacttgttttaaagaatagatacgatagcttctttaaaaagcaggttggaggttgtgtaatacggtggaaagaaatagtttataagtcagatatttgggtgtggacatgaccgctttactggttggcaagttactgaacttatctggacctcagtatcctccattgtaaaagatgaattacaaggttgttctgaggatttaagatatgcaaagtgcccagaacttaaataagtagtaggcattataaaataagttttcagaatgtcaaagcttttcctggaatttcacagcagtattttcatggagcagacctttgctcatctcccatctgtttgggcacagcattaatagagaaccatttaacatgtaagtgagagcacgtcactcctctgccccggaatccccagtggcccacttcactaagagtagaagccgcaatcctgacaatgacttacaaagcacagtgtgaccttgtcctctgtttcctctctaaactcatctacttctactcatggagtaccaatttccagttaaaagacatcctgcgtttcaaacttgcgtagagtgtatttcttgtgagaatattctaactatggaatctgagtagtttcgttgacttgtcatttgagttaggtttaattcatcttgagcatttgatttttaatattcttcagggaaagactgattactgttagccattactgcaggcacacttgtttctgtatattagtatttcccacaactagtgaaatgtttcagcaaactctgtcacagtttactgaacaacttttgttgtttattagtacattttcagtgagtatgggaaaatatttgaaattataccattttgactttttagtcattggttcaattttttttctcctttttcttaatatatgaccatttttgttctttgaaagcattttagtcagacactcatttgaggtactactataggtagatattaattataatacattttccacatgaaagcatttttctctggaagtaaaagctatggaaaagaagatctcataggacgtattttataagaaagcttcaagttgctttggcacagagtttcttatttcctcagctatcaaagtaaaagggattaattttatgatatagccctctattcaaggctttaataattttatgaacaagagtttactaataagaggatttttctttctcatttctctcccttttagagtaaaccatataagaagaaatgagcctttcattttgtggtaacaacatttcttcatataatatcaacgatggtgtactacaaaattcctgctttgtggatgccctcaacctggtccctcatgtctttctgttgtttatcacttttccaatattgtttattggtaagtaatctagtatcttatgttataccatttgatgtttatatatctcgctaatggc

SEQ ID NO: 9149 - DNA, 2300 bp, Homo sapien
gacccatgaggtacacaagtatgtgaacaaactgccacaaaagaggggatacaaagattaatcaatagtggggaaatgttgaatgtgaataacagaattgaatattatctgtcaagttaaaatatttttttaaaataaaaaatagcaatatccaatgctggtttgagtataagtgtaatagctcatctcatacaatttgggggacttaatacgaacttcatagaagggtgattttgcattctatgttgacagccttaaaaatatctaccacttttgatcccgtaattatttttcacataatttatcttaaaacattacttgttagaaagaaaaaaagtttatgaaaaaaggtcatcatatgatcacagatattagtaaaattgggcaaatacatgtcaaacaacgggaaaatgaatcttatggtatagcctttcaatggaatagtatatagccatttaaattattttaaaaattattctatatttatttaaattatttatctttattgtcccattaaacagaggaggaagctgatacacagagggtttatgtgacttgttcagtctctgaactaactagcaggatgtgatatcgagcaggctgccttcctagtccacactcttaatcaatgcaccataccgcctgtgtttgttaaaacataaaaaaaaatgttttcagtagttttatgggtgtgtgtgcacaggtgcatctacggggggctccttgatctcctctgtacactttcacatcttccaaagtttctacaataagcatgatttttaaacattgtaaatgaccttaatgaattgtaatattcttttataatcctcaagtaaacttcattttgtgtagtcacactcaagagttttcatcttgggattattggcaccccctatttccagttctctctccatagatgccctggagagcctctggcctcgcgtccagcttgctcacccggccaccctgggctgcatccatagtaccaggatcctcactgttgaaacgctctcttatttccctgcgccgctgcagacagctccagggtaaagttgtcaagcgttcaaaggccacaggaacggagtcttcggaccctcccaggtttcggccccatatggcctcgcagattcctagcggccgcgggttcaagtcccagccgctgacgcaggtcaggcactcacccggaagcgcagcgaccttcccaagagtggggcgccggcggagaaatcccctgggactggcagggctggagtcggcctgcatcgcacaggccacgaggccaccggtgtttagggttcagatctggggaccagcgccagcagaccgcagtcctgcagcggcgccccttgaggacggcatgcggagcctcaggggcagaagtccgcccggctgaccatcctttattaaaatacgacagttcctgaaaacaatgcttatctcaagctgactcaaaactggctcttgagaaaatccggtgttaattaaagagggttgtcggggacaaaattcacggcttgtgtttcgcgggggagtggttgtggggtgatcttaatataaacacgttatctcgagagttaattatgtctctggttggaaacaggagaagagggtgactgtttacgcagtccatgggaatcagcgtctcactttaggggacggtgggcaagggtcgcccttcgatagcgcggcggctggtccaccagagaaaccaagttttctaggtcgccggggaaaagcggaaaattagacttgagccagccttgctcctgtgagacattcgtgcactcataacccagcagtgggtgcctctacctagaatgagcccttcatttcccggatccgttcagggggaaacagcgaaatccccaaatccgcttccttacgtggctaataaaggggtgcttacagagcatggaaaaacaaaacaaagaaacaagaataccttgagtgttttgacgtttgaaaacccgactccggagaatcatggaatcatattccaagtttcagtgtctaatgaagtttaaggggacgcctattacttgggtttgtaaaatcgcggcgtcgcgcccgccccaagtcaaagctgagcagagcagggatggggaaggtctccggccccaggcgcggcgcgcggggcttctgcccagtttcctgcttctcagccgcggtgtctgccccggcccagagcagtctgtgcaatttagaaactcgataggaggcagcagctggtctcccaccaccctaaaaataatccgttccggcgcactgcgtgcttcgcctaggggaggaaaactgtcatc

SEQ ID NO: 9150 - DNA, 2300 bp, Homo sapien
aagattacaaagaaggaacagtccctctcctggaagagttcaaagtctcttggtatttatgtaaatcgctataatctcatttgataagtaacagtggtgccacttgctctgttcccagcttagaggacaccaatatgccccaggagtcaaaactactcaggtgtctgtggtccactaggatttatgggcctgtagggaattactgtggagaagggcaactaaatcattaataggaatcaagattgttattggggtgtagtaggggtcctcacatgactaccaaaagctcagtgctggtgtctctgaggcacagcaactgcaaaggccctactcaaagagccagtgtatgggggcaagttgtccccttgcccttcagtgctggaatggctcatagagcctgcccctttcccaagcatggcattgatgtctgctcacagcctcccttatctgtgtctgcacgaagcaccttcttccagcaccagtcccaggaagggctgggccctcagttaattcacagactaagagatgtaaagtatccagtacctctcataggacccaaaacatcaaagacttcttctctcccctcaaaaatggccaagacctgagaagtacaaaatccttttgccctctgggagaaggcaagccgacacactacaatccattctttctgtttgtatcagcctccatctcagaaatgtaaaagactctacttccaaatataggcttgcaaacatgctgaaagacaaaatgcatgctaggtcagagatgcctgctttaaagtctctttttttttttttcctaagagaggtgtgtgtgggtgtatgtctttgagcctcttggctggatcagggtttaaatgctcaggcgtggcggctcatgcctataatcccagcactttgagaggctgaggcgggcagatcacttgaggtcaggagttcaagaccagcctggccaacctggtgaaacccccaactcaactaaaaatacaaaaattatctgggtgtggtggtgcccctctgtaatcccagctactcaggacgcttgagaatgggtggcagagggttgcagcgagccgagattgtgccactgcactccagccttctgggggacacagtgagaatctgtctcaaaaaaaaaaaagagtttaaatgatgcctccagaattctttctctttaatccctacatgtcattgttctgcttcctcagggagaacatcagtcttccagcccatttcagaacagcaaagcccccctgccgccctaccctacccttgccctgaggcttcaggttaacaaggtccttagcacccagtcagcacgagaaagatcctttctttccaagactctctggaaaggactccagtgggctctgcttggtcatatgcctgtccctagaccacaggtgtgttaaggaaaatggggtgcgtagatggaccagcttgggtcacacacagtgcagagaatgtgagggaaaccctcaccggatgagagagggatcaattcctaaaaggaaaagatttttagcagacaacaaaacaaaaccaaaaaaccaagtgtcggccacactagaggtgaccagtaaagctgacttccaaatttctgctgctagggaatgctgatgtcgatcaaagtgcggagagcatatgaaaaatggagtttttaaaacgttgagtttaaggcgcctgtaggatatttgaatgagctggtcagtaatttcttggaaaaaatgacccaggggcattaaaaaaaggtgtatgtttaaaatgtacattttaaaatataaaatggattcgtgtcagggtgcatcaaggtatgcaacgggaaacccaccacaattctaaagtggggaagttcttcagcaattataaatactttttttcttttttaattttagaaatttacagacacttgcaagcaccccaaaagccgcacttcctccaaatatctctggactcccactgcttgacttagttttggggtcacctcatcagagcctacttggcctactggccccagacgaggcggccgcggactacaattcccagcgagcaccgcgaggggcgggggagggggcggggcgagggacggccgcgcgcgccagctgccaggcggggatcgggcggcgccgagctgaggtggtgagggactagctcccggatgtggagaagctggggagaaggcgtgggaggaagatggactcggtggagaagggggccgccacctccgtctccaacccgcgggggcgaccgtcccggggccggccgccgaagctgcagcgcaactctcgcggcggccagggc

SEQ ID NO: 9151 - DNA, 2300 bp, Homo sapien
cagttcatcctacacacacattctccctcttgcctgccaccaagtaagacatgccactttgccttccaccaggattgtaagtttcctgaggcctcctcagccatgtggaactgtgagtcaattaaacctctttcctttacaaattacccagtctcagtggtattctttatagtaatgtgagaacggaccaatgtagtgtgacttggaagggtgagagcgatgacctgattagatttggtgctcatgttaagaaaaagcagggaataagtttggattgttgggtgggcagaagcccaccaaggtaagagaattcttagtttgcagaagaaagaaaaacagcacattgtgtcacacagatcttttgatgtaaagcatgactttaatgcattcttatgatattatatagggaaacatttacatagccccttcataactgtaatatgccctagttttgtttgtcagtttatttctttgttatttactctacaaatagtccttgaacttgaggaagaaaaatgggaatggtttgtgttttacttaaattataagatcaaagatggcagatgatttatccaaagcccaggcaagtaggaaaagctcccccttcccttccccttttccaggatagaagagagttggctggttactttgcaggacttaagatgatcttcattttaaagaatctgtatcagcctccactgtggtaagatgtgactgggatttcaaggtttcccctgtctctactgatttacctaagtaggacagagatttctggggcatgcctgccggtggagggcagtaggtcactcaactaagagcacagtattgttgagaaaatgacactaaagtggtcatctgggatgctacttcgcttttggtaaataactttgcatcaacttctcaagttccacctctcagtggagacggatgctagacaaaggtaccagacaccgcagcctggtcggctgaacaaatggagttatagccttagattttgttttcgtgatgactaagctgaccaggtttcttctttgtccttgcacactttatgcttgacgagatgcttaagcaaatagaataggcgaccgctaggaggtacccgagctatgcgtcggccgccggggcgagcagaaatggctaacagcgactctctcggctcggtgggtcaaggcgggtggtgcttttccaaggtcggggttgcgataagcttatcgcttatcacaagcaagaagggcaagaaggacgtctaagaaccaacggtcctttaatctaaaaggccgcgcgcctccaaggcaatgtgacatcttgaggtctagtgtttgggcaccagctgcctgcacatctggatgcagcacttcctttcagggaggaggcgaggcggaggaccccggagtgcacgcacctcctcgtgcgcgcgctcgcttgcgcccgtgaacgtgtgtgtgtgtgtgtgtgtgtgtgtgtgtgtgtgtgtgtgtgcgggcgcgcgcgcacacacacgggccgcggctccgggaccggctaatgggggtgggggcccaggaaggaataaatctccgccagcctcctcgcgcctggctgcgggttaatatccaaccagctagagaaagactagggtgacggcagcagggtgacagcctgggcacaccggccgcttgtcgaaggatcaggatattagccagtctccgccacactcagggactgatatatttctattggcggggggctgttggtttttattgtctgccgttatctccaaagaacaagggcacgagtgaggggtgcgcgctctgggcgagtgtcgcggctcggatcgggtcgaaggaggcaattttgcgggtgggggagggagggggagaccttgatttccaccaatccccgggcgtttgtctgcgaagtccggggcgcagcggaaggctgcggcgcgccgctgaattaactgatgagagcgagttcttttcttctccgggaggggtggggagcgagggtcccggcgggcgaggcggaggagcccggggcaggatagcggtcccgggccgccgtggaaatttccaaggacttggtgcggcgcagagagcgcgtctcggggcggggtgggggggggggggttgcctggcggcgcagcagcgcgggaggcggcgaagggcgcaggagcatcgctcggaggggacaaggggacgccacgggccacatgtttaggagggagccgagccttctcccggaccctcgccgagggcgaccgtgatgctgcagaaccggcgggagcgactcgccgccgccgctctctgcgcactcggaga

SEQ ID NO: 9152 - DNA, 2300 bp, Homo sapien
tttaagtggggcacttaggcatttacattcaacgttaatattgaaatgttaggtaccattgcactgatcatgctctttgttgcctatgtactttgttttgttttttgtttttgcttttttaacttatatttttgttttataggtcctgtgtgacttatgctttaaagaggtcctgttttgatgtgtttctaggatttgtttcaggatttagagctccttttagcaattcttacagtggttgcttggtaatggcaaattctctcagcatttgtttatctgaaaatgactgtatctttccttcatatcatgcttagtttcactggatacaaagtttttggctgataattgtttcgtttgagtaggctgaagatagggcctcaattccttctagcttgtagggtttctgctgagaaatctgctgttaatctgatgggttttccttcataggttacctggtgcttctgtctcacagctcttaagattctttccttcatcttaactttgtataacctgaggacaatgtgcctgggtgaagatctttttgcggtgaatttcccaggtgttctttgtgcttcttgtatttgcatgtctaggtctctagcaaggctggggaagttttccttgattattcccccaaatattgttttccaagcttctagaattgtcttcttcctcaggaacaccgattattcttaggttttgtcatttaacacaatcccagatttcttggaggctttgttcatattttctaattcttttttctttgtctttgtagaagtgggttaatttgaagaccttgtcttcgagctctgaatttttttcttccacttgttcagttctattgctgagactttccagagcattttgcattcctgaagtgtatccaaagtttcctgaatttttgattttttgtttaagttatctatttccttggatatttctcccttctcttcttgtatcattttttggatttcgttgcattggcctttgcctttctctggcccctccctgattagctcaataactaacctcctgaattcttttcaagataaataagagatttcgtcttggtttggatctattgctggtgaactagtgtgatttttgagggggtattgatgagccttgttttgtcatattaccagggttggttttctggctccttctcatttgagtaggttctgtcagagtctagggctgaaagatgttgtttggatttttttgtcccatggagtgttctgttggtgtagtactctcccacttttcctgtggttgtggctccctgtgagctgaactgcagtgatcgttgtctctcttctgggtctaggcattcagagagtctacccagctctgggctggtactaggggttgtctgcacagagtcctgtgatgcgaaccatctatgagtttctcagccatggataccagtgcctgttccagtggaggtggcagagggtgcaatgtactttgtgggggcccttagctttggtggtttaatgctctatttttgtgctggttggcctcctgccaggaggtggcactttccagaaagcatcaactgtagtagtgtggagaggggccagtgatgggtggggcccaagaactcccaaaattatatgccctttgtcttccactaccagggtgggtagggaaggaccagcaggtgggggtggggctaggtgtgtctgggctcagactctccttggacgggtcttgctgtggctgctgtggggcatggggtgagattcccagatcactggagttgtgtacctaggaggattatggctgcttctgttgagtcatgcaggttgtcagggaagtgggagaaagccggcagtcacagacctcacccagctctcacacaaaccaaagggccagtctcactcccaccgtgcctaccacaacagtccgagtctgtttccaggtgcagggcgagacaggcttgaaaacttgcccgaggctttctgtctcctagccgcgaaagaaaagagctttagttcttcccctgcctgtgaagtctgcaagccagatttgtaccctcccccaagttctgactaggaggtttctcacctcgttcaaattgttacaaagttcagccagggaattccttctccctgtggagttttaccctctgctcttctggccaccctcctgatggatccctgcggtgccaggcaggaatgggcagcttggggacccactgagcccccagggcctttctgctgctttctctacccctgtattttgtttggctcggctctctaacttgactcagctccaggtaaagttggaaacttctc

SEQ ID NO: 9153 - DNA, 2300 bp, Homo sapien
gctgtcctcctgccttgcctcccaaagcactgagattacaggcatgagccactactcctggcttggaattttttagttagcttgctttaacttatattcattgaaaagaataaaacttcttttgttttaaatcagattcttgcattgttaagaatatataatctgggatcataaagatctgaattttaatcctggatctgccacttaacagctattgacactgtaaattacttaatttttattaaaaatttcttcctttgtaaaatggggatgatactaccttattgggttgatgtgactgctctgagatactacctgtaaagtgtttagtacatcgtgtatcagtgctcagcaaatgttgtcaccataatcattatcatcatcatcaattcaaatgggactcctttctaattagtcttgggtcaaagtggagacttgtgaaaatgaaaattattcatattctaatgcatacgtgttgtgcttcagaaaatatacagaaactactgaaaaagaaaataactaggaaacaaagctggcattactattatgatcaacacattacagatgcaccttgatttgtgatggcgttatatccagataaactcatcccaagttgaaaatgcatttaatatatctaatcaaccaaacattatagcttagcctagcctatctcaaatgtgcaccgaacacttatattagcctacagttggacagaatcaactaaaacaaagactattttttaaataaagtattgaacatctcatgtaattcattgaattctggactgaaagtgaaaatcagaatggttttgcaccatggtaaagttcaaaaaattgtgagttaaatcattgtattttaaaatcattatttagcattaatttgcttcattatttaattgtacattactttcttaaggtagaaacttgattttctttttaaatttataggtatccgtggggaaatcaatgtagttgtcaaagtagacctcttcaatgatttaaatcgatttaggcagtcatcatgtggagtcaaattcttttgcagtaagtaaatacattctattactcaacaggaaatgtaataactgttaaatatgagaaatcaagttaacatttcagaaggcaagtagaaaagctattgtacttggttttaatgccaaagagaaaattgttaattttctagaatagttacagtagttctgatttgagtataaatgatatctagtttttgaaaatttatagaaatttttattagaaaaatccagtgacatttcactgtagtataggacactaaaagaaaggagcagaacactacggctaagcactatggtgctgtcccaaaatacacaggcttttatgggtattgggtctagggaactccatgaaatatatgggtctgaaatgggcagatcttggtgatcacagcccgcctgcagtagtaggattgaaatccctaagtagttgacttagcttcagtgcaccaatgtttattttaagagactaatttggtacagatgtattcaggttctctctctcctttttgaatctgaacttgactcctcaggttatgtcagaaaggtaatggtttgatttttgaaactgctatgtggtgtacagaagtacttttacaaagggctttgaataattaaagatttaaaaaaattcattatctgctttctacctatttatataataattagctagctgacttaaattttgattttttaaactttgtattgaattctgtttaaggtcttctatagctgttttccaaattatacaaatgcagtttatatttactttgcttacatgagaaaggtgagagcctccatgaaagacaataattatttctaaaaatgaaatagatcttagaagactggaagtattattataattacattgaaaatattacagtaaaagatgttcttgtattatgtatctaaaggtcagaaaattgagatgtacattttttaaaaattgagttttaccttttgataaacagaagcataataatttgttttaacagcaacgtctattccaaaatgctatagagctgtgataattcatggatttgtagaagaacttgtggtcaatgaagacccagaatatcagtggattgatcgaattcgcacaccaagggcatcaaatgaggccagacagagactcatttcgttaatgtcaggtatttaaaaaaaataactttattactgactgatttagtactctcttaaattttttgctttcctttgacatgctacctcaactttacaatgaaggctatgaattataagtgactgcatg

SEQ ID NO: 9154 - DNA, 2300 bp, Homo sapien
tccatctcttcaaaaaatttaaaaaactagcggtgcatggtggtatgtgcttgtagtcccaggaacttggggggctgaggtgggaggatcgcttggcccagaagattgaggctgtagtgagctatgatcatgtcactgcactccagtgtgggacacagagtgagtccctgtctctaaataaataaataaataaaaaacgttgatcacatagtgtagccaaccttcagaattctggcaagggtattttaagggcagagtcagactccagaaaaagctgcaggtggacctaaggaaattcgcatgggatctatgacccctattcctttgacatagtttgaattgataaaagtttctctagtccaaaaagcaagcgatttttttagatttttattttgaggaagtcgttttctctgtaggagttcaatttctcacttatgtgaacaatattcctgccatagaaggaatttttgtcatgaaaagataattcgggatcactactgtttggagtatttactctattgagtattttcgaagttaaaaagatcatacggatatcttcacttaggaatgaaatgttacaatctttgagccggcatgaactctgattttgttgatactgggtatactgtcaatgctgattttgatatttggtaaggactgatttatttacatcttgtgtgtgcctcaatttccctaatatggtctgagcctgtagataacaccttactttatttatagttgggtcaattcttcaagatgtttaacgctctccatgtttatttcttgtggttgactatactttccatggtaggaagtcctgaacttctgctactactgtaggtcttatctttaggcttgtggatgcttaataagaacactgagatgatctaagagtgcaggacatttaattaaaaaaaaattttttttaagagacagagttttgctctgttgcccaggttggggtgcagtggtgagatggcagctcactgcagcctcaaactcctgggctcaagcaattctcccagattctcccacctcagcttcctaggtagctgagaccacagacgagccaccggcccagctaatttttgcatttcttgtaaagaaggggtcttactgtgttgcctcgtctccatgaggctggtctcgaactcctggactcaatcgatcctcccacctcagcctcccacagtgctgggattacaaatctgagccaccacacctaccagcagaaactttttttcaagaggagactttggatttcaaggtgacctcccccaccccgcccacagtaatatctgtgacccagtgcacaacacaagtgcctatgactgaataaaatatttcactaaatatttatttcactattcgagatgtgcctggtatctctatttctttctttcttttttttctttttttggagacagaggagtgatctcggctcactgcaacctccgcctcgcaggttcaagcgattttcctgcctcagcctcctgagtagctggaattagaggcgctcgccacgacgcccagctaatttttgtatttttagtagagacggggtttcgccatgttgtccaggctggtcttgaactcctgacctcaggtgatccgcccgcctcggccacccaaagtgctgggattacagacgtgagccactgtgcctggccatctaactctatttcacagaaaactggaaccaccacacgcacctgtaccccttccaagtagaaaccagctaatttggttttacgaatcactaaaggccgactgaaaacgctcttctagcagtcttcgctgctactccatctatcacagcccatccgaaaagcggcggtagcagctgggaaggccgcggccggaggctgtcacagagcagcactcgcgcttcggcccgcaagatggagcgtttccctccagggaagcagcgccgcacctatccacagcccccactcggtggatgatgcaggactcggcccatttccctgccctccagctttctcaacgtcagccccgcccccttatctttcctcggcgagtttagtttcgccccgccaagtgggcagagcgccgaacgatcgatgctttcttccgcgccccgagagccgccatttttgagagcgggggaggagagacaagcaggggcggcagaggctcaacgggatgctgactgggttttgcttttcgtcccagccttgtggggccgggacggaagaacccatcaaagcccttcctcccgccgcctctccggaatgaggtctcagcacccgcgcgggacagcacccttcctcctgcgacag

SEQ ID NO: 9155 - DNA, 2300 bp, Homo sapien
ttccccaaattaatttttatgcataataagagggagggatcaaaatttttttctcatacaaaaagcaattgtatcactacggttcattgatcagtctggactttctcactaatttttaatgctacttttgttatatacaaagttctcatatgtgtgtaggttttgttctgggactttattatgttctagtagtttatttgcccatacctaaaccaatatataatacatcctggtagggttggtcctcccaatatattccctgatcttacctgtccctatcctcctctccccaattacagcgcttttcttggaccttaagttttgatatgaatttcaatgtcattttaacaagttcagtaaaaaaacccttttgagattttaactggaattgcattatatgtactgattagttcagggaaaattgaggcctttacattaatcttttctcatttatgaatatggttcatttctccattaattttatccatggatcctgtacattttcggttacttttgttctcaggtacctaatagtttttttttcttttcttctacttgttaatggactcttatttaccattacaaactagtgcagtttgcaacataattttcaattaaattgttttacagttacatagttttaaaattcttaaaatgtcaactgcttaataaaaaatacaatttatacaaaaatacaagagatactatctgaaatgtgaaagtagtagtatatttatgatttctccccaaagtggaaggaacacacactctaatgtttcttgtagaaaattatgcctaaatctggcagggcgcggtggctcacgcctgtaatcccagcactttgcgaggccgaggtgggtggatcacctgaggtcaggagttcgagaccagcctggccaacatggtgaaacccatctctactaaagatacaaaaatttgctgggcgtggtggcacgcgccggtaatcccagctactcgagaggctgaagcaggagaatcccttaaacccgggaggcggaggttgcagtgggccaagatcgcgccattgcactccagcctgggcgacagagtgaggctccgtctcaaaaacaaaacaaaaaaaaacagaaacaaaaaacaaacaaaaaaaccactaaatttgaaaaatgttaaatcaacttctttgctgtattataaagctccatttccacccctctttttagtttaggaagtttaccgttatcggtgaagtaattattttgttaattacaaaggtaagtaggttctttctgaacaatcaggatgtaaacttaatgctagtgaagtaattaaacattttgaatgttaattaaactcagtccagttaagggttttatttactactaacaaacgtattcaccgtgtgctaagtgctgcagggaatcccagcccgttttcctccatctaaaaggaaaattaggaggtcccaatactttacttgtagattttccagtttctaccattccctgtaaggcactgagacgcaagatttcaaggcccactcggggtaccctggcatggacatcgagtcgttctagcgctgagcttcaaaactattcctttccttccctttcttcttcataccagactctaatctgttctccctagcttcgaattattcactgtatggtcgaacatcttactccacaaataacctctgaagtgttgcagttgtcttacccaaatacctgaactcagcttgtcccgagtactgcgatcccgcgtactgctaatgggaatatagttaacccaactagtatgaggtccccagtacacagcagctccaagatcaaggcgaccgagtaacactgcttgcctagactcaggccaagttcggagagtgatcctggggttattttagaacgtgtcccttgcttcccagaaaaattcagtcgttaactcaagtccagatgcccaatgaccattcggataaggtgagctaaagcttcaatgccttgaggggcttggcagggctcgggctcatcccggagaagcagccccgctttccagactagcagttcccagggatgggtgtgtgctaatcgcaggccaacaagcccagcgcggtacagaggtcccattgtgaccggaggcgagaaaccccgcctcggcaccctgacgcagcgcaggacccgccccgcgcgtgacgccagcgtcaggccagccccggcatgctctgcggccgcccgcggtccagctccgacaacaggaattttctccgagagcgggccgggctcagttcagctgctgtccagacccggatcggcaacagtgccgcctcc

SEQ ID NO: 9156 - DNA, 2300 bp, Homo sapien
agcacacataattattttacagttactaattacatgctaatttccctgtaagtccaaaacccatatttttcctgacataagttgtgttactttatgttgtggtctgttatgcagaattaagccagtaagatcattttcagatgtttgtcacccctagaacatttttcacatttaaatatatttattgcttgtgagatttggattttcttttgtgtttatatttgtatgtcaagaaacaaaggcctttgatataataatgtgtaagcctgttagcaattataaccattaaaaacactaacatctatcagtgctgatggtaaactttgctttataaaaaagcacatcacaggaactggcctctatttttcaagtgattataatttaccataatctcctttggtgttgacgaaagtgatctgtagccatctagtgggtgcagacgtcagtaggatctaggttttagacgctttatataaaaagaacagcaagaaagtgtggtgcatggagttgatttagaggatagaattagcaattcatatgtgttttacagagaaattcattatcataatttttgatttttctttccttcttttaaggcttctcatttcttttggggattgtgggctttgattcaagccaaatactccactattgagtttgatttccttgggtaagttaaattttattatatgattacattggtctctgcttttgtttggattaacattaagaattcacagggaatattgtagttatttgcaatcaattataaaagttgtatacacttagtaattggtctgtgaagaaattgctataagctgttaagtgctcgcaggattagaaaagtgtccagtaggtggtgcaataaactaaaaatatgtcctttgaaaatcttaaactttaagaaaaccagcttagaggactgagtgaaaataagggaaggaccaagtttttcagctttgactaatttttttgttgttctcttttctcactaggtatgcaattgttcgttttaaccagtactttaaaatgaagcctgaggttactgcattaaaagtgcctgagtaaagaagagatttaattattctccagtagctgagcaatgcttgtgaatcttttcttaagaaatcccaaaaagccaatattagttaaaattctgttgtttaatttggttatcttgctttataaattatgcctctaaacaatcaaatctatttttgaaatagactgaatgatgtcaagaaatatacctactgctatccgtatgtggtggattagaaatgtgttaaatctgcaaaaggtataaagatgtcagtttaatttctttgataatttaacctatgttgtatgtgaattatttattataaacttagcacgattctgtgactgtttttctctgtttcacgttcgttgagtgtaagcaatgaaaatgtcccaaataagttttttaagttttactttaataagattaatttcagtaaacattctagttgttcagtgtaacctttttatcttgatgcattgtaagtaaaatgaatcatttactcttgaaatgccagtcattgactgatgtagataatttaggattttcatataaaaatagctgtttaggaaggtgaaatacattcactgtctctgttggtggtacatcttgttgaattcaatattagaaagtatttctttttggggtaatataacttagaattaaatccctgtttctctatgtagtctggcagtataaatataaatatttaccatataatcttggaataagtattagttaatgttaccaaaatctgtattaaataatgttttcaaatgctaaatatggtcgttactattttcagttttaaaaattttatagtatcaaattgtttctaaccaaaaatttccttttacttctagagatgctttatgtttttgattattaaatagtcactagtattgctaatttttgaaacaaatacacaaaatttatcatatgtagaaataagaaaatattgtttaggttaattattttttacctatccagagtcattccttacatttcagtttcatgtttcattcctcacattttagtttcatgttttagtttgattctatgtttttagactgatagcaaatgattacttgatacatgtaagttcagcgttatatgttgaggcagttatataattaaataaggaacacttagggcattgatcttgtacacttaaaatctgacaaatgacaaaatgtgaattaagcataaatagtcatggcaggagggcttttgtttatttctcttgtttttgtttaac

SEQ ID NO: 9157 - DNA, 2300 bp, Homo sapien
gcgtgcaaaaagtatttcagctgtggttggtgtcagtgtaagtctttctagataactgatgttccaaacgttgccagattactgggattttatttcctcttttatcctagaatccttataaatcacccgtatttttttattttgtctttgttaattcataaatacttttttcctccaaaagatggatcttaaagtgggtaaccacaacaggctttgcttttccttccttcctcttgacttttttcctttttttaataccctacagtctcccaaatgaaggtacattgtttctgtgtcaattgccttcttctgatcctttagctgtggcactaaactgggaacgagataatctggttttaatcccctgttctgcccttaatgagcagcctgcccttgaacaagcagcttaaactccaggtcatcttctcttcatctacaatcgacaatgctcatacctgtccccattacttaataagagtcagataatgtaatggatttgaatacattttatagaattattaggattataaaatcataattgatcacaggcgatgatatcaagcctccatacatatgttttggggtaggatttggctctactaacttggtataatccccgcacacacaaaaaatctattaacatgtattagagttatagaagataaatattaaggagatatagagcaaatcaagcaagcaaaaagaagatttacaatgctctatcttttcttatagaatattttgaatgtccagagagttgcatagattttcttttttattccttccattaatccagtgttgaagttcccataatttagcatgaataaaaattactgtataatgttgtatatacaaaaatatgtatactctactttatggataatttgagggattttcaagggtaatttcgactacgtaattttcaccttacatgctgaatttagaacttaactctgcataagatttgactcctctgcgttttcatcgtccctgtgtccaaaaaggtggcaaaaaagagaacttttatattatgcagaaagattccttgaagagagcaaatacattttttaaaacctaggctagcagtggttttgtacggctgatatattcaaggaatgtaacacattattatcacttacattttcgttttctgagaatagaggcgtagtttttaggaccccagagagaatcagttttgcataagtcgtgaatttctttatctaatacctatattttaactacacatcctaactctgctttctagtttggctttcagagtgtaggtcacaaaagcctaagccgtgcctccgaaggtcagaccaagcgttctcatatcagaaacaaaaaactctgttttaattctttcattttttaacagcccagcaggctttctttgttttgtgagagtgggtagttcacttttctcatgcttgaaaattatgccacccatttatgtgctctgaaagcaggttttgaaatgggtaggaaaagacaagccatggctattttggtagaaaattgaaagtactcaggtggaagggaatcaagaaacaaggctgttaagtactgtatcaggattgcaggcccatccgaagtcgaggagcacctgtagatgaatttcccttcctttgccaagccttccccctggtgacccccatttatctttaacaagaagtcttacacaagtgtaattcataggtaacaaggcaaagcctctgctattactgttggggttctcgctttttgcctgtgtgccctaaaatggtgaatttaaaaaagcaattgtaagaattaatcagagagagagagagaagcaaaatatgtatcttgtaaatggtatttatttccaaagttccggtttttttttttctatgaaattgtgtctccttatacaaaaggtatgtgagtctggttcttgcttcactcaatatcgttgaaaatgtttatttctggccatgaaaaaagcaatctatctacctaaatcagaatgttcatatgagggaaaactgccctacatagaaaaatcagatgttccttgaagtagcccagagggtggagtccatatgctgcagtgagagttccatacttaggagtcttcgaattctgcactctggactcctacggaccaagatgatcaactctgaggaagaaaggtagtagccttgcaccacaggactttaactgactgattctgagagccaccgtctaacagcttgcaaaatttgggaagaaaatccccagagtgagatctgaggattgtaaatgcaaagggttaaaaacagataatttctggattcttg

SEQ ID NO: 9158 - DNA, 2300 bp, Homo sapien
ttccccagccaacaggcaatatcagtggtcagatatgtgaataaagccatgttgaacctctcggctagacgaccctccagcatatgaaaccagcagatgaatatcccagcctgcctgaagaactgtacaggaaataagaaatcattgttttttaagccactgggttggtgggtggtttgttacattgaaattgttaactaaaacagaaattggtgcatagaggtcaggtgctgtcataataaaaatctaaaacatatactgttggctttggtgatgggagtgattggtagctaaagaggcagtgaaacaatgattagtagatactgggaagttaataaggaaatttctattggagggtggagaaagggccacccttgttatatagtggccaaagaatcagcaaaatgttgcctgctgcaacctggaaagtagaaacttttcttaaactcacggatctggctgggagatttccaggatgcatgcaacaaatgtgaatcaactttgtatagctgtgtataataaagtgtgctgtatttgtccattctgatgctgctaataaagacatacctgagactgaataatttataaaggaaagaggtttaattgacacatgaggcctcaggaaacttacaatcgtggtggaaggggaagcaaacacatccttcttcacatggcagcaggaaggagaatgaatgaccagtgaaggggaaaatcccttataaaaccatcagatcttgtgagaacgaagtcagtatcatgagaacaggatgggggaagctgcccccatcattcaattatctccacctggtccctcccccataacacgtggggattatggaaactacaattgaagatgagatttgggcggggacataccaaaaccatattatgtgggaagagagattaattaaaaaagcaacttttcaatttgcaagcagaatttagagaaaatatagaaaacccaggatgagctggattgaaaaagattatcaaagaaaattttaatataggtaaaaatttaattccagaagacagtcaataaaatgtggcctcaatggtaagatcaaatagaaggatgtggctgttaggccctaacaaaataacccagaatgatttcttatagagtatttagtagacctctcatctaaacaaatgattgtctatgaatccagacccatcactcaaataggcccatcatccaaattagagagaggcctaccttgacaagaatagtaagcctggctgtcatctaacagagtagaatttaatctgatccatagaaatcccataaggaattttaaaggaactatattgatttggattaaaagggacagagacagttcaagaagactccatgccatcaatttcctacagacaaaaagtgagttgagaaaactacttagatgcagtcatgggctatttctttcttacagaaaaagaaggatctctcggaggctaagcaaaccatccagagtgtggacccaaaatccaaaaaacaaaattaattagagagccactccaagagataagaaataggccctaatcagggaacattccctgtccctggacatgtacctgtttggatttcacaattgcttcagaccattgattgctatgtgctcccagtcctttctctttttaaaaaagaggattattcattgtggttattttttctttgtctcaccatttcatcttagatatttgaataaaagagggtaaaagccttgtagttttggttcacagaactctggatcatgaaagccaaggagctccacagagaaacctcctttgtatctggaccagaggggaagctcaaacttgtggatttccagcctgatgcaatacctgggataaaacttttgcaattattgtgataggagtaagcgtactttccatgtgcaaaaatgattaatttgtggccagaaaatggagtgtggtaaatttgtggtttgatagccacaaattccacccatcccaatatgcatgccctttggcttctcctttcatccaaagacaggatatatgtctatatccctttcaatcttgactggcattgtgacttatttgaccagtagaatgtggtagaagggacagggcatgagtttttaatcctgggccacaagaggccctgacacttcctctgttgctctcttgaaaccttcacgaaaggaagccaacctaggcagcatccaacactgactgccagacatgtaagtgagaccatcttggatttccccgcccagacgaccatctggctgaataagtgaaatcaagtgaaggcagaagaggagctgcccagc

SEQ ID NO: 9159 - DNA, 2300 bp, Homo sapien
gctgtgcatccttggtgtgagaacctctctaaagtctcatttgcttcacctgctctgtctggaatctggcattgctggccagttcctcactgtctccctggctgcagttgccagtagacaaacacttcctgcccggccattagactcactttggtgttcttctccatggtgagtctgactcagcctgaccttgtagattgctggccccagttcacttgacctcaagaacctccttgctcactcctgccttgcacgactccttggcttctagaccctccacttcccctgactcacttctagctgcaaaatccttagcgcccggccaggtttccaggcactgacctctggcagatctggatgtttaaccagcagcctgtctggctctgccttaaacttctacctgactccaacagatttcttcaaaaacattttaagttagcgttcaagtgctaaagaatgggacaaatgcaagtcaccagtgtcaatggctggctggttgcttggggacaaaagaactcacaggatagctttgcctggtaacttcataacttcactgaggtccatggacagccaatgaaacatatcatttatcacgagaagtcacacttatattctcatttaaatctgtagtgccatcccgcatctctagttccatttttctctgcattttccttatttaggttaagtacttgtttatctcttttactggtcttttaaataacgtgttgtggtatttacttacctgtttttttcttatatatacttatctgtatatcagtatatacttatctgtatatcagtatatacttatctgttatgataataaattaatttcattaattttgttgttaattttatcttcctttttctcagttatttagtaacttcctatttctcttagttatttagaacatagactttgtaaccagactgactgcccaggctataaacttggctctgctgattactaggcatgtaatcttggatgagttgtttaatccctcatgactcagtttcctcacctatgaaacagaaacaatgataaacttacctcatcaagttgacactcatggctactttgaaattataataattattagaacccaccaccagaaattgttaatgccatcattataaagcatgtatattatgttattacaaatttattttatacatatgctgataatcataattcaattttttataattctttgtaatttattttatgtatctacatttattttgagatgagctttgtaggattcaccaatctgccagaagtttccgtggcacaaacaaagttaacaattccctgccttacagaatggcagagcagcaggttgagaggaacttagattctgggattattccttagaatgcccttcattgtcttctctcctctggagtattacaagagagaaataaatttctctctttggggctattgtactttgaggtatagcatcaaaacacgtactctaacaccctaagcctcaaactttcatgcatgcagatatcttattgcactttgaaagtgaaagctgttggggctgtgtttgatatttttgggttgcattcctccctgacccctccacctctgaccggtagacattattccaccaccttctaacattcagtgtttcagatgagaagtacaatgccagtgcaatgtttctttcctttgtaagtaatttctttatttttttccagaagctcgtaacaattttctcgtagtgttcagactctaagacttttacagttgaatatattttattatctactcctcctggaatataaagagccttgtctgcaaacatgcttttcatgtcctttagataattttcttttatatgtttattaactactgatatggtttcactctgtgtccccatccaaatctcatcttgtagctcccataattcccatgtgttgtgggagggacccagtgagagaggattgaattgtgagggcagagctttcccgtgctgttcttgggtttgtgaatgggtctcatgagatccaatggttttaaaaataggagttttcctgcacaagctctctctctcttgcctgctgccatgtgagacgtgcctttcacctcccgccatgatcgtgaggcctccccagcgatgtggaactgtaagtccaataaacctcttccttttgtaaatttccctgtctcaggtatgtctttatcagcagcatgaaaacggactaatacaactattgtcctttatcttttttcttttaaagaattcaatcattttcatgttaagtttcctaaatgtatcttgtattta

SEQ ID NO: 9160 - DNA, 2300 bp, Homo sapien
tcaccgtgttggccaggatagtctcaatctcctgacctcatgatctgcctgacttggcctcccaaagtgctgggattacaggtgtgagccactgcacccagccattgcccctatagtttttaaaatgctaaagtaaacttctccaaattaaatgttgcatcagtgatggaattatttcacttcctgtcaagatcttatgaatcaatatagatttggtataatagtctttaatttcttacttatctgacatcatagaagattgctaatttgaattgtctcatgaattttcaattttttttttctgaaacagacaatataaactgaaataagatctattacaaaggtaactttttcctagtctgttcatgggattcttaagtgcacataaccacagaatcaaataataatctaataatattaagccacttaaaaatatagacttgaggccaggcgccatggctcatgcctgtaatcccagcactttgggaggccaacgcaggcagatcacttgaggtcaggagttcaagactagctggccaacatggtgaaaccctgtctctactaaaaatacaaaaattagccggacgtggtggtgtgcaccacgtagtagtgtcccagctactcaggaggctgaggcaggagaatcacttgaagtggcaggcggagatcacgatgagccgagattgcaccactgcactccagcctgggcaacagagcaagactccatctcaaaaaaaaaaaaaaaaaaaaatatatatatatatatgtgtgtgtgtgtgtgtgtgtgtgtgtatatatatatataaacttgatatcgatgtcatattttaccatttaaccatttcataaaatgatttatttcagtggttcttttggtaggactgtgcattaaatttttgtatacagtaattaacatatactttaatgtcacctgactaccccatttgattaaaaatttttctactttcaacaaatcctgttattggtaaatattttatgttcttaactcgtgaaatagctacgtggaaactaaatttttattctacaataatattaatgtaaaattagatatattgtaaacgttgataaataaacaagtggtaagatattccaattttagagcacacgaaaggaacaaaataactttttcaatttccaatttaaaaagtgatataatgttaatattatctcattcttatattcttatatgatgtaatataaattttaatgatactgtatctataagtctcatgtatgaaattacctaagagaacgatttaaaattgagtataaactgtgttttgacctgtcaaaccatagaacagctggaaatcatcaaccatgctgaactgatcacatgatcttcgtgacacatatagtataagagaaaccaggtactgaaagagaaacctagaaaacacatctggattttgaaaacatggtgtttgtttagtgtttagaacagtatgacatataaataagttgcacatagtagggtgatgttaattatgtttattttcatttttagatcaaattcaaaggtgtttctgtgaaacctagggagaaaggattattttctaagaaagctagaaattttcttgtgtgtgcgtgttgaatttggagagcagttctgatcagaggcacacaactatctgtggtcctccatcatgggtgttccaggtgctctgcctaggtaccagggtacaaagatgcatcagatccaaccccttttctttggagattaaaaaaaaaacctacctacatcatatttcagatttaatgtgtaatatctctcaatacaaatgaatatagcacaaagagtagctttttaagaatatttcttacaggttacaaaaattatctgctttctgtgggtagttgagtacacatgtactttctcttatacaaaaggtattttgaatgtatagttgaaggaggcattatgttgacagctaagcaaatgctgtaatgttcagaatgaatgttaagatcactgattggtagagtaatttgatgggaaatgacaggctgcatacctgtgtttttctaggcattttttatcagcctttccttatcacagctcatgttctaatgatcattgcaggatgaagtggcacagccactgaacctatcagctaaacccaagacctctgatggcaaatcacccacatcacccacctctccccatatgccagctctgagaataaacagtggggcaggccccctcaaagcctctgtcccagcagcgttagctagtccttcagccagagttagcacaataggtaagttctgtttctttt

SEQ ID NO: 9161 - DNA, 2300 bp, Homo sapien
aatcttccaacaactcatgcccttgatatatttttgtaagttttcagactcttcaagaaaaaaaaaaaagtggtctaaggattcacagaataaggaaatgataactttatgaaaagttataaaatttaaacacctaatatccagaattcaaatccaagaatcaatcactttagtgacaaataattcaatctaaataatccgaacgaaatgaaatgcaagaatttttttttccccgtaaaactcttccttcatgacattgttttagattaatcataatgatatttatttcactatcgaagtttcctagtcacttacattgccttaaaatgttttctcttctagtgtatagatttcttctgtctcatgacctaccactctcttgggaatagtgtttgtggaacaaattaaagaattaacctaccacttgggggaaaaacaagagacaggggtagatggcacaactgttctaattttgtgttcataaaggaaaattgctaattaagtggccttgttgtcttactcgaggttcgtgatcttgtgctaaggggaacaaaaatgcagacacatacacacggagtgggtttaagagcgtaaagtttaataggcaaaagaaaggagggagagagagagcgcgcttcctcatgcagaggaaggggatgttcaagcggatttctgggtttggggagagatgtggtccattttatagaggggcttaaggaggccgtatttgattcacatagggcccaggagattggattgaccaggtgtcaggtgtgccatttacatagcccgtgaatcttttattatgcaaatggggtttacctggccgttgccatgacacccacacacgggggcgacaaagagaagagaggagatatcctccatgttgaatgtacctggcttctgacatagctgccggcatttacctatgcaaacttctagcttgcttatctatgtttgcagcttgatttctcagggtgctttttgttagaaatgttttaggggctgctttttattaaagaaaaattccactgagaactcctttaacctcactaactgcctaaataatttcttactaactcctatatcactattactgtactgctcttaacctgaacagtggaactcagtctaggttaaagcaagtggagtacgagaagtgagttttgcatttaaattttatttttacttatttttggactttttacctttgtcttcaatgactgccccctttcctctatctgtaatgaatggaatgaaaaaagttgtagtttggatgtactgacctagtcaagtctcaagttacgttaataggaggaagcctgtggctaaatagttcctgacaatggctttgttagcagacatctctgagtagaaagcagtgagtcccagggacatcaaactttcaactcttaagaggaaagcaagggagcaaagttctgaagactgagaagaactgaaattcaagtggtgaggagaattcattacaagagatttaaatatggagggatacattttggtagtgcatatgttcctattctgttattcacaagtcaaaatcacatttgctcgatgtgtatgtgcattgtacgtaaacgtaaataacctttgaaatgctatattaaaaacaataggaaaaacttagaatttatcgagttagttattgattaatctccactatccattaacatttagtagttaatagtatctagtaaatttttttctattcaaggtatatgtgggtgtaaagagagtactcagatcactttaaaaatgaaaattgtcttaaactgtttgaaatttgattatttagccacgagatgttcaagaaaacaacacaataaaatgaaatacagtgatatgaatgctacactcagtaacactagggtgctgccttaggcttccctagccttttcttgcttagtgtctcattctaatgtttaatccattaaacacacacacatacacacacacacacacactcacacctgtccttctccaaggttctgtgccttagacaatttggccttcactcatctcccaaatataaaccaatgcatggtttatatcagttaactgtcgtaactgtcattactcattaaacagtcagttatagtgggttcaccagactgttggagatttgtgccataggagctgtgcatgcatgtatgtgagcactgggaatgactctttgatgtaattaattggagctcgtaataaatgacttatgcataatgatgctttctatgatttctcccactctgccaggttgttatctaaagatggcctatctgcgtata

SEQ ID NO: 9162 - DNA, 2300 bp, Homo sapien
aaatcatgtcagcatcaagtcatttttgccacatcccttgttaacagctttttcagggtgggtcatagttctatgttttgttagtgtcttaactccatagtgacatgcttaaatcttattccacattgattttgtagtgtgtgtgtgtgtatatatatatttttagaacatctcctgatgatagaattaaatattaagttattatcaacttgtctaaaaatttataagctttgaatgaaaaataaatttactaatataagttcataattgatttttttctctttggaatatgtgtatgatgtatcactgtgaatgtctaaaaaagtaaacttactgtttgcctgtctccagaaaaaaaagtgggacctaatcaaactgccgtggggtcaacccttgtggttttaaaggcccttaatgttgtccagctgcaaaataaaaggaattgggaggggaagttggaaggagtggagggggttgggggggaggaatgtgtggaaaagaacagggagtctggcttttattttttttttaagtgagttcagtgccagcctggacattggctgtacagactattgagccattgtctgctccatttccagaatagcccccagttaatcacttcggctttgaagggaatttcctcgtggaattctccacagaaaatctaatcaactgacctgccctctcaacaatggaaggcttttttttcctctctttcccttattggggcgggctctgtaatgtagccttttgtgcagaatgaaccctcccagtaggagtggagagcgtgcgtgagtgagtgtgtgtgtgtgtgtgtgtgtgtgtgcatgcgtgtgtgaagaatgcacactatctcctgttggtaagtgtgtgcttactccctgaccagatgctgcggtgcacggggcagccaccatctctgcatgcatgtctgtgtaagtgtctctctctctgtgtgtatgtgcctctgtcatttcgtgtcaaaggtacattacctgattacctttctcggctgccagatttttatctagataattggaactgctatggaggctgtgccttgccagccagcttagaatctgtaaagccatagtttgtccaccttgttatctgtggctgcctgggcagaggaaattaaagagatccacagccaggggggcgcttcctactcctgacctccccagcgatcccaaacaggacagtttgttagtaccgtctttttgtttttatgttttgatttcgttttgggtttttgttcgctcgtgtatgttattttggcatgtggatacctattcccctccacatcgcacatcgtgttttatggagtttagagctgaggaaactttggtcgggttgccaggacgttcgcaccactttgcggaaagcacgagctaacagtgagaccgacagagtgagtgacaagttgtttacaggtttccttgaaggggcctctgctatatttcaatctgtcaaagttgcttttcttccctcagaacaatgcctgattgttgtgtgtgtgtgagtgtgtgtgtgtgtgtgtgcgtgtatttccgtgtgtgaacggagagagcctagaaaagggtgagaaggaataacaattctttgtgtaaaaatgctattactaacattaaattttttgcttaattagttaataaatgcagtttaatcgagcttctgttattatatagactaggtttttaatcagcagcaaatacgttttacaaaatcatactgttctgcgtgtgtatgtgtgtgtgtgagttttatgatttagaagacagagtatgggagacgtgttaaatgagttgacttctcacattcagtgatgtctagaagagagaattaaaaggaaaggacaggcaccctgaggttgtctagagccttgcagccggagcgtgtggctccgcggaggggggagcagccagactccgctgctggaagtgcactacccctttaagagactggtcaaggagtcctaggagagagaggaggggaaggagggggggagaaagagagagagagagagagagagagagacagagagagagagggagagagagagagagagagagggagggagggagggggggaagagacagagagaaaatcaattggtttagaaggtttggactcacttgacaggttcagttggagacgatcataggtggctgctgtgacaaagggaaattgtgcttttccagcatgcttactgaccctgatttacctcaggagtttgaaaggtgagtacagttttttccccctaatatattgaagtacaactctcccattttacagtagtc

SEQ ID NO: 9163 - DNA, 2300 bp, Homo sapien
aaaacttttatggcttagagaggtacattttaaaatattcaattaaaccatcatatacagtattagcttaatgacagcttttataaattttattttttataacaattacctgaaagcctttcaggtcacttaaagtatgagtaccatcttgggattttcatctaactataaattctggaggatcagtttattctgcattatggtgtcataagtgaaatagatagaagtggcttcaagcaacaaatgggctactaaccagttgaatgactttaaattctgtttgcccaagttaaacagtgggaaaattagggaaatacatacctacccctttctactctgtaagatccatgagctaatttatgtgaacaaaattccttatgatcttagagttccattagttcaaattatcattattaggatgatcattatttggcaaattttctgtctagttcctcgtctatttcaactccttcagcatagatgattgtgcaagaaataatttgtcttttgaatggctacagtaatgtttgcagaatatattgaagtcaaaaaactaactttcaaaccatttaacattctcttctatattctttgtgtttatttggcatatgtacagatgtatacatatattaagtgccaataaaatcaaaatcaaatataaggaagattctaatatgagtatcttttctttatactatagttggcctcaaacactcatactctttcttacctgctctggtgaccttctagattagagtttcaaagaaacaaccagaggtagtagctgtagcaagacagcagctgggaccatacggatctcagcatcctgccttatggccattatctttgtttctatctttatgctgccactatgtctccttgtgctctctctgcgtcctctcctcccgcctcctcctcttcctgactccactcccatggctccctgtaactcacccatcctccttcttcactttttttctctattgatataagataagcaagatttttcctagttaggaaaaaaattttaaatatttttaaaagtgtatatagctatgcagctactataccctaattctcataacaaccattaacaaatgaagaaaaatataatttttgtatacattatccattagagtatattagattgtaggtcccttaagggctgaaaaaatagagatttaaaataaatgcaacaattttttcatttttctgtgtgggagtaggttgttgctgtaacaaaaaataatttgagactaacaacaagaaagaatagtgagtaatattcttccccccttccccaactgctgaaagtgaaaatcatgtcagcatcaagtcatttttgccacatcccttgttaacagctttttcagggtgggtcatagttctatgttttgttagtgtcttaactccatagtgacatgcttaaatcttattccacattgattttgtagtgtgtgtgtgtgtatatatatatttttagaacatctcctgatgatagaattaaatattaagttattatcaacttgtctaaaaatttataagctttgaatgaaaaataaatttactaatataagttcataattgatttttttctctttggaatatgtgtatgatgtatcactgtgaatgtctaaaaaagtaaacttactgtttgcctgtctccagaaaaaaaagtgggacctaatcaaactgccgtggggtcaacccttgtggttttaaaggcccttaatgttgtccagctgcaaaataaaaggaattgggaggggaagttggaaggagtggagggggttgggggggaggaatgtgtggaaaagaacagggagtctggcttttattttttttttaagtgagttcagtgccagcctggacattggctgtacagactattgagccattgtctgctccatttccagaatagcccccagttaatcacttcggctttgaagggaatttcctcgtggaattctccacagaaaatctaatcaactgacctgccctctcaacaatggaaggcttttttttcctctctttcccttattggggcgggctctgtaatgtagccttttgtgcagaatgaaccctcccagtaggagtggagagcgtgcgtgagtgagtgtgtgtgtgtgtgtgtgtgtgtgtgcatgcgtgtgtgaagaatgcacactatctcctgttggtaagtgtgtgcttactccctgaccagatgctgcggtgcacggggcagccaccatctctgcatgcatgtctgtgtaagtgtctctctctctgtgtgtatgtgcctctgtcatttcgtgtca

SEQ ID NO: 9164 - DNA, 2300 bp, Homo sapien
gttccagggaaaggtgtttagccgtttttagaaaacaggtaccacataatcaatcatcaaacacccgggaaagtttccgcccttgacaagtgtaaaatctcaggtattagcaacccacctccagaaacaaatctaccaagggtggaaaggggtagaaaggatgtctcactttcctaggtgaatatattgtgattggtatgtgtggcatgcattgagaaattacatttgcttactaactgccgtttagaaatcagcccgaaaaagtctgggagagatcgcccagagacagccaagccccgagcctcgctcccaagctcctccggagtcctgctcttctaggcgcgtgaagaataaatagagtctggtcattgatctcctgatggtgttgttgcactctgggtaatgctgggggtgcccagggacgcggcgcagtccatggttgcgcgtctgcagagaattacagagatggggacagagaacacgcacctcggcataaaagcaaaaggagagaaggctacagcgaggaaaagaaacgtgttgctcgaattgtttccttagtcccctttccatcacccccttcccaacacgcagccacccccgtgaatgctctcccttccccctgctcttttctggacactagctctgggaagatcactgtcaggaacccccgcccccgccccaccctggtttgagatttaataggatttttttcccctggcaaaccggcagctgttttaagtcaatgaaagtaagattagaagagataagcgccggagcagcccgggagctgtcagagcacacacttaaatcagccccacagcttctgctcagggcatcaccgacggagtttcttctgatggggatgggactctgagggtctctctcggctccacgcgcccactcaagtgtcgcggcagaaagagtcggagcccagcgcccagccttatttctccctaaatatcactaaatttcattccctggttcttgggcattgggttggggtgtgtgtgtgtgtctgtgtgtgtgtgtgtgtgtgtgtgtgtgtgtgtgtgtggtgattttttttttttttttggcttcgcttaacacaaaaccaaaccagttcaaccaccccggaggcagagatgagagcgcctcaaaacttttttcccctaccccaatctccgaggagtaggtgggtgcacagtgccggcggcggcggggacgcgcggcgcggagcctggctctgggaggcagtggccgcttcagcagccgaacctctcgcggctccagcctccgcgcccagcagcccgcggctcgcctcccggaaaggttccacggaccccgcagccccccgcgcgcgccctccctgccggcccgaccgcctgaccactggactagggggccgggaggggccaggtcctgggcgcagagcagcggctgaggctcaggcgccgggaagaagttgacaaagggacttgactaaacatgaatgcgtatttatagatgcgagctccatcgagatctagagatatcccgctctccctggctccttccactcctgccatttcatttttatcgctcctttaagtggagggcagataaaaaaaaaattcctgcacggtgtgggtaatcgccgcgttatttacaatctagttactctgcagcagacggggaagaaaactctggggctccttcccttcggatggatagagagggcggccgggcggcgagctgcaagaaggaggtcagggtgggcttgcgggagctcgggggcgacctggagggagcgggagcccccggcaccgcccccgcgccccccccccgcccccgccgcaccccccggggcgggcgccgggccgcggtgaccgccggctggtgcgctgccctcgcctcccccattgttcctactgtctttttgccttttgttatttgcactcgcattgtgttgtttgtctctgaagccgcctcatgaccagcaaagggatttcacctcgtccttgagagcaacacggggagcgcgagcgagcgggcgagcgagagacggggggagagagagggacacgcgcgcgcacacacacacacaccggcacacacgcacacacacagacacacacacacagagtgaaaaaggcgagccaccaaaacccatctccagtctcctcccgggggcccccagcccgcctctgtgccactttgcatcccacgccggaggaggcattaacgagaccgggtaaggtgcgtgaatcgctgcgttttaactttgttgttcgtcccgatgttgttgtgggcagacctccaaggcgcagagctcccctctg

SEQ ID NO: 9165 - DNA, 2300 bp, Homo sapien
ttttccatgaaaaaatggttcatttcatctaagttatccaatctattggcatatagttttttaatagtatttatttgttattttttttttctgttaactttatttctgatgaaatattaacttttttgcttgttttaggcttaagtttctcctctctaattttctaaggtaagctgaagtatcacattttagatatttttcttttacaacatacgcatttaatgctatacattttcttccaaacatttctttgctacaccccacaaattttagtaaattataattttattctcatttagtttgaaatgtttttaaatttctcttgaaacttcttctttggcccatggattatttagaattatgctttttaatatttatatttccaaatatttgtgaattttctagacatctttcctattgatttctactttaattaaaccgtggttggagaacatactttgtataattttcgtgttcttaaatttgttgagggtgttttatggtgaaaatgtggtctgtcttggtaaatgttcctcagaagcttgagatgaatgtatattctgctgttgaatggagtaatctatagatgtcattagatcaaggtgattgataatactgctcaggtcatctatagccttgatttttttgcccactggctctatcaaagggatggtgaagtctccacccataacattgacacagggatggtgaagtcccgcctctaacaatggatttgtctagttctcttttcatttttattagtcttctttcatgtattttgacactcttggtaatgcttccatgtttacgattgttgtcttcttggagaattgttccctttatccttatgtggtacccctttttattcctgataatgttgctcattctgtagttggctttgtctgaaattcatttagctactccagctttcttttgattacttttagcatgatatatctttttctatccctttactcttaacctgagtgtttaagtttaaagtgggtttcttgtagataacatatagttgtatcttgtcattatccactatgacaatagtgtcttttattggtgtatttagacgattcacatttaaggaattattgatacacagttgacatttgaacaatacaggtttgaactgcgtggcttctctttttttttttttttagtgtttgggtgaccccaggcaattttattactttatccctgaacttcagttgcctcatctataagatggggataataatagcacccatttcataattatgaagattaaatacattaaggaaaacactagtatgtgcctagcacctggtaaacactcaacaaaggttatctgtacatattgatatctcagacagggacggaatgtttaacagaaaacaggaggttttagccactcacttgttctcctggctccggaaacatgagctgccccgccccagtttgtccaagcccatcaagatagttgtccttgtccttaatctccacaggtgttcaatgtgagccaactgtcagatggcattcatcttcacaattgaataacccatttatgcctagtgttccattattggaacgctaagcttatgggagttatttatatcctactgttcaaggtcattaccaagatctgacttttcacacaaaataatttgcaacctccagcataaatgggataattgtggcagttttggggagacgaaactttagagtttaatcttccagcttgactgacttggaagcattcctgtcaatataaaagatcttgttcggggcggtggagaagccgaggccggctccgcggctgtactttcagctcatggccaggccatattcccgctgcaggctctgctgcagactgtcggccaccttcttactgagggccacgttggaccttgcaatcgggctgggtggggcgggagggtgggggtgggggtgggggctaatcgaaggggacaagtttttgaagccacccgtaagtttgagaaatttcagtttctgttcctcgttctcaaaaccagcagtatcccactggccaaactggcttcccgtccacttcctggtttcagaagcttccgttttgcctgactggcgatcagtctcttcttgcaaggcctttcgcccctggtctatgtgcgcctagtccatgttgcctttcttttccaacaccacctccaagtccgtgtctgtttcctcctttcaagggtctcctgctaccccactctctttccttttctttttcttcctttgcagagccggctcctcaatgactggctgctttaccttcttcttggact

SEQ ID NO: 9166 - DNA, 2300 bp, Homo sapien
gctcacgcctgtaatcctagcactttgggaggctgagataggtgggtggcttgagtccaggagtttgagagcagcctgggcaacatagcaaaacccggtctctacaaaaaatacaaaaattagcccggcgtggtggcgcaggcctgtagtcccggctactggggaggctgagatgggagaattgcttgaaccggggaggcggatgttgcaattagacgagatcgcgccactgcactccagcctgggcgacagagcgagactccgtctcaaaacaacaaggacaaaacttatcttataagcgaccctggacttccagggacactcgccgctctatggtggtacgtgacctgcctggactctgtggtctttggagcttgggaccccaccccagcgtaagaggcctttctgtgccttgtataaaggagaggaaaagtgtaggttttctgagttgataagattagagctacagtatattatcagtagcgttgtatgaaaccatttaaaaaaccaaaccggatttaaccgctttcacccagaataaactgccctccccctctttccaagatcaagtcagccccagttaccacttcctattaatttaaaaaccaggaaggctcataatttaggctgacgttgccccaggcgaacactgcatataagacaatagctattccaatcctcctttccctttctaaaccgaatagtacttctaacatcacttttccagtcctctttctaaatattgcgatcacgagcctacatcggaaaactatgaaaacagtatgattggagctcttgatggtctgctttgcctgaaaacgatgaaaggcattgagatctttgggcagaaatggcccttagggaatgcgagcctggtagccccataacaccccgagttacaaattcggtttgggtaggtggcgcagggaaatctaaaagctggattcacgttctcccccttcagtttgcacatagcggtcagtggcagacaagagcagacgcacaaatgtcaatccccgcccgcaaactctcgagggcagaaactgctttttgtcagttggatttggagtcggtggaaaagctgccctaatgtagtttctccgaggtttccttagccttgaccgaggggcgcttcccggccattcacctagaggttgtttaataaacaaggatgctcgcgaaatatctgcgcttggaaaggcgctcgttcgtggcgcgcattctcgggcctccgcaagcgaccccggtgacagggacaaccgcttcggttttagcgactgcagacagactgggacgagacggttggaggctcctccccaagggatgctggaggggttgcgtcgtaccctgcgcctggccctggcgcgcggccccaggtcgtggtacccagcgccctatgggccgtgcgccggggcttggccacaccgcctgctttcgcttccagccgcgcgctccgtgccactgccgctctctgcagccccgcgtccccgcagcctccccatggccagcccgcttcgctccgctgcggcccttgcccgccaggtacctcgaacccgggcgtttgcggaaggggggaggattggaacccgggtctcggtagctcgcgggcctggccgggcgccttgtcgccgtttcctgcaccatcctccttcgccttgccctccattccgcctccagcgaggcgtcttcccttccccgcatccctgcccgaaatctggagtcccagcctgcaatctccacctcttcgaggttcccgctgcccaggtctagcaccctcatgggtaacccgctccggagcgtggcgaggaccgccacgggggacgtgagggtagctatggactcgctctgagggaggaggcgggagctgaatctctgggctgccagaacccacagccacatcctacgtgactctgccaccccaaaatattttgaccgcagccttctgcctccttggatctcttccttccccacccccacccccgtagttatttagcagattacgcattaaaacaaatgtctgcaggttttcccaattagtcccgcttccctgtgtctttatcttttaaattgcccactaataccatgaggtttaaggtgtggggtggatgctgcggcatcggaggaccctgctggtggaggaaatggttcacgcccgtccccgttccctttgcaggcttgctattgtgcgtctgtgattgacaagaccacgaggctgagcgcgccctggagatttttctataaatggcttaacaccccagtctagactatttgctcggatataagggagacaattgtttttt

SEQ ID NO: 9167 - DNA, 2300 bp, Homo sapien
gaatgcagtggcatgatcttggctcacagcaacctctctgcctcccaggttcaagcgattcttgtgactcagccttgtgagtagctgggattacaggcaccccgcaaccacgcccggctaatttttagtagagacggggtttcaccatgttggccaggctggtctcgaactcccgacctcaagtgatctgtctgcctcagcctcccaaagtgctgagattacaggtgtgagccaccatgccgggccatagagtaacatctttattgagatataattcacataacatacaattcacctatttaaagggtataattcagtggtttttagtgtgttcacagggttgtgtaaccattaccacaatctaatttgagaacattttaatcaattcaaaaagaaatccaacgcccatgaacattcactctgcattccaccctgtccccagattgaaaacaactatgtgttttctgtctctatggattttcctgttctgcacatttcagataagtggaatcatataatatgtagtcatttgtgagacgcttctttcactttgcatagttttcaaggttcatccatgtgactgcatgtaatcagtacttcatttctttttattgcagaatataataatattccattgtatggatgataccatgttttatttagccattcctcagttgataaacattttgctacctgatttaaagcttactttctgtttctcacactagtatatgagcttaatgagggtaagaacatttttgttgtttcccactcagtccctagcattttgcacattgcctgtctcatgtcagtgtcaggttcaaatctatctagctgtgctttcactgacgggggccaggaggtttcacaaggactcaatggctgattaaatgcttacagatacagatttctcagggcagaacttctgcaagcattttggctgtggtcagttactttcaggttttcattactttttggttttcacagcatccgcaagtgcccatagccattatctcagctgcctctctctttactctcttgccaatggtgccaggccacagcaggtgttatcttatcacctcagtccaccatacatatgcttatcaatttgaggggtcagcaatttcactggaggctgaaacccttgtcataaatggctccattttgagacatttcagattacaaaccactgttatataccagcctagcatgtagaaatcactcagtacatttattgaacacataatttaaccattcattcacctgaccaacagtcattaagcactgacacatttgttttcaacactccctctcttccacggcaggccacttggtatgggagataaatatgacaaaggatctgcccttacgaatctcataatccactgaagtgacaactgtgcaaacaaataattaaagtaaaattaagaagctgggcacagtctcacatctgtaatcccagcaatttgggaggcggaggcgaggggattgctgaggccaggagttcaagaccagcttggccaatttagtgagaccccatctccattaaaaaatgataaaataaaataattgattttgagaaaggatgtggacaaagtgcagcacatagaccaagggcccagttctgtttgagggcattggaagcaacttccacagcaaagacttgggttgaaatttacaaaaataggagtttgccagcttgacagagaggcagcggaggtcaaccagcagcacacttaagcagtcatggaggctgacctaggcgctggacatggaaaagtagcaatcctggagctttgtatagatgtggggagggaacttacaggggaccaactaggctactgggcaatttcacattataaagaattttatatgctcaaattaaaggattaaaaattttcccccatgtacataataaattggcaaaaatggttatatttgagggtgactaaggaactctgggaaagagatcggcaaaccaggcacatgttcttgactactgcaaaagtacatttaaagtagccgcgggggatacatgtatacttttgggcaggattgtgccgtggtcctctcagcatgcagcaaagttactttggggacagtagggaggtgggcaggagccagtgatgacggaatggcaatcacatttgacctctgatctgtttatttcctcctccttgacgtctccatataaatgttacacgggcatccccacactcggatacgcacccacagtggctgattcgggggtaaccgtgtcatttgcttgcaacactggcacctctgccctgcaccccggg

SEQ ID NO: 9168 - DNA, 2300 bp, Homo sapien
agaagtggaactataaatctgttagaggaatttccacttggattcatgtgagctaaatgtaatgtaaaatgatgttagagattatcgatactgcttatgttgctaatcttttttattcctcctattgattgaactatgcttcattgctctggcttatagattctgagtcccattattattattgcctcaattatcttgttccatacagtcaaagctcttgaatcaacacttttcaaccatctgcccgatccaaaactataaagcaacaagtaaaatcctctaacacatggcaacatctgtaaaacaagtccgatttgattcttacctaaagttattcgttatatatttgattttcaccaccagtgtaactgcagacttcaacatcaacctctaagacatccatactctttgggacttatagaaatctacatttgttctgacttcaatgagttaatctactacgtatgtacaatgtagacaatatttcttattctttaggaatgtatatgtaaacaacatgacataatttgtgtttatcaacatctatattattcaatcactaagaaagttgcattttattgcaaagaatggcatatgatgtatacagaggtacaaaagcagcatcctggaaaaagctggcagatttcagggtgattcaaaaggctctgtagaaatctttctgaatcaaattctaactccaaacagattaacaatgtaattatctttcctgtttttttcctttaaaatgttttcctccctttactaaagttatttattgagcattgaacttccaaaccttagatcaggcaggctgatttttaaaatcattcaaaacttgattaggaaagccagtcaatcattcatgattcatctatgtgagatcctattggtaattaatgcaaaatccttaatatacgtaaaaaaaaaaatttaagtatgtgtgtagatagacaagagattccttttgccaaaacaacccttcactaatgattagatgccactaaactcttcatcaaaacctaagaagaaacatctgttcactgagacattcccaggaaacccatctttagtgagctcagtgggagggcagagcatggttttctgcttaaccagtgaattttatatctgccaaattaaactgttttcattctctttgtgactactattttatgtgataaaataataacacttcttcctgccgtttctaggatagatgatagcagctgttaatcacatgatttgcaaaccacaagtaccagatttagtaaatgctcagcaagtctgtcatccgcaacctttctgattattaataaatgcaagctggtataggctagaaactttcctcccacaattcagttaaccttgttatattaagcttcttggctgggtcacaccaagcttactataaacatctcttattggaacaattcctaaaatagcagagtgacacatgcttctgaaaactgttcttctgtctcacttcttgttatatgaagtctggttttcttctcagagaacaagagaagacctacaataaatctctagcttcaagaattcaggtgcctccaaggttcttacagtctataaaactacatcactgcgtttcactaacacacattccaaacgaccaagcctgaaaatggcaggattaatttaaatttccaaaagctccattgaaaacaatttgagatttgcctgtggtgacagcaacatatctggggaatctcactttatcactctcagctacccatcttttttccctatttgtagagtgtttttcttttcagatttgtttcaagttttcaatgaactctgttgaacctctaatatagacttattggaggtttgtcccttttgccacaagcattttgaggttgagacacaacagaacagcctacatctgatattgcttttccctggttagggcggtactttctcggccttcgatgactaaaggccagcatcagccaaaatttaattatttcgttggggaaaactcaccaccttattttcgcttgacttcgccagtgctccaagaaccatctgagaactgggaagaaagagtggagacctacaggtcagatgacatgggtggagcccatttctacagagtggcttgggctgaggtaaaagaagctagagaagagagccgctgatgcactgcacctgcctaggctggagttaaggtactaatcacagcagcagtgctgggaaagatgcctaggaaggatgaggatgacaggcactattttggtgtgctccccaccacagcaataacagaaagatagtccaggtgcagt

SEQ ID NO: 9169 - DNA, 2300 bp, Homo sapien
atgtagagatattggagtcctagtgcacagttgggggaatggaaagtggtgcaggcactatagaaaatgttatggagggccgggtgcggtggctcatgcctgtaatcccagcactttcggaggccgagacaggcggatctcgaggtcaggaaatcgagaccatcctggccaacatggtgaaaccccgtctctactaaaatacaaaaaattagccgggcatggtggtgcgtgcctgtagtcccagctacccgggaggctgaggcaggggaatcgcttcaacccgggagccaaaggttgcagtgagctgagatcgcgccagtgcactccagcctggagacagagcgagactccgtctcaaaaaaaacaaacaaacaaacaaacaaaaaaaaacagttacagagttttctcaaaatattaaaaattaaactaccatctgatctaggaaccccacttctgggtatttatccaaaataattaaaatcagcacctggaagagctatttgcattcccatattcactgcggcattattctcaatagccaagatttggaaacaacctgaatgtccacggatgattggataaagaaaatttggtatataaatacaagggaatattatccaacctttaaaaagaaggaaattctgccacatatgacaacatagataaacctggaggacactatcccaagtaaaataagtgagtcacagaacaacaaatactgcacgatcccacttctctgaggtatctaaaatagttaaactaatagaaagagagagaatagtggttgccaggagctaggggaggggaaatgaggagttgctactcaataggtataaagtttcagttatgcaagatgaagatgttctagagatctgctgtacaacattatgcctgtagttaataatactgtattgtacacttaaaaatttgttaagtgggtaaatctcctgttaaatgttcctgccacagttaaagaaaaagagagaaaaagagagtgagagagacaacgataagctattgaaggacgctcagtggaaagtgtggtgatgtaggcagtttttatttttgcttaggattttgtttgcttgtttaccagtatggtaagcattctgtgagaccattcttgcctctcatgtggtccttcgtgtaaccagggctggatttgtgccagtgtgcagtggcattctgactaaatgttaacgtttgagaggcatgcacaaggcctacggctgacaatgtcttccttgctgttttgcaactcccgacatttatcaccactttgagttaaggtccatattcaagtcagattgtttccagataatcattgaggtactggcatgtaacacacattaaataatctcatctgctaacagagagtaagtgcatttttacatgttttagagattagaattggatccaaatgaggtgtaacgtaatggcaccatgagatctgtggtggggaagggtgatggggagaaaagcttcagcaaaaagaggactaaagtagaaatatcaaccgccagctttcatctgtgcctgggggcggtccttcctgtgctcgtggcacgtgtttatactatgattgacaacccttaaggagaaaggctaaggtcatgaaacaaagctctctttccttttcttttccctccccctacctttaccccattcctttctttttctgtaaaagctagctgtgatgtgtaaatgttgcacctgtcaccctgacctcattgtagagccatcttctgagtaactggcaactggcaactgatgctaagtgctatgaatgcagctggtgggaactgaacacaccagtgtaaaagatgaaactagaagtccttatctgtaaagtgagggtgtcaggctaagcgaccaataagctttgcttaagattttatatttgtgaagcatttatatgtaaatactttcactttttcctctgatctctaaggaagtggtgttaagtttgagtttgtcataatttcacagggtgactcttagttgaaatgtcactgacagcttgcggtttggacttttttttttttttttttttttaactccagtcagaaacaactagaagccattaaacaactacaggaagatgctgtcaaccaggaaggcatccttaggaagaggctccaagaaaccagccaacggctggaggatgtggaggagcaggtagggtggctcatggctacattagattcaggggacatctcctcagatgccctgcaaaccatgaaataaaaatggaggaggaacaacaacaacaaacaaaaaaaaaaagcaaagaggaactg

SEQ ID NO: 9170 - DNA, 2300 bp, Homo sapien
gatttgcttgcagtccactgtgagaccttagatggaccttactctgactttccgtaggcccaaggagtctcccgtgcagtctgagctatttaaatgcctgtggattaatcatacagtgttcttgctactacacatcctgtctaccagagaggctgccatggcatgacgtcagcttaggaatctggtactttgcagttagcagggaggcagtgggaagtagtactagagttcaccagtgatgagctgcaagggacatcttcctgttacaagaatgaggagtcagaagtagaagtaatagcaaaaacgatgagaaaaggataagttcaataacacaggagacagaagaggggagtaatcacaacaataggaaaggaagaaagcagaaagctgcagaaaagtggagttggatagcagtaacagaaggaaatggccctgtagtaaacaccaatttccaaattttcaaatttatttaataaactcttatatagtgcttaatctatgccaagctttggaaatattggctttctgagttctcataataacactaggagataggtactaaaaaccccatttttccaatgaggaaattgaggcaataacttgcccaagaccccactgctagttgagaggtggccaggattgaagccctgcattcttgtttgagtccatactaccctacgctacgatgctgcctgtcttaattcagaaaatttctatgtattatctgtgttagtgttcaaaatttaattctgccacttactagttgttccttcatcacactgtgcctcagtttcattatctgtaaaatatgcacagtaacaatatctacctcatagagttataatgaagaatgaatgcattaaaacatatacagcatttagaacagttcctggtgcattgtaagcattcagtaaaaatattagtagttctcttccatctccttctcctgattgttgttatattttgttgttttttctattatctctcagtcttaggtaatgacaagttgccactcgtttattaacttgctaatgaaagctgtcacacatagttaactggtagatccgagggtttaattagattcagagccaccattttcagcaagaaggcatcataggttatgttgtgttcttcatactgcatcctatcagaagccatatgatgttccattattaattttttttttttttttttttttttgagacagagtctcactgtctcccaggctggagtgcagtggtgcaatctcggctcactgcaagctccgcctcccgggttcacaccatcctcctgactcagcctcccgagttgctgggcctacaggcgcccgccaccacacctggctaattttttgtatttttagtagagatggggtttcactgtgttagccaggatagtcttgatctcctgacctcgtgatctgcccgccttggcctcccaaagtgctgggattgcaggcatgagccactgcgcccggcctccattattaatttaatgatgcgaatttgatcacatggttaaggtgtttgccatcaaatctccacattgcaaagtacattttccccaatcagaggtcaaatactttggcactgggacaattatgtgttcctcaacagcttttcacctaatcatttaggtagccattgaggatctttatctgaagcagttattacactggggattgaaaaatggtgatttgctaagtgatcattgcatctacattagacagatggcactcttctgtaaagaactggtctttcttcaccccaccttcccccttcatttctgaacgtctaacactatagactcatggatttttatttattcagtgtgttataattaattttaagggagtttgggaggaaatttttgtttatgatcttaaattacagaataaatacaggaaaggtttctatatgttttgctaaggatgtgttcctcaattcaaaagggataaaacattccctttttcacttgtccttgactatttctctgagaattaatgcaaatattcttttactttacagttaattgagaaattgaaatttattttactggaaactccaccatgtgatttgcaagataaaaatataatacagtaccaagaatcaatactacaactgcaggagctccttcatcttaaattcggtgtagccacagaaatacttctcaaagtaagtgtgatattttgcttatatattaagttttataagagctaacattttatgttataaaataatccagtattttttaaattgaaaaatgaagagattatggaaaagttagcagaataatttaga

SEQ ID NO: 9171 - DNA, 2300 bp, Homo sapien
agcctaggtgacaaagcgagacagtctcaaaaagaaaaaaaaaaaagaaaaaaaattcatacgttgaaattctgatccccagtacttcagaatttgatctaattggagacagggtcactgctgattttattagttaaattaagatgaagccatactgaatagggtgggcccctaatccaatatgatttgtgtccttatataataataattttaatatactcagatggagaatgccatgtgaagaatgaagttttgttgccacaaaccaagaaactactagaagccaggaaaggtctgaacagatctctccctaaggccctcagaggtatcacagacctgctgacactttgatcttggacttctagtctccagaactacgagacaataaatttcttttctttaaccactcagtttgtggcaattccttacttggcagacttaggaaactaatacagtagatttggagttgagtgggttcctggaatctgcatttttaacaagtactccgggtgcattagaaataaatgttccatgggccacactttgagaaacattgggagaaggatctaagaagaagaagaaactcaggtaacaaattggaaggtaacaagtaagtgcttactgttcccccaatttattagcaattataaattgacttaaggtccatttgcattccgccaggaatgctctccactccctatttctttttttctcttttttttttgagacggagtctcgctctgtcacccaggctggagtgcagtggcacaatctcggctcactgcaacctccgcctcccaggttcaagcgattctcttgcttcagccccctgagtagctggaattacaggtgcgcgccaacacgcccggctaatttttgtatttttagtagagactgggtttcaccatgttgaccaggctggtctcgaactcctgacatcgtgatctgcccgcctcggcctcccaaagtgctgggattacaggggtgagccaccgcgccaggcctccactccctatttcttcccaccatatgtggaaaactcgtatttatactttaaaacaggttgaaaagcaccactctccttcccttgtttcccctcactgaaatttcatcatttccaactgtgtgttaccccattttagatgcttcaattgttacagttgtaaagctgtattgtaattaatttgtttaatctgtatcctataagcagagttgtcgtcatgttcttcttggtattcttggcttctagcccagtgccaagtacaaagaatgcactccacatttttcccttaattaatgaattaaataagtaattacattctccacttcctctggttttaattatagaaaatgtcttgatggaaaccacatttaagaaaatcagagatactctcatagctacatgttggcctgtctccttgctgaaaacatggcagttgaggagtgcagaaaaacaaaatgagaagccttatcatatttaactaatgcaggatgagaaccttgaatcacaaaacaattcatattcccacaaaagacgacataaaatattttttcaaagcagagtaaattgcattagcttttaattaactgctggagaagtactaaaacatttccgccaagttgcaataagaaaatttagtgggaacgtctatcactactgaaagttactaggttgggaccaattttcaagcttagcaacattcgagatcaggataccgtgtgacagctttgaccatctcccgtttgcagaaactggtttgggactcctacctgtccgcctggtccaggtaaggaaagccattgctgagaagagggccgacccaccccaaggtatgagttatttcccaaaccgacccgcttcgctgtaaaatatgactggctcttgattacattatttaacactggtgaagcagaatcagtggtcgcccctccacctgtctgcctcatttgccttgctcaccattaagagtcaagctccactgcagtagtccgcagagtcggagcagaaattgtgtggacaaacgctcccgggttgcccggacgacaggccccgcccacttgagctccaggaaaagagcgcagccgcgcggaggctcttccggccggcgccccgccccctttactgacaggttgcccacctcccccaacgccaccccgcttcgcagtagacggacagaggagtcgtagcggtcgaggcttttgcggctccggcgtgccggaaagtgcgtgagtgccgccgccggggagttttgttccatttcccggatcctggggtctggaggcgaaatatgctctgggcg

SEQ ID NO: 9172 - DNA, 2300 bp, Homo sapien
taaaacacttgcccagcaaaaatgtaactagtgtggctatggcaaatttgttcttctttgatatgttaacttatatgaattaatgcagtttatctttttttttttttgagacggagtcttgctctgttgacccggctggagtgtagtggtgcgatcttggctcactgcaacctccctctcccgggttcaagcgattcccgtctcagcctccagagcagctgggattacaggtgctgatcaccacgcccggctaattttttgtattattttagtagagacggggtttcactgtgttatccaggatggtctccatctccagacctcgtgatccacccactttggcctctcaaaatgctgggattacaggcgtgagccaccacaccaggcaatgcagtttatctttatgcagttgaccttgaagcatttaggtttactttagccactaagagaaataggtctccttgggttcacaatgtagtgaataaacaattttgagttcagcagggccctgaggctgctcctgaactctgcatgaagtcatggaggttactgttttaagtaaagagccaagagttaaggactaagagaagccccctattattctgaaaacttggatgtgtgcgctggatgagacagcggttgcagtccccattgatagttttttccccctgtcattctaggctaaggagttaggacttaaccagttccagttccaggctaatggaaaattgtcattttactgggggttatgtggtggccaaagttgttaatcattgttccccatggggtagatacagtgagagcttcagtaaagcctttcctctaaaagcccactattttaaggtaacttgggattactgaactatctccttaccccgatgaatcctaacttgagttgactgaggtgttttatcattaaacattagttttactgaaactaatttaaaaggaagccttaactttcatatcaaacagctatggtaaactgagtaagaactctgtacgaagtcgctattaaaatgtttttatcttgctaccaggatatggatgtaaaatgctaataactattacacaacctataatagttacaggttacaatagggataataacactttaacccacaaagactagcttagtcctactacttatctatgaataatgcatgtagtcaataacactggaagggatagagcattataaacttataattcagagatgagaaatggtgccagtaatttaaaagtatttcaggtctcataatgctaaaacagggtgtaggtatgccctacaattacagagaactcagtcgggcttgaggagaacagcctcacttaattgtagttttcctgtcggtgtaaggtgccggcgtttcttcatgtgggaggagactgaaattctaaaggttgtgtggttagtaaaattagtctgtgacctcgggaaactaatgagtctttggggcctcagcgatcttcatgttaaggaatattttagccaggaattgcttcattttcaattcttgtttagggcgctcttaggaaaaaggacgcgtacgctgcacagaaagtaaacaatagagcagaaagaagaatccgaaggtcattaatcttaaaataaccaaccctctggagccaacttatttctctctttaaattgcggaatgagccccatccccctgctggattaaaccgcagaggcccaggcctcccaccgggtgtccgctgcatgaaccagtcgcatgcctgtttccttctcgaaaccctcacagaaagacccaacacactctaggaaataaaccgtcaacgtcaggagacgctcagaaccctcttcccacacccggtggtcctcgcccagagcatatttcgcctccagaccccaggatccgggaaatggaacaaaactccccggcggcggcactcacgcactttccggcacgccggagccgcaaaagcctcgaccgctacgactcctctgtccgtctactgcgaagcggggtggcgttgggggaggtgggcaacctgtcagtaaagggggcggggcgccggccggaagagcctccgcgcggctgcgctcttttcctggagctcaagtgggcggggcctgtcgtccgggcaacccgggagcgtttgtccacacaatttctgctccgactctgcggactactgcagtggagcttgactcttaatggtgagcaaggcaaatgaggcagacaggtggaggggcgaccactgattctgcttcaccagtgttaaataatgtaatcaagagccagtcatattttacagcgaagcgggtcggtttg

SEQ ID NO: 9173 - DNA, 2300 bp, Homo sapien
agagtcacagagttcatggattaggatttagaatccacagagggtccacagattcactcattcaacattccataaatatttattgaatgcctttttgtgtcagagactgtcttaggtgctggaaatttagcagtaaatgaaacagaccaaaacccatgccctcatggagcttacattctgatggtagagagacaagaaaacaaaatagatagtgtattattgaaggtgatgagagctctggagaaaaagtaggaaaagagacagatctgggacaagggcgaaattacagtatcaaagatgatctttttagggaagatctccttttaaaaacactttggaacaaagatttaaatgaggtgccagaggggtagcaagtgcatattccctgaggaagacgcctgcctggcattttcaaggaacagccagtaaccaatgtttatctacgtaagtaaggaagggagaacagtaggatgagagttcagagaagagggtaggggatatcaaataatttaaggccatgtaggatttttgagaagaattttgcttttatgtcaagtggaatgagggccactgatgatctgggagtagagtgactatgatccgacatgaagtatactccattttttaactatgtgaacttgtgccaacgttttaacctctaaatctgtttcgtcatttgtaaaacggtaaaaagtattttacctcataaggttgtcgtgatgattaaataagatgatacgataagtgcaaaagatttagcttgtacttaacatagagtaggcacattttctccccttccctgtctttcacttttctcttctgccccttccacctggcgctaggagggggagactggaataaaccttgcagattacagcccgtgtaagagtagaaaggaaaggatgacagttgatgtaaagccttggttaacagacataatagctgggatttaaattcagctttattggtggtttatgatgtggactagaggaatggaactgaaagtctcggaggaggggcgatcctatcaggtacaggcgctgcttttccagccctcaatcctcaagactctcccaagatacatttctaggtagtttatcaacacagactccgggtatgctagcatgtttaattgccccattgtttaatgtcttaactccacgaactttaactgattaatctgtcttctaattaatgtttgaatgactctcctcaggtctaaactaccaaggccatctctacttaaaaacagttgtcttttgtttgtgatttcaggggccctgggtataagcgaagtccctgtttagagaccttgtgatgggttcaaaatatcaagaaagatagcaaaatatcacaagcctcctgacccgagaagattagcgttgaaagggtctgtcgtgtttgtttgggcctggggctaaattcccagcccaagtgctgaggctgataataatcggggcggcgatcagacagccccggtgtgggaaatcgtccgcccggtctccctaagtccccgaagtcgcctcccacttttggtgactgcttgtttatttacatgcagtcaatgatagtaaatggatgcgcgccagtataggccgaccctgagggtggcggggtgctcttcgcagcttctctgtggagaccggtcagcggggcggcgtggccgctcgcggcgtctccctggtggcatccgcacagcccgccgcggtccggtcccgctccgggtcagaattggcggctgcggggacagccttgcggctaggcagggggcgggccgccgcgtgggtccggcagtccctcctcccgccaaggcgccgcccagacccgctctccagccggcccggctcgccaccctagaccgccccagccaccccttcctccgccggcccggcccccgctcctcccccgccggcccggcccggccccctccttctccccgccggcgctcgctgcctccccctcttccctcttcccacaccgccctcagccgctccctctcgtacgcccgtctgaagaagaatcgagcgcggaacgcatcgatagctctgccctctgcggccgcccggccccgaactcatcggtgtgctcggagctcgattttcctaggcggcggccgcggcggcggaggcagcagcggcggcggcagtggcggcggcgaaggtggcggcggctcggccagtactcccggcccccgccatttcggactgggagcgagcgcggcgcaggcactgaaggcggcggcggggccagaggctcagcggctcccaggtgcgggagagaggtacggagcggaccacccc

SEQ ID NO: 9174 - DNA, 2300 bp, Homo sapien
tgctgctgatggtattattgctactgttattctctgtccaataagttgtatcaaccacatgaatactaccaagttgtattgctattggtgatgtaattttttccaaactgataactcttggaaacgtctgaacaaatcaatatagagtctttccggaatttaaacaataaatagttacatcctaaagactttggtatatactaaaactgcaaaaatattttgtatttatatgacatatagagctaggctttaggttcatataattctaatcttttttttttttttttaatgacggagactggttctgtcacccaagctggaatgcagtggcacgatctcagctcactgcaactccacatccccggttcaagcgattctcctgccttagcctccagagtagctgggattacaggcacccgccaccacacccagctgatttttgtatttttttagtagagacggggtttcatcatgttggccagactggtcttgaactcctgacctcaagtaattcactccctttggcctcccaaagtgctgggattacaggtgggaaccactgtgcctggccagataattgtaatctatttttcacctgcatgaatgcctagaaaggcacgtgtcatgtgggaacactatttactaagtaggattatctgccacattgtggaaagtctagcatctctgggttctgtctaccaaatgccactaatacccgacccgaatctttaatgactactatcaacatcctcttacatttacaaaatgctctctatggttcactttggcccctgttgaaaaccactaaattagtttaagcaacaacaaaagaggaaattggttttcattgcatatatacagtaatttaagaaaaggaaataagaaaaatgtctactatggggaatgagtattgaaacactcacaacttcaaagccttcaaaagtttttctcagctgacagaattttatttctccaaaatatgttggaaaatatgagcaggctctctgataaaaccaatgaggtcataacgactttatgctaatatatgcagttcaagtagagaaatttttaacagctagaaagccatccagactggtacaggtagggagactgggagagtgacaagaaatgacaagcccatttttaattctttactaagcgtaagtaaaaatttataaaccttctgatgctatatttacataattggcccataatgttcataaggaattgtgcttcatctctgagagggaggaaatacggtcaaacgtttacttccttttaacttaccttattacgtgttacacgtcttgactttttctttttggctttttaagacagttactttattgtctttaaaaatcattttcaaatctatattagaagatattttagtattatttctgaaagcaggtattgtttattcatggtacctagccagtttttaagaaatagtagaatcttattaactatttttaataagcttactcatccagtaatcatcatttatatatcttattactgtatataatcatgtactttcatagttattaattttattgccatactatcattatcatgaaacattaagtgtgagtgttttacacagaggagaaactgaattaagtgatttcttctaaatcatactgctggcataactaggagaagaatttaggtgttctggctttgattttatgatttctaccaatagacttctttttgcattgaagttttatggtttctattcttgctgcctagctgtttccatgtgctcaaagtatttgtccagagagagagaaagaaaaaaaagaagaaaagagttgtgattaatttccccagtatgtacatactggccttgactcttagaaatacaaaacaagatatcaataattttggtggcaaagtctagtggaagatatggctttcctaagagcaaattactttatttaatgtctgcaaactgcaaagaaggtacagcatcaacataggaattgttcagaaactggaacttggttactatggagacattacctcatagttctaagaggcagtgttggccagaagcaacaactgtagtcataaaggtctctttgccaagttactgccctctcaagctgcttccagtgaatgctacacacctgcaccatggtttgtccgacatccttagccaagatcaggattggctatgttggtacttacatatcctcatgagaattgtggttctggtactagtttggtaaagaaattattaaacctagctgatgcttgaaggtagttggattaacaggtgaggtcactttgaa

SEQ ID NO: 9175 - DNA, 2300 bp, Homo sapien
aaagtccgtggaacacagttgtgactatattctaggccagccaagatgcttgtactcagaaaggagtggtctcaggaccataagaaagtgaaaaaataaaaataagaaaataaagaagggattgtcaatgaatcagaattcatcaaggtcaaagtcttaggaaattccttcatgaggaagtctaggggggctatggaaatgaaatttttaaacaaataggtatgtggtgctggcaggaataaattatggacttatgaatataacataagattctttattacctggtctcacccgtctttccacctctgccccccttcttgcccgactctgtgtatcacccataataaactacttacagcttcctagtgttaaatttaccctaaagctgcctccttcaatattttaagtttaacctaaaggttcttcatacatagtgaactataacccaatgattaaacagattgtaacctactcttgtaccagtcaccaagtttcagccaatcagaggtggccaactgttcaaaccatgctcaaataagggaaatgtcatggtgtaactaatccagctgtttctataccttacttctgttttcttaggtcactttccttttttgtccataaattctctccaaccactcagcagcactggagtcactccaaagctatcctggttcaggggtctgtctgattcacaagtcattctttgttcaattgagctctgctaaatttaatttgtctgaagtttttcttttaacagatggtgtcagaaatggaccccaaagtagagctcccagtgatcccccaggagcactgagtgaccacaaggggtacctgctgggcccgtcctctcgcagtgtccactgctctcttacagcaactggagattgtggctgcattctctctcagattctgaagctccatacattgccgttttcagctgttcaagcttgcttgagcaaatttttgatcttagctgagtttggaagtcgatagacattggactgggtccaggatttgattggatctgataattaactggcttggatccagttagatgcctcggttatctgactgggtcagatagaaaccgccagtaaatattttaataacaatactgcaggggtatgaactctggctttaagaaactcacaaggaattttatgttctataccctttgtttctttttcttgtgtgcttcggtcaggaaaaatcattagtcaagttaatcaaggggatctgagagccaaatacaagattcaacgtaaaaatggaatccttgggctaggcgtggtggctcaggcctgtaatcccaggactttgggaggctgaggcaggcggatcacctgaccttaggagttcgagaccagtctggccaacatggtgaaaccccgtctccactaaaaatacaaaaattagccaggcgtggtggtgggcacctgtaatcccagctactttggaggctgaggcaggataatcacttgaacccaggaggcagaggttgcagtgatctgagattgcaccactgcactccagcctgggcaaaagagcgagactccatctcataaataaatacataaataaataaagaaatccttaatttctgcggaactgagtgctctaccttctggctacacctacgtatacctgtatgaggtataggccctggaagcagcaaacacttacagaaatggtgaaatcttactaaaggtaatctaaagttatggtggaacatcccaaatgaacaacactgcactttaggaagtacatataaaaatgaagtctcccaatttagtattattcagggatggctgttgaagttcagaagcttctaaaaagattccaataattttacagattcttttaaaagattctttgtaaaaggcaaataaaaagcttaagtgactaatcagaaaaattaggtcttctaaccttttgtcattgttactgtcttgccctgaaagggaaaagaaagctggataaagtatttatagaagatagaggacctgtggtggctcatgcctgtaatccaaggtggaaggattgcttgaggccagaagttcaagaccagtccaagcaacatagcaaggccccatctctacaaaaaatgaaaataaaattagccgagcgtgatggctcatgcctgtagttctagcttctagagaggctgaggcaggaggattgcttgagtccaggagttcaagattacagtgagctatggtcacaccactgcactccagcctgggtgatggagtgagactgtctcaataaaaagacaaaaaggtaagcccttaggtaaagta

SEQ ID NO: 9176 - DNA, 2300 bp, Homo sapien
agcgattctcctgcctcagcctcccagttgctgggattgcaggcatgtgccaccatgcccggctaattttgtatttttagtagagacggggtttctccatgttggtcaggctggtctcgaactcccaacctcaggcaatctgccagccttggcctcccaaagtgctggggttataggcatgagccaccgcgcccggccaaaaggcagaaagttctaagaaggagaggtcaacattggcaaatgccacaaagggcacaagatgggaattaaatttttccattagatttggcaattaagcaatggctgatgttgttcagtggagtgaaaggctgagaagggaatgagaggttaggaaacattcaccttaaggctaggcaactcctttgaaaagagtcaagtagggttaagggaggatccatgccctccaggttgacttttaaatcatattccctttggttttgcatttgaatcacagtgaactttctcctctccaaatgttgatttgacaaatttgagtcttaccatggctctcttctcagtccacctgcaggtcaaggaactaatgaggtgtggagtaactaaaggtcaaaaaacaagaggaagaaacaaagggccaaaaaaccccaaaccttaaatcaggtcctgagtcagatacgctgtaacaaattctgcttcaagtttaatattcttgttttgatgatgtttaaaaaaagaaaaataaaagcaagtgtctggaaaattaaaaggcggggtgggggggggcattttaattggaatgctttcttgtatctcatccactatccgcaccccatcgccctgcaaattaatagctgttgcggagttggggtatgtgtgaccacaaaatccaaaggctgaattttgcccagtgcctgagtaattgcatgccacacacaaaaaaacagtagaatattgaaaacaacatacacatctgtatttccatatgaaagcacccgtttcctttcttgattatctgctatttttaaaggggttgggagtgcagcggggcggggggatgaggcgttttttctgaatacgagcccagctctttctaaacttttgttactcacgtccgtttgattcatttgctgtgttttttctttctttctttttttttttcccctctcctgcctctgtcattgcctgctgctaagagggacgctgaatcacagccactgcagatgaaaagcaattcaaacccagtccttggaggggggatggaacggctctttttgatttttttcccctctgcagaaaaagcctcctactttccgggtgaccgtagagggcagtttgacaagtctcagccccgggcgatggaagattttgcccgtgggaccgtcacgagccaccggtcatctccccgcgcccggctttcgggtcctcaggcctcggtgcgtcgcgggccaggcgacagcgggggggcgtcgcgggccgggcgagcgtggcccggtgggcccgagggtcgcgccgagctccccgccgctttaaaagctcccacaatgcagcgctggcgtcccagttccgttacgaggtctctcccggcgccggcgagcgggccaggcgcgggcggggcgcggaggagcggcggctgaaacccgagcgcccggccgaggggggcgcccccgcgccgctcctctcgcgcgctcagccgctgcccggcgaaggggcggagccgcctggccgcccggcccggcccggcccggcccggcccccagcccggcccccagcccagaggcaccggccgcgggagcgagcgggtcgccgactcctacgcccgcgctcctcctacgcccgcgctcgtccggcgccccgcgccgcgccccgctcagcgtctgccgcccagctcctcgcccagcctcgccgagcctcgcccttcccgcccgcggcggcgttggcgctgggggcggctcccgcggcgtctctgccgctggccgagcgctcgcgcaccgcggcacccccgccagtggcgtccacactcacctagcgcgggccgggaggtgcgcggagagggaacgccggggggccggggcctccagccggtgcggggcgcgcggcgcggggagcgccggggagtgccggggagtgcggcgcggggacgggcgctgggcggccgcggagctccgggtgccgccgcgtccccagcgccccggccggcccctctgggcggcctgcgggggcggcgcagttgcgaaactgagtaagtattaactttacttagcggcggcgatccgggctgcgccggggaccccgcccgtcccgcctgcagcctcggagctgcc

SEQ ID NO: 9177 - DNA, 2300 bp, Homo sapien
gaattactttgaacgtcccctcttctggactcccctccccaaagggactggcggcaaaggagaatagaatgcagatggttaatagttcaaatgaaatttaaaaacctataaaccaatatttttttagaggagaaaagcgttcaccaaaccgccacccggcaagcgagcatccgatttccatccggaggaaaaaatattttaaaaaccagacataaaattccctttgcaagaaaagtggcctctaaactcccttgccaaggacactgggaggaagcagaaaagcaaagaccaagctcgtacttttcagtccgcggcttgtgtgccgcgaggagaggcgcaaagggtgacacaccaggaaaggtgaacgcagagggagcgggagcccgcggcggggcagggtgggggcggaacggacgaggtacccaaggtgcggagagaggggcaaccgggcggagggcagctccgaggctgcaggcgggacgggcggggtccccggcgcagcccggatcgccgccgctaagtaaagttaatacttactcagtttcgcaactgcgccgcccccgcaggccgcccagaggggccggccggggcgctggggacgcggcggcacccggagctccgcggccgcccagcgcccgtccccgcgccgcactccccggcactccccggcgctccccgcgccgcgcgccccgcaccggctggaggccccggccccccggcgttccctctccgcgcacctcccggcccgcgctaggtgagtgtggacgccactggcgggggtgccgcggtgcgcgagcgctcggccagcggcagagacgccgcgggagccgcccccagcgccaacgccgccgcgggcgggaagggcgaggctcggcgaggctgggcgaggagctgggcggcagacgctgagcggggcgcggcgcggggcgccggacgagcgcgggcgtaggaggagcgcgggcgtaggagtcggcgacccgctcgctcccgcggccggtgcctctgggctgggggccgggctgggggccgggccgggccgggccgggccgggcggccaggcggctccgccccttcgccgggcagcggctgagcgcgcgagaggagcggcgcgggggcgcccccctcggccgggcgctcgggtttcagccgccgctcctccgcgccccgcccgcgcctggcccgctcgccggcgccgggagagacctcgtaacggaactgggacgccagcgctgcattgtgggagcttttaaagcggcggggagctcggcgcgaccctcgggcccaccgggccacgctcgcccggcccgcgacgcccccccgctgtcgcctggcccgcgacgcaccgaggcctgaggacccgaaagccgggcgcggggagatgaccggtggctcgtgacggtcccacgggcaaaatcttccatcgcccggggctgagacttgtcaaactgccctctacggtcacccggaaagtaggaggctttttctgcagaggggaaaaaaatcaaaaagagccgttccatcccccctccaaggactgggtttgaattgcttttcatctgcagtggctgtgattcagcgtccctcttagcagcaggcaatgacagaggcaggagaggggaaaaaaaaaaagaaagaaagaaaaaacacagcaaatgaatcaaacggacgtgagtaacaaaagtttagaaagagctgggctcgtattcagaaaaaacgcctcatccccccgccccgctgcactcccaacccctttaaaaatagcagataatcaagaaaggaaacgggtgctttcatatggaaatacagatgtgtatgttgttttcaatattctactgtttttttgtgtgtggcatgcaattactcaggcactgggcaaaattcagcctttggattttgtggtcacacataccccaactccgcaacagctattaatttgcagggcgatggggtgcggatagtggatgagatacaagaaagcattccaattaaaatgcccccccccaccccgccttttaattttccagacacttgcttttatttttctttttttaaacatcatcaaaacaagaatattaaacttgaagcagaatttgttacagcgtatctgactcaggacctgatttaaggtttggggttttttggccctttgtttcttcctcttgttttttgacctttagttactccacacctcattagttccttgacctgcaggtggactgagaagagagccatggtaagactcaaatttgtcaaatcaacatttggagaggagaaagttcactgtgattcaaatgcaaaac

SEQ ID NO: 9178 - DNA, 2300 bp, Homo sapien
ttcctggggacaaagcagatctaatgaattgctgagccacaatctactggaaaatccataaatgttcgtccctgctgtcacagggctagaggatttttttttttaatgaaatgctttaatgctaacctgacagggctaacctgacaggtttaagtcagctatgagacgtgatttgcattcatttcgcttctaaatccctaaagatcagcaacaatattgacccgcaattatatatcctacgttgcactgttcaagatgccatttgaggctgggaaagtagtggtttagcaacaccaggcggctctatgatgctaaaataacaacgcaacactggattccgaacccaagtactcatcttttaaaacccagtgccgcaccaggacccacattcaaagctcgcgtcccttcaagttgaatcttccggctttgtgcgatttaccctctcaaactttctagtttgcaagtcagaattactttgaacgtcccctcttctggactcccctccccaaagggactggcggcaaaggagaatagaatgcagatggttaatagttcaaatgaaatttaaaaacctataaaccaatatttttttagaggagaaaagcgttcaccaaaccgccacccggcaagcgagcatccgatttccatccggaggaaaaaatattttaaaaaccagacataaaattccctttgcaagaaaagtggcctctaaactcccttgccaaggacactgggaggaagcagaaaagcaaagaccaagctcgtacttttcagtccgcggcttgtgtgccgcgaggagaggcgcaaagggtgacacaccaggaaaggtgaacgcagagggagcgggagcccgcggcggggcagggtgggggcggaacggacgaggtacccaaggtgcggagagaggggcaaccgggcggagggcagctccgaggctgcaggcgggacgggcggggtccccggcgcagcccggatcgccgccgctaagtaaagttaatacttactcagtttcgcaactgcgccgcccccgcaggccgcccagaggggccggccggggcgctggggacgcggcggcacccggagctccgcggccgcccagcgcccgtccccgcgccgcactccccggcactccccggcgctccccgcgccgcgcgccccgcaccggctggaggccccggccccccggcgttccctctccgcgcacctcccggcccgcgctaggtgagtgtggacgccactggcgggggtgccgcggtgcgcgagcgctcggccagcggcagagacgccgcgggagccgcccccagcgccaacgccgccgcgggcgggaagggcgaggctcggcgaggctgggcgaggagctgggcggcagacgctgagcggggcgcggcgcggggcgccggacgagcgcgggcgtaggaggagcgcgggcgtaggagtcggcgacccgctcgctcccgcggccggtgcctctgggctgggggccgggctgggggccgggccgggccgggccgggccgggcggccaggcggctccgccccttcgccgggcagcggctgagcgcgcgagaggagcggcgcgggggcgcccccctcggccgggcgctcgggtttcagccgccgctcctccgcgccccgcccgcgcctggcccgctcgccggcgccgggagagacctcgtaacggaactgggacgccagcgctgcattgtgggagcttttaaagcggcggggagctcggcgcgaccctcgggcccaccgggccacgctcgcccggcccgcgacgcccccccgctgtcgcctggcccgcgacgcaccgaggcctgaggacccgaaagccgggcgcggggagatgaccggtggctcgtgacggtcccacgggcaaaatcttccatcgcccggggctgagacttgtcaaactgccctctacggtcacccggaaagtaggaggctttttctgcagaggggaaaaaaatcaaaaagagccgttccatcccccctccaaggactgggtttgaattgcttttcatctgcagtggctgtgattcagcgtccctcttagcagcaggcaatgacagaggcaggagaggggaaaaaaaaaaagaaagaaagaaaaaacacagcaaatgaatcaaacggacgtgagtaacaaaagtttagaaagagctgggctcgtattcagaaaaaacgcctcatccccccgccccgctgcactcccaacccctttaaaaatagcagataatcaagaaaggaaacgggtgctttcatatggaaatacagatgtgtatgttgttttcaatattctac

SEQ ID NO: 9179 - DNA, 2300 bp, Homo sapien
tcaagtgaaatttagctctggagcaaatatttacatcccctttctactccaaacattcagaaatctagaaggggacctggtgttttaatttttaaattattcacctaacggcattcccatttttagtcaattaaaaagaggtaaaaatgatacagtactgcaggaataggtcgcttttagggctccaacgtgccctccccatcgaagggtcttaattacctaaccttttggaaataggagagaggtcggaccgagatttaaaataaagtcagcattttaaaaatactttttaaattaagaaccatcgtgattaaattgcctgtttggtgcaaaatacgttcctctatttgaggaagtcgagagaccttaaaaggccctctaaacagatgaactgaacggaccgcgagcgtctcctcacgccggggtgatcctgggccgccgccgccgcccgagtcacgaagccagacgcagtgcgcgtctccgcccaggactccggagactgcagcagcgcgagcggccgccgcggcccgggctgctcctggagtcggggaggagacgcgactcccgcagacacgtgacctcctcccagccgccgcttcccgcgacccagatccgtccccggaacccgtgcccggcggggcgggccgggggacacgtagcgggcgccccagtccctgctgcgccctggtgcatgtacctttggcgttcttctcccctcggttcacttatcaccggcaataatcaacgtttcagagatcaccccggggagaatgtaaatatccctctctgtgcaggaaaaaccttggtttttttctctatgtctttatgtatatctagagaaatatatatatagcctccatcccacccctgggagtccctcaggacatgccttcccctgggctggcagggcggcgtgggcagtgcgcatccccgggcacctcccggtaactctcactagcagtgagtcatgctcccagggtggctctggggaaaggtaacccggctcttgctggcctgtgattcccggcgccgagcgccgcggctgcagggcgagcgcgcgcgcgcacgggttccccgagcagtgatgtggcagcagcggcaggtcggatcacgttgctggccctgtgctggtacccgtttgagaccggattaaggagggaggctttggaggtgccagcggtagtaaacgtgggctctgcacactccgggcgtctcttatcgcgcgggggggcggggggatggggaaagcacgtagcgtcaccggaggctcagaacgcggcagagttgagcgggcgggtgataaatgctgcatagcttttctgtggtagcccctctcgtgccaccccctctcgtgccacccccttctcccttcccagcccccactcaaccccggctcgctccccgccgcgttcctccaggagcacacgcggccccaaacgtcgtcatctgctgctgtgattagtggcaccgcaattccggctgctgcggggaagtttagttggcccagggacgccgtgtcaccgaaagacacttggattgcgacattcggacccagtgacaacgttttcatgtatcttaaatccttcaaggagcggattgcaagttgcttcttctcgaggcaacctctccacccagcgccaaggagtccctccaggccactgatcagtgagcaaacaagtctccaaaatttcctttgggactcaagtttacccaccgcgaattctcttttcacttcctttctatggttcaaaccaacagcacaatcggtggaaaagcaaaaagccacgttcacattcctgcaccgtaacaacggacgaacccagggagtcgcattttggagccaaggaagctcaggctgccccgcacccctgcacccccactcccccctcctcctgccgactgcatcgcctttgggaagatgaatagcttggccgaagttgtttttcctttccggtggccctgatcaggtgtccccgccccctcctgccgttcgccttctctcgccgccttctcccgacgcccccgcccggcccggcccctcctcccccgcccccctccgggctggaccgcggatggtacgttccgcacgtgagctgggtgctggtctggccggcgacgcgcgtgccctgtggccaaacactgcctggagtgagagcaaactaccagcgcagtggggccggcgcgagtgtgcgtgtgtgtgcgtgtgtgtgtgcgagcgcggtggaggggggggaccaactgcttcacactttcaacactgcactgaagagggagagcgagagagagactggagacgcaca

SEQ ID NO: 9180 - DNA, 2300 bp, Homo sapien
acatcttctgtagtgtctgttaggaagcttcttctcatccccagcccctcagccctcaccctgaccccagttgcttggtcattgccctagcaggtttcttttagggggagattaggacagggttagacttagctaatttcctttgttccagagaaggctggaatggtttcatacaagaatataactcattacaatgacccataacctccaacacatagattttcacatcctgaaaaggacaacttcctcatcatcatatacttgactccctcagctctttgacctcagcagttcaacctggaaagggacctgacagggctggcgaatttggtcagcttaatgtctacatcactttcaggtgcagggactggatggcaaatttagcaagacagcctgacctttaaacgaagaatgcggtgatcattctcaaccccttcatctccctcactcccccatccaattaataacaatatctgagaattccacctcttaaatatctgtaactccatccccctttcatcctaactgcccacactccagaccaggcccccataatctctcaccccaaatgttgcaagagcttcttccctgcttttaacagttagggtctagtaaggaagataaaaaccaccctagatatttcaagtaggaggaatttgacagaggagattaaaggcataatcataaactttggaaaggctgggattatcagttttgggaaaaactgttactgacttccagaaaatcttgacaattggttcagggaaacctgaatcccattgagctcagctgcctgccatgtggaagaggctgacttgcaggagcttgtccagaagctactgtaaacctcacatctgcacacagctgccaggggagaaatatggtgtgtctctgccactttccacatcttgcacaagggcctctcaaaggcagaatctaagttagaaagaggtggggaggggattctggaaaaatgtggttccaagtttttattatgcaatgaggacagagtggagaaggcagtggagctggtgctgagttggcatcaggtatctcacacttgtatccactgtgtatgccttctatccccctccaccacactgaattcaatcactaagttatagccagagcaatttttctgttcgtgtcattctcttgatcaaaactctttaatagcttcctatttccattaagttaaaatcaaacttgaaactcttcagtggcctgaatatgacttagttcttgcctacatctcagtctcatcactcatttctctgcccccctttctagaatccagcataccagctttctttcaaaaaatattttttaatgtaccctgctcttgctgtctcaggtccttcactcacactgttttgattgattagaatgttttgttcccacttccccaatgtctttcccttctcttcctcctactcaaccttcgggtgtcatctgaaacatcactgtctccaagaagccttctctgagttcctggaccagatttgtctccttctatcagctccctttgtgcctgtctttcataacttctgctgactgaaagactcatatgacttttcagcatctgtcttccccactagtttgtaagctccatgaagacagacacctgaattgtttactgctgtatccccagtgtctaggacagtgttgagcacagaacagacacacaactcttctgaatgattcctaaatgtgctccaccaaatcatctatacactgaagttggctttgttccaggaaaacacttgaatgacaagtcataaccaagccacataacatttgaagtgtccttgtacctgttgagggtggggaatataatgttggttcccaccctcccatcccccactaggactttcctatattggtgtggcttttatgggcagggacaccctcactatacttagagtactgcatatttacttcttggctttaccaggcacatggagattagaaagtaggtaccatgaaggatcataaaatgctcctgatattgcaggaaactcagtagtctggcagggtctttagtgaagtagtgggaagttctgtcagggggtagggcctgtggctgtggaattgctgtttgtcattgtaccaggattgatgtgctcggtgcccagaaggcagtaagctctgctccctagcagccttggtaagttgagtttctcacttgcagaacttttacttcctttcgcagtgtgcattagcaaatcagagagactgtaaaagctggagccagtccagtcgaattccacaggtgctccagagaccgtgggttggtgagg

SEQ ID NO: 9181 - DNA, 2300 bp, Homo sapien
gaagtaattaataaagcagttaatcctttagaccattggctttggagttcacatctggttccacttacccccattcataagtaggctagtgactttaatccaattacttaataattctgatactcaaattttttcatctttaaaagtggaaactataattataaggtggttataaggggtgacaataaaatatgtaaagcacctgtcatgtgtttgttacagaatactcagtaataggtagctatattgttaataacaatacatacttgattccaggtagtcaattgactttctataaatatttaccatatttccataggaaaaccaagcattttgttgttttgtcatttgggttcttctcagtcaggcccaagtcaggtgggtgtcctggtataacgccagtttttatttgtctgttcacaatagaaagcccttgtggtgtgatggccccaaagctgaccataaacttgcctcagccactctgtttttctggtaagagtgagtgctatttctactgcctctgcatggaactgggatgtgtggtttagattctgttttctaagcaaatgtatttgttccctgaaccattatttttctcactggtccagatggaaggcataaggagaacacctaagttcataaaataagtaagggtgaagtacatactttttgtcttcaaagttacttttgtggggacttggcagtttacaaaaagagctgatgatgattagtttctaattctaaagcaaacagcagggaattggattttctttaaattttccaatagcaaacaagctaggagtagcctttatcctaacatcttggcaacatcacttatttttgaatatagctttctgaatgttacaatgaccataccaaaggagatataaatacccccaaagtgatgggatcattttttagtggtttcgctgaaatttgctctaagtgctactgagtagaggtatgcgggaataagaataatcagttttattgatttcttctgtgactctgggccaggaccaagtctattttgaacatctttatatcctagcacattgtaggtgctttaaaaataactcttaaatattgactgagtaaaagcgtctatctctaagatggtcaatccaatccccctaagcactgttgtggagatgagtgaagactaactaggagtcttgctctgtcgcccaggctggagtgcagtgccatgatcacggctcactacaacctctgcctcccaggttcaagcgattctcctgcctcagcctcccgagtagctgagactacaggtgcgtgccaccacgcctgtctaatttttgtagttttagtggagacggggtttcaccatgttggccaggctagtcttgaactcctgaccttgtgatccgcccacctcggcctcccaaagtgttgggattacaggcgtgagccaacagagcttttaaaaacaaatacacgtgagaggccgggtgcatggtggctcacgcctgtaattccagcactttgggaagctgaagcagcaggatcccttgaagccaggagttcaagaccagtttggacaacataatgagatcccatctctatgaaaaaaattttaaaaaattagccagatgtggtggtgattgcctgtagtcccagccacttggagactgaggagagagaagctgttgagtccaggagtctgaggctgcagtgagctaggatggtgacaatgcactccagcctgggcaacacagtgagcccctgtttggaaaataataataataattaataacatatgtgaaagagagttcacaattagtccaatatctttagaaagattcaaaaacacctaaatgcgaaaaatgcctttattcatttgtcagctggattacagaaagtaggaagaaaagagcctgtgcctctgtaggaaagtaacaacgacttaacttctggaaatgacttcgcagcttagagcccagcagtgcctattttggattaaactgtgtattaattaagctcaaacgatttcaacattcatcaccttgcattgcacttcacagaaagcaaaaccaaaacaatcctggagttttgagtgaggaaaacagacgccccgcactcgcacacgcgcgcactcgcagcctgtctgaagtgcagaggttcaggcggccaagggacccgcgccggtttccgcgggcgacctgcaaatcctgcccggggcccggcaggcgctgcgtcccggcgcgttggcagttggcgacccccctcgaatcccccctctgctgcgggctccccgtggcctttggaggctcggtgagtcg

SEQ ID NO: 9182 - DNA, 2300 bp, Homo sapien
ttaataacaatacatacttgattccaggtagtcaattgactttctataaatatttaccatatttccataggaaaaccaagcattttgttgttttgtcatttgggttcttctcagtcaggcccaagtcaggtgggtgtcctggtataacgccagtttttatttgtctgttcacaatagaaagcccttgtggtgtgatggccccaaagctgaccataaacttgcctcagccactctgtttttctggtaagagtgagtgctatttctactgcctctgcatggaactgggatgtgtggtttagattctgttttctaagcaaatgtatttgttccctgaaccattatttttctcactggtccagatggaaggcataaggagaacacctaagttcataaaataagtaagggtgaagtacatactttttgtcttcaaagttacttttgtggggacttggcagtttacaaaaagagctgatgatgattagtttctaattctaaagcaaacagcagggaattggattttctttaaattttccaatagcaaacaagctaggagtagcctttatcctaacatcttggcaacatcacttatttttgaatatagctttctgaatgttacaatgaccataccaaaggagatataaatacccccaaagtgatgggatcattttttagtggtttcgctgaaatttgctctaagtgctactgagtagaggtatgcgggaataagaataatcagttttattgatttcttctgtgactctgggccaggaccaagtctattttgaacatctttatatcctagcacattgtaggtgctttaaaaataactcttaaatattgactgagtaaaagcgtctatctctaagatggtcaatccaatccccctaagcactgttgtggagatgagtgaagactaactaggagtcttgctctgtcgcccaggctggagtgcagtgccatgatcacggctcactacaacctctgcctcccaggttcaagcgattctcctgcctcagcctcccgagtagctgagactacaggtgcgtgccaccacgcctgtctaatttttgtagttttagtggagacggggtttcaccatgttggccaggctagtcttgaactcctgaccttgtgatccgcccacctcggcctcccaaagtgttgggattacaggcgtgagccaacagagcttttaaaaacaaatacacgtgagaggccgggtgcatggtggctcacgcctgtaattccagcactttgggaagctgaagcagcaggatcccttgaagccaggagttcaagaccagtttggacaacataatgagatcccatctctatgaaaaaaattttaaaaaattagccagatgtggtggtgattgcctgtagtcccagccacttggagactgaggagagagaagctgttgagtccaggagtctgaggctgcagtgagctaggatggtgacaatgcactccagcctgggcaacacagtgagcccctgtttggaaaataataataataattaataacatatgtgaaagagagttcacaattagtccaatatctttagaaagattcaaaaacacctaaatgcgaaaaatgcctttattcatttgtcagctggattacagaaagtaggaagaaaagagcctgtgcctctgtaggaaagtaacaacgacttaacttctggaaatgacttcgcagcttagagcccagcagtgcctattttggattaaactgtgtattaattaagctcaaacgatttcaacattcatcaccttgcattgcacttcacagaaagcaaaaccaaaacaatcctggagttttgagtgaggaaaacagacgccccgcactcgcacacgcgcgcactcgcagcctgtctgaagtgcagaggttcaggcggccaagggacccgcgccggtttccgcgggcgacctgcaaatcctgcccggggcccggcaggcgctgcgtcccggcgcgttggcagttggcgacccccctcgaatcccccctctgctgcgggctccccgtggcctttggaggctcggtgagtcggctccaaatgttttccatatttgttcagcctccataattcgaataccagggcaggccgagccagccgtgcgccgcgctccagggcccagggcgccgcacacgcacccacccacccacccagcctcgcagcgccatgggcaagaacaagcagccacgcggccagcagaggcaggggggcccgccggccgcggacgccgctgggcccgacgacatggagccgaagaagggcacgggggcccccaaggagtg

SEQ ID NO: 9183 - DNA, 2300 bp, Homo sapien
tgatccccccacctctgcctcccaaagtgcttggattacaggcgtgagccaccgtgcctggccaaccactactcattttgtatgtgttggccacagatagtttgtgacttaaaacaaagatcattcatgactttgatcaataattgagcatccactggatgtatagcacagtagtgccgtgcaatatggggaacaatacaatgtaatgcacagatctcttggataaacagaaacttccatttccagggtcactatgttgttctgtctcagctttttaataactcctatgcccaatgtcttggtggcccccaacagtgatataatgtgtgtagacagagaagggctggattatgtaacaggcatttctaagttgtcaagtaactttttacaaagaaggacacataaaaggagatctgtcagctgcatgctattacaatgactgggtccagtttatctcaacacacacaggctttgcactggtgtttcctggattcagtgtctattcccttctatctagcaggctttttaaacacaaacttttgtttttttgagacggagtcttgctctgtcgcccaggttggagtgcagtggcgccatctctgctcactgcaacctctgcctcccagcttcaagcaattctcctgcctcagcctccagagtagctgggattataggcctgtgccaccacgtccggctaatttttgtatttttagtagagatggggtttcgccatgttggccaagctggtcttgaactcctgaccccaagtgatcctcccgcctcagtctctcaaagtgctgggattacaggcgtgagtcgctgcgcctggccttttgaattctgggctaattctttcattttctattatgtgattataagtctcaatctaaaccatctttgaactgtaagacatgtaagacatctgactgtaagttacattttggtcagttgcacaatttgacacaacatgcttctgcacaccccaagttcctctgcctttctacaaactttgctctgtggggattacttatgtagcacttttaaattaggtggctggtatcaaaaccgccatacagtttgcctccactgtgtcttctagaagggaagagcaaaaggcttttaaaatcatgttctaagaagagggctacagaagcaacagagaaggcgtggaaaagtgtctagctgcgttttgcttataacggctggagctttaagagtcagcagctttaaacgtaaacaagccagggttgtcttgagccggggaccttgggctgatgggggtggaaggttaacctcggcttggagttaacgaagcgcaggaggcgcggcctcggaggcttaaagctcagctccactgagccctcaccgctgaaggttggctacaaaaactggcttggccaagtgacgtttacctccttggaggctcgcgtccacctggacatcagcggacgggtcgagtttcattaacgccgcgtacttgagaaaagaagaggaaaaagaccacccaaactacataacgaaatcgagatcatcctccttccctcactctcttccttcctctcttctactttcttcatcatgcatttattttttatttgtatttttttcctttacttcaacgcctacctcttccttggccagcaaattacccaccccgctggggctccaccttttcatctccagcagttcgggggctctctccattgtgctcgggtcctacagtgcgctcgcccggccgccacctctcaccctccctgcccccatcaagcttcttcgagttcccaggcagcgactgtcgcgccccaggtccggcctctccagggcggccgcacgcgcccgctcccccgccggggtcccccgccgcccctccagcgccgcccagcgtcgcgtccccgcgcgggccggtgcggcggcagcagaggcttcccgggtggcccggcctcccgagggtcgccccgccccggcccagctccgcccccggccgctgctccctgattggccgcccccccacctctccagggctcctctcctcctcctcgcccaatgggcaccggcacctggtccaaaaattcccctgaggggaccgagggggctcggccacttccagctcccgccgggcggctgtgacggccgcagcgggtcgcagagcagggagtggacacggagtggggagcggagagggaaggaggaggaggaggagcaaaggtgttggagagaaaacttcagaaaggaacaggaaacctgccggggaggcggcggcggctgcggcttctctgggcgcctgggctgcgctcttcgcg

SEQ ID NO: 9184 - DNA, 2300 bp, Homo sapien
acctagtatctcacagtagcctactaaatggcctgtccctatctactctttaccctctagctacagtaactttcagaatgctaatcctgaccatgttctcatgaccttaaacccgccccgtgcctatgcttttctgttgcccttaggaaacaacagagctgtttaaatgtcttacaaggcccttcattgtctggccccctccccctttttattctcatctcaaagcatactaatcttctctgtttcagccacacagatctaatatttttcatgcttcctcctgccacagtatcttggtatccattgttcttttgcctgaatagtctttcctctatttcttcttctttttttttttctttttttctttttttaatctgagacagagtctcactttgtgactcagactggagtacagtagtgtgatcatagctcactgcagcatcgacccctcgggctacaagcagtccttccacctcagcctccggagtagctgggactgcaggtgcataccacgaagcctggctaatttttgtattttttccatagagacagggtctcactatgttgcccaggctagtttcctgacctcctagcaatcctcccacttaggactcacaaagcactgagattttagatgtgagacactgcatctgttccatttctttacttaatttctactcatacccttataactcagaccagtcttcacttctcaaggaaacttctcctggtgttttggaataggacagatctccctctacaggcactcatagcactgtagattttccttcaaagccttgtcagctttatggttgcacatttgttcattattattagattaatatcttcttacgtatttactttccagatcccttggtttgtgtttcttctaactaaacttattagaattcagtatggttgtgcattttagattccttaagctttttctgagtacttaaccatgtcattttatcatttaatagtgtgggcagggaagagcagttgtagatgcttgagattttttaaattcttgctattgactttcagtgcaatgacctaaatgattgattaatgatgaatgtggaggaaaattactatttattttaatcatagataatatctttggtatttgtccaggggacctgataaaaagatgttgtctcagagatattttcccttggagagtttaaactcatttggaaatcttggtaaataatttgaagcttgtgatctacttgataatgttagtgtttctctgacatttttttcattgttgtttttaagtgaacttttaattttagagtagtttcagatttacagaaaaattgtgaagacagtacagagttccggttactccatacccagtttgctctattattattttttgcttttattattattattattttatttatttttttgatacagagtctcactctgttgcctaggctggagtgcagtgtcgtgatcgcagctcaccgcaacctctgccgcccaggttcaagcgattcttctgtctcagcctcccgaatagctgggattacaggcacctgccactgcgcctggcacatttctgtagttttagtagggacagggtttcgccatcttggtcaggctggtcttgaactcctgacctcgtgatccacctgcctcagcctcccaaagtgctgggattacaggcatgagccactgcacccggccgcttttattattttttaaattaaaacataattgtacatatttatgggatacagtgtgatgttttgatacatgtatacaatgtgtaatgtctctgacatatttttaaaggtgattcgcatctaggtggcggcagtcgagaaggctcgtttaaagaaacaataacattaaagtggtgtacaccaaggacaaataacattggtaggtatttaagaataactgaaaaagacgaaatcaaaaggttcttaaggtattatatgggggtcaatttattctgttttgcattttcgtttttcattgtttcaggactcaatgaactcagtgaagaagtttttttttctttcttttaattgtgggaatatttctttatattctttcaaatcagtgttttcttctatttcagaattacactattgtactggagcttatcggatttcacctgtagatgtaaatagtagaccttcctcctgccttactaattttcttctaaatggtaactttaattatttaatggttttgactgaaattatttatattatttgaattatttattattaaattattatttgagtgaaattattattaagaatatgaactctgga

SEQ ID NO: 9185 - DNA, 2300 bp, Homo sapien
cttcaataactacagttcctacctaacatgactgttatgagaattacggaaattaataaatatgaagcactttgaaatatgtctggcacatgtaaagtgctcaataattgttagctgttattattactggccccaattaaatatccattatatattaatcccaaagggcagcgttatgtaccacatttttaagtaataaacacacagtcattatctatagcaaattcatataaaaattcatttatgcagttaagtacatccccaaaatcatgattttgtttgtacttcacactcaccagctttttgaaaggaaatatatcatacattattctacaatattccatggaagattctactgagcaagtccacaatgatttagatatgggggccaaaggaatgattccttgggttctattcttcaccagcatatcaaactcgacatgctgcctgcaagattctgccatataagggcagtgatccacaacaaacactgttttatgagattcagaaaaaatcttcattttgttttaacctgtaaggggaaaaacatattagccaaatatttgtacataacatcttacattttttctaattttctcaagaagattgtctttccctcaagaagacttggtagggaacatgaataatatgttcaaagaaatctgtccgacaaaggacagtttaatgaggtcatgaccagaaagcaagggtatcaatacaccatattaggctgtcactctaccaggcccagacaaaaataccagtgcatgcatttttggttttgcttttaaaatgaacttaaaattgtcagagggaaacattttgacatttaattgtatttgattcccttacatatacgaaacataagtgacaaagactcttgaaatacaactttatgatccttgctaattgacattagtcacatataaaccccaagccagcatttttgcacttccctccaagaaaaacgtttgaagggggactggcgggtaggggtgcggaattaacaggaaagaggagtgacagcaaaagaaaaggccaaaacaaagataaacatctcctaagataaccgcacatcaggtcttcgccttaggataaggaccccaacttcacactctccccttagcttttgaaacatcacagtaatttaccaggtagagcagaaaaacttagttgttaccatcacactggtgtgtagaaggaaatttaaaacttttaaaactttttcttattaaaacagagcatacggtactcccctgcttcgctaacaaaatcttatactgaatagacaatccacattcgaaaagcacatggcaagcaaagccaaagtgttaaatcaaaacgaactgatttcttacgatccagctattttcacctcttgctttcaagacgcatctccccttcatgcaaaactctctttgagaaaccttctagacccactttgctggagggtggggggtggaaaatacaaggtgagtggatagggaagacctcaggatcgaggttcgcttactttcgtgcctggtcctgcagtgaaaacgaacagaggctatggaccacagcctctctggaaaaggctgctggctgggcggggagagtcagcgcacagtcgggagtgtctggtgccacagacaggggactatgctttccccgatcatctcctagcacaccggtccttcccaggcttcctaagagcaggagcgcgcgtgcgcgtgcacacacacacacgcactcgggctcgcgcgtgcgcacagcgctctccgatagcccggccaagcctcccttccccctcgtagggccaggcgtcccagtcgccgaacaggaagagggcggggccaaggaggaaaaaaaaagcctccacccctcgagattttccacccgctaattttcccagtcacccattgggaagcaggatctgggcgacctgaaagcctccccaacagcgaagtaccaaccacggccccctaagcgtacgacccacccacccggtctccccttctctgtctctccacccaggccggtttcccctggaaaaactcgcgagactttgcgagaggccgagcgaaagcctgggaagggaggaatagggagggacatagaagggccccgccctgccttctggggcaaagcggagagtggtcggttctgccccacagtaacgcgaggaaagaaatctcgcgaggctggagttctccgggagcgccggtcggaggcggtcggcggaggtgtctaccccgccggtgatggcgttgaacgccactggcttcccggccttccgtccgctgcctccgtccgattct

SEQ ID NO: 9186 - DNA, 2300 bp, Homo sapien
aaaacatttctgctccatttctcaaatataaatagatactgtaaaaataaaatacaaaatcatttaaaagcatagtagttttctgtcattatacataatttcaaccaacaattactaaaagtccaattgcatgtgtattagaagtacagggtttctcataatcaaaataggtcgggacctttaagctaatgtacagagttccttctggcccaaaattctatgattttaaaggatgaagaactcttacggtgaattccttagaactattccatttcaataaacatacatatgtatatataaataatgcttgctatgtgccaagtactggactttttctcagagatgagtaagacatgattccagacagacccaggttcaaattggcaggagagacagaaacaaataatacaacctaataaatactgcagaagaaaagtttcaaatgcgttgggagcacagcggtatcaatgtcacctgggggagtctgagaagacaatgatttatgaattgggttttgacaggtggtaaaatagaggaacagtaaacatcctagacatccgcacgtacaaaagtacagagctgtcaaagcgcatggcatgtttggggaaatagccagtatagtcttgtatggtaggatattaaagcaggactaaaaggtaaaatggattggggcagactgtaaaagatcctgaatgatgatgtgcttaacaattaggatttgatgctgtcagcaatacggttactaaaaagtttaaggaaaggacagagataaatatgtatttcagaataactctatggaaggattatagtagggaaaccagtggagggcggggggcagagggggcaaccgcactaattctggcgaaaaaaaaaataatacagtgcagtgttaagtggaaatgaagaaccaatgatgattcctggttttctagttcggatagcaggacagatactggaaccattatcagagatgggatagagaagaaaggcaggaagagaaccagaaaagagtaataccccttggagagcagtttcaagaaacaagttatcttcattaaacgctgcaaacaggtgactgaaagggtcccccgtccggtggtgaactcgcaggtgggtaaggcaggatgaaagcagatacggaaggtgtgtccacagggttagagccaaggcttttcattgaactttccgcaccgcatctccattaagaggagctcggagtcggggggcgcggagaggaagtccggctcccaggagcagggagcccgcggcgggaagcggacagggccgggcgccggtggttcaagaggcgcaaggcaccggccccggcgaaggactgccccggcaaaggacgcctccgactcgcccacccctgctcccgtccctggatttagtccacttactctgctcttagtccctcgcagccttcagctgtggcgatgcggactcaaaccctctaccaaccgggacctatgcactcaagggaagagactccgcgcccccctaatccgcctcctcagcaagcagacgcagaatcggacggaggcagcggacggaaggccgggaagccagtggcgttcaacgccatcaccggcggggtagacacctccgccgaccgcctccgaccggcgctcccggagaactccagcctcgcgagatttctttcctcgcgttactgtggggcagaaccgaccactctccgctttgccccagaaggcagggcggggcccttctatgtccctccctattcctcccttcccaggctttcgctcggcctctcgcaaagtctcgcgagtttttccaggggaaaccggcctgggtggagagacagagaaggggagaccgggtgggtgggtcgtacgcttagggggccgtggttggtacttcgctgttggggaggctttcaggtcgcccagatcctgcttcccaatgggtgactgggaaaattagcgggtggaaaatctcgaggggtggaggctttttttttcctccttggccccgccctcttcctgttcggcgactgggacgcctggccctacgagggggaagggaggcttggccgggctatcggagagcgctgtgcgcacgcgcgagcccgagtgcgtgtgtgtgtgtgcacgcgcacgcgcgctcctgctcttaggaagcctgggaaggaccggtgtgctaggagatgatcggggaaagcatagtcccctgtctgtggcaccagacactcccgactgtgcgctgactctccccgcccagccagcagccttttccagagaggctgtggtccatagcctctgttcgttttcactgca

SEQ ID NO: 9187 - DNA, 2300 bp, Homo sapien
tattattaccaatattatttaagaaacagtgattatgagccttcttttccccatttgttacaacagaaataggaaaggacatattttcatatttatctattattgaaacacattttagattctttaaaatacttcttccattttggtgcttgtacgtgtttttaacttattagtaattaattctattagaattaaatacctatcaaatagctctttatatgcctttattatattagaaaacctaatgataggtacctcttgtgtcaaccagtaaaataataaattaaattaaaaatttgtgtttaatgttttctaattatgctattcatctcctaatcaaatggcaatccagggatgtttaagtggtgatcttttgaatacaaaatttaactattgttaatgagaccattctaaaatcatttaaatttaaaggtataataataactatagtaactaagactttttaaaggcactaaaaggagttgacttaatattatttgtaagataaatataatcttgagaatttctaaaaggtttgtatgttttataacctaaaaataaaatgttaaagatctaaagcgaagaataccattacaaaaaaagtgcttagaataggataactatagcttgcaggtcccatctggtagcaactatgacagaagcaaatgtttcctaaaatatattagattttactattcaccagagctggtttattaattagtaaggttaaacatttcctaagatagctgtaagccatccttttttattatgtagattgaattcttcatctaagttcagatgatccttgcctcccataaaatgactattcagttatttgttattaattttcactaatacatattaatgtttgtgattttgatttttcccaaaaaggagacacttcgacttaattaaacaaacattaatactggcactgggttagttatgggaaataataagatgaatgtacaagcttgcagtatagtgggagatacagacacaaacataacaatctactataaggtagggcgtgatgaatcccaaagtagatgaattgttactggaacgctagagggaacaatattaactgtcataaggaaaatctggaaaggtaacaaggaagggaagaaagtctgtctcagtccagccttgaattaattatgggcaggtaggtaaacaagcagaagtgggtgggtgggcagagaaacttgtataataaaagcacaaaaagtatggtattgtagggtgtgtttaggtactagtgctctgatatgcctaaacacaaaagtaattttacaacacatttagagctaagaaacagagttacacataacagcattttggattggagtaagagatccttttgagactgttataatacagaactttgcccttaactagaagtttttgagcacatacttaaaaaatcagtagaaagtttgagagctcatttttacccaaatactaattttcatgttatttttgaacagatgcctttttggaaatcttaaaaaagcaaacatttcaaacagttggctaacacgcatgaactaacactcattcagtttttaaattacggatgatatccgtattaacattataatgactctatactacagattgacatggtacatcgtaacaagtccgaaggattcttccttgatgcatctcgacacatccttgaagcacctcaacatggactggagagaaggcacttggaagcaaatcagaatgtacactaaataaacagtcaacttttggggtgtggatggaaggggggtccattttaaaagtgcttttacattgaatttccctcccagattagatcagcaaataaatgaaatttattaaaagaatgttgtgtctttaatagccatgctgttcagtgtagaaactttaaatctctcattaattttctgtgtattgtatcatgtacagcctgttagatatttgcaggttttataggttattcagtccaacgctttatttatttgctcttgttagttgttgctgtgaaacagtcatttcctttctggacatcaaagatattttcttggcattaattttaaactgatttcataaggtcaaagtattaaatgttttaattcagattgtggatagtttgtagtcctttgattttgcaaatgaaattaaaatgcctttgtttagatgttaggattaagtatagtagtgctctctccattgtgtcttaatttttttttaactcacttgtggcaggtctttattgaataaaggaggaataaacctagacagggagttagaaatgaaagacatttcaa

SEQ ID NO: 9188 - DNA, 2300 bp, Homo sapien
tgtgatatgttgaagatatgagatgtacaacaagcaaaatgttgaggttttctttacctgaaaacagatacctccctaccccattatgtttaacagaatgcttgtcaacttttccttctcaatcccaatttattgacaagccaagcctgtcactggccctgtgaggtttagctccctagctaatttccttgtctcagcccagacccctccctagagagggttgctctatgctggcttcatggcaccactgaagagccctcagtgcctgacctacagaaagctgaagctggcactggtaacggtattgtatgtctaaggcacgcggttggaagtactgccggttatccagcagttcatcctctctctttgtacagtgaatctgattctgacagctgtcactggaagcgtcggtggaatgttcttggtagctgtgtggtggcgatttggaatcctctcgatctgcatgctctgtgttggactagtgctggggttcctcatctcgtcagtgactttctttactccactgggtaggcgatatgtaacagatgttttgtgtgttcgagtgactgtttgaatactgcctaattggatttgcatcctggagtggtgttgcatgtcagtgcttctcctgtggagttctggaaatctgcattgatggtgtgacactttcagacagcaccaggactagtaaaagtccctccttcctcaaaggcacagtagatgaaatatagaatgtctttagaggtagctttgtatctatttgttgtgataagtggtatgtgtttattagaaataatggaggtaaaggaaataaggaggtaaaggctctgatggcagctgagtcggggaacctggtactttgtttctggtcttctgttgtaccctcaacctccactcccatccgctgccaaaccccaggtgtccctcaggtacttaatcaccctggggcagtagcacagggctggttctggggtttttttggtgtttttaaaaagtaattcaattgctatcagtttttaaaatctggttaacttataagttaactttctttgccattgtttaataacttacatttcctgattattgtcaaaaacaaacaaaaacagcatctgtactcaaaagtattctatttggttgtttcctttctgtgacaatgttcttaaaatactagaataaagttgatgggactgttagacataaaaatagccatttcatgaggctgtcaactctatagagaatgcaggatataatagagtacaagtcatgtgtcccttgtctctctgaagactttttttttctaagactactggatagtctgatgaaaagcagtgttgtgtaggcttggcgaaatgacagattcacatggggatgtttttgaaatacagattcaaggctctaccctacatgtgctaaataaaatacttcctaatggctgagcatggtggctcatgcctataatcccagcactttgggagaccaagtgggaggattgcttgagctcaagtttgagaccagcctgggcaacatagtgattccccatctctactgaaaaaaaaaaaaaaaaaattagccaggtgttgtagtgcacacctgtggtctcagctactctgggaggctgaggctagaggattgcttgaacccgggaggttgaggctgcagtgagctatgatggtgccattgcactccagcctgggcgactgaacaagaccctgtctcaaaaacaaaacaaaaagaccacaaaaaccaactactacttaatgggcttcccctcttttgttaatgcttagaggatggagggatgataggttataatttctagtaatttaatgtacttttcatgaggagaatgagcataaattataaagtcaggaaaaaaccttctatatgcattctggctctgtcactagttccctttctagcttataaccttggacgatgtattgaaactttgttccatcatctgtgaaactatctcataggatagatgtgaggaatgagaaaacagaaataaagaggtctcttaattttcaactttataaagtagtctagagcagttgtctctaaactttttgacataactattcctattggtaaaaataattttagcatataccctttatatatgtttgtttatgaactatctcatagctcaaggaccgttagagtgatcatctcctcaatgctagtgggtgcaaacccatatttttattttttagagacaggatctctttctgtcacccatgctggactgcagtgacactatcatagctcactgcaacctcaaactctaaggctcaagc

SEQ ID NO: 9189 - DNA, 2300 bp, Homo sapien
tgtttgaaatagcaactcctttcctgctattatgacactttttttattaattgggaagagagtattgtaaagaatatataatatctcaacatgtagaatgattctgtaacaaagaacttagttgctaagctgtggtctcaaagttatcactagctttttttttttctttttaaagagatggagtctcactgtgtctcctaggctggagtgcagtgtagtggctgttcacaggtacaattatagtgcactacagcctcacattcctagcctcaagtgatcctcccacctcagcctcccaagtagctgagactacaggcacaagccaccatgcctcactctgggtttttttggtgtgttgatatgtatcattttatatttattgaaattgagatacagtacaagtattaccaagaacagctgtgaagaatttaagaaaataggtagagctatggcctccatgatcaggattaggcttatttgtgggaacaaagttatctgtatacttgcattaccaggtgttttaatggatgaaggtaatgattgatcattctaaacaggataggatgaattaaaagaagatataaaagttatattttgctttgggacagtttgggtttcttttaccttttacattttatttctgcttacaaaactattaaaatttaatgtgtaatttcgtatcacatacacgtgacaaagtgctattcttattttaagcagaaaacataaatatattaaaatgagctatgaaatgaacaaataacaatttaacaatggaaactgacctatatacaagaaagtgtatcctgtagttggtactttaatattgtatctgtttaataataattactcccatggctgctgaatttcttctgccttttagattttttttttcttctgaatgctgtaacatgtaaattccaggagcttaagcatgtatttgtagattaaatatttaaattgcactgtaaaaagggtgcttaaccatagcttttgttgttttgcttttttcctttcctggtggtttgccacttagaattattcttcataggctttatcatcatgggattcttcttttatatactgattacaagactgacacctatcaagtatgatggtaagtgaaaattatatagtttaactgggtattcaagaaggcaggtgctgtgttttacttcacctttccttctacagtttggcctatattgtgtgtgacagcctattacttatgtaaaataatggtccatctagtctctgaacaccttttctgaactactcattcagaccttctgggtttttaatctgtatggtgaattccttggtacttagggaaaggaggggccatattgattatagacctgtgttctggctatgtgatatgttgaagatatgagatgtacaacaagcaaaatgttgaggttttctttacctgaaaacagatacctccctaccccattatgtttaacagaatgcttgtcaacttttccttctcaatcccaatttattgacaagccaagcctgtcactggccctgtgaggtttagctccctagctaatttccttgtctcagcccagacccctccctagagagggttgctctatgctggcttcatggcaccactgaagagccctcagtgcctgacctacagaaagctgaagctggcactggtaacggtattgtatgtctaaggcacgcggttggaagtactgccggttatccagcagttcatcctctctctttgtacagtgaatctgattctgacagctgtcactggaagcgtcggtggaatgttcttggtagctgtgtggtggcgatttggaatcctctcgatctgcatgctctgtgttggactagtgctggggttcctcatctcgtcagtgactttctttactccactgggtaggcgatatgtaacagatgttttgtgtgttcgagtgactgtttgaatactgcctaattggatttgcatcctggagtggtgttgcatgtcagtgcttctcctgtggagttctggaaatctgcattgatggtgtgacactttcagacagcaccaggactagtaaaagtccctccttcctcaaaggcacagtagatgaaatatagaatgtctttagaggtagctttgtatctatttgttgtgataagtggtatgtgtttattagaaataatggaggtaaaggaaataaggaggtaaaggctctgatggcagctgagtcggggaacctggtactttgtttctggtcttctgttgtaccctcaacctccactcccatccgctgccaaaccccaggtgtccctca

SEQ ID NO: 9190 - DNA, 2300 bp, Homo sapien
ctgccctcttgaactcctgggctcaagtaatcctcctgcctcagccccctgagtatctgggactacaggcgcataccacttcccccagcttatactaatttttatatgtgtatttaattatgtacttaaatctaaaagtggattataccaaatctacaaaaataagatttttaaacatttttgatgccgattactttattaaagtgtatattcccagtatccctacctaagaatgcctccttcttagctcttttatccacactggatgttttatacttttaaaatgtttacatcttagtttgttaatttgatttttttatttgtttactagtgagattgaacttttttcatgtatttactggtaatttgtatttcttttttggggtgaaattccccattcatgtcctttgctaattttttttttttggtcaacttgccttttcatattgtttgtgtgtttactttaataaaatttaaatatttatgtaaaaagcatttacgtagccaagtctaccaatcttttcctttatggttgtttcctttgctgttttgcttcttagaaagctcctcccattttgagatcaatttattaaaaaaaaaaaagagcgccctcttctgctagctcttttatggttttattactttgggattttgttttcacaattagtgtgagatagagttctgcttctctctgcccatagtgcagctaatcagttaagaacacaatttattgaataatccatccactgattcagatgctacccttatcataattgtccctttcatcttccttggatttcatctactgagggttataggaataggggcatgtgggagagtgaataagcactacagaaatagatagtgctaccaaaggtgtgaaaatttggaccaggcagtgggaaagcagagaaagaattgtgcctatgacaaagattatttgcttggccaaactctagtacggcttctgaatcttctgctaggtccatctgtgcacttctttgtaaaaatccagttttagcaaagaaccccctttcctccatatctaatcagttttctcaccctgcaccatcccccaggtgatgttatgtcttcagaagtcctgttaggtcagtttcaccaaatgccccttacctctgatgcttcctcttagtaattttccatccactgaactccatactgctggttggctataaattccctcttgcccacgctgtattcggagttgagcccagtccctcttccccactgcaagacccagttgcagtggtccctatgccaattgagacagtcctcaatagtcttcgttcggtgctttaacaagtatcattgaataattttgtctttaacacttcttcacattatggtcacagctatatattgttagcttagtagtggactaactgaacatgtaatttccaagctataagttgctcatcaaaatatataagtgaaaaaaattaaaaccagggaaggaaagcaagacaatcctccccaaataacgttaagtctatgcgtctaattccacatcatcgatgagccatctgtcacatggactactgtccctcaaacagcactcaggtatgagacttgagacgaagttcagaccaaggccgtgtcttcgaggatatttcgcttagagaaaacgaaactacttttaaatgtagtgcttatgactagtgcggtaaccactacacaaacagcattctcctggcatttttatgctaacataagcctcagcagcgaagacaattgctaccgggggaaataaccttcaattgtgtttttagcaactgattcctcttttttgctgttgtaaagggccgttaaacacggaaacaggagcctggcgacgttagtccgcaacagaaagttattttgtactttcacagtgggtttgcctacttggtgagataaaagtggggcaagaccgggcctcaagccaggacttcctgggggctcccgggagcaccgcaggctgcgcgttccccgcgcgccggcaggaggcgcgcgctgcctggaaacgccccagcgccgcccgcgcccagagacccgccgctgtgacgcagcgagagcccgggaggaggcgcgggaacgcgcgttgggggtcaggtgccggaagaggaaacctctcgctggggctaggagttcggcggggcgcgcgccggcggctgcggagctggcaggtgcgaagcgtctgcacctggcgggcgatggcgcccgatgcgggcgccccgggatagcgtgggcgaggctgcggggccccggcgcgcacgcccgcacctctccccagccctggc

SEQ ID NO: 9191 - DNA, 2300 bp, Homo sapien
gaatgaggaaagagctagaccagtggttctcaattgggggcaattttgccccccagcaacatttgggactatctggagatactttatgttggcataaatggattggggggatgctaccggcatctcaggggtaagggacagggatgctctaaacatcctacagtgcacaggtcagcatcccacagcaaagaataatctagcctgaaaagtcaagagtgcagccattgagaaatcctgagctagatgcacagactatatttggcaggtgggttattcttgaagtctacagcttcaagagcttcctaaaccccttttcaaatgtaggctaagttgagagtctggtctggggaaagggtccacagcttttatctgattcttaaaaagatccgtggccgaaagaggctgaagaaccaggaaaaccaaggggtcagggaccttggctgaaacagattatttcactcagaaaattatcaggaggtgaggctgggtctgtttgctggagccagattatagtaaatcttgaaaaccaggcagagatagttggacatcaacctgaggtctctgtggaggcacagaagacctattaggaagataatggcaggacaaaaactgtgtcacaatatgaatgtcttgaagtggcttctctacttcaactgcccaagttcccttcaatcaggctgcaaaacttagtattcttatggagtggactaaactatatccaatcagtcaccaatccatattaattttttttctcaaaaatatattttagtctttctttccccgcttatcagggtcaacaccctattctaggcccagctcatcttaatcttggacaactgcaaaaccttccttagtgagtccttggcttattcatctttgcaaattgagcactggatatacttcctggcatgtggcagccattccgtaaggtacactctcaagtgagggtgggaggagaaggttgtagaatccccccaagttacagtgaaaacaaattacagagtgatttctcattagtcccattatggggaacatgcctcatccacgttcttaatgaggctccagtaagtctgtagactgtttggggctgagggtggggcattggtgtgaagcagaagtggtgcttcacagtaagtgttgggataaatccaacaagctgagttccccagggactgtgtcttccaccttccccgcagccacaggaaggtaatcacggataatcagcctgagaaagaggatatgagagttttttgaagtctacaaacctgttatttgccgattccaaactcatttcttaccagactatcctcaggctaaatttccttaaataccaagtttcgattatcacttttcacacttaaactctcaataagtcccaactctaaatctaaattgtgcagctaatttttcttggccgagcacggtggctcacgcctgtaatcccagcactttgagaggccgaggcgggcggagcacgaggtcgggagatcgagaccatcctggctaacatggtgaaaccccgtctctactaaaagtacaaaaaaaaaaaaaaaatgccgggcgtggtgcggacgcctgtagtcccagctactccggaggctgaggcaggagaatggcgtgaacccgggaggcggagctggcagtgagccgagatcgcaccactgcactccagcctgggcgacagaacgagactccgtctcaaataaataaataaataaataaataaataaataaaaataaatatatttactcttcaatttggtcaataaataaacacgagagggtacgagaaattacttaaaaaaaaaaaatccccgcagaatccaacaatctctgaagcctttaacacctaacaaccccaaggggagtatttcggctcttggactgtatttcaaagcgattggaccccagaccattcccccagttactcaaaagatccagcctctcctcaggtgtagcccgctctagaaaggccgcctcgggagtaccacccactcctgacggggcggggagttctctccgaccccacccgttccaaggacgcagccctgtgattggccatgacgcgtgccagagctgcccagtcgcggaagagcagctgttttggcgtctgtttgctgcggtaggaacatggcggatcggctcacgcagcttcaggacgctgtgaattcggtgaggaatttcattcgattagcctctgtctttctctttcttgaggtaaagcaagggaggaaaggggcccaagaggcaaaacttgaaagtggggagcggactgagagacagggcttcggcataaagcg

SEQ ID NO: 9192 - DNA, 2300 bp, Homo sapien
tcttgatcttattatttaatgcattaataaagaggcaaatatataactattttagttatctatggcagtgtaacatagtatcccaaaagttagtggcttaaaaccacaaatatttattgtctcacagtttctgtgggccagaaatctgggcttggctagttgggcctgctggctcagtatctggttttacaaggctgcagtctaggtgtcaggtggggctgcagtcatctcaaggctcaactgggaaagaatctacttccaagcttacttacatgattattggcagtattcagttcatcacaggttgttggactgggggcctgaattccttggtggctgttgactggatctctctcagttccttgccatgtgggcttctctgtaaggcaggtcacaagacagcagctggcttccatgaaagcgagcaagtgagagagcaaggacaagcaagatggagcccagaatatttttgtaacctaatcacggaaatgatatcctaatcacttttgctatatttcctttttaagaactaagttactagagaagggaattacagaaggcaggaatactagaaggcgtggatcattggcagccatcttagatgctactactacttaccacataattatattacaaactcactttttagtattttggtaactgtatgttaacattatcaatttcctttgtaaccctaggtagtttatgcatttaagaacactgttttgaaaaggggtccatagaccaccaaaattctggttcatagctctaatttgtttcagttgaggtactttcaacaacttcccagggaaatttgtttacaatggtctcaatttaggagaatttaggaactagaggtcaaagtcttaggctatcccatattaacctagactgctactctatactagttcatattactctagtatggcacatttgaagacataaatttgctgtggaacaaaccatacactgttctcaatcttatcgtagcatttgaatggtatgtgtatgcgtgcagtacagggagaagggtgtataggcctgtcaagcttgtctgatcacaattaaacctcctatgcttgtatatgacaactgtcatttgagtttcaaaatgaccatataagtggagctgatctccccaaaaatacactaattaccaaactagagcttttcccactactaagctatgtatgaaaaagcacagtgtaagaaagagaaatgaggtaatgcttctttcctaggtgttttgctcgtgtcacctgctcttgggaaacctaaagatgacaggtggcatttctaagtgatagtttttgcaagcacagtaccagcttcatacgttgtctcagtaagctaaaagctaagaatattttataagacctccaatactcatattgaggataaacttgccaacaataattgggagtcattctctcatttggctttcccaaaggccagttttgtccccagacgcaaattgcatcaaccttcccaaagttgtcccttttgggtcatcctataggggagtgctcttctgcacaattctcagatcctactgataaagcaggccagtactgtagttattttagattttccaagaaaactcaaacaggtttttaatgtattttttgtggcatttacaaatcctggttcctctccagtctctggagtcccctcatggtgaaatggaagcgtcaaggaacctgggtggcttcgagtccccacagctaccgactgagcaacttagctgatccatctttgttgacaactgtttcccaatctgaaaaatgcgtgaattctctctttccatttctaacattctttgcattgcactgtttgaaaaattcggatgacatttagaatgtgactaatgtcgcaacacattaggccactctcaagagaggcctgaacaggtttggcgtaaaaacggcagtgaggtgaggctggtgagaggggaagtggcgacagttcagtcaactccctcaaaaccagtctggccttcaccaggcggagatgggtggggccgggaagacgggcgttgacgacagaaggctacttccggctgtggtgcgtatgacgtcagggcgagtcggaccgacccagccaccgagaagccgaggaggcaaggctcgcgagagttcagggaggccgccctgagattccggcgaggccgcgggtcccacctcccgggggcggggcgagggcggagcggggagaagggagctgacgggcgcccggccggctgcggtccgtgcggaggctgagccggccgcgggcgcgaccggaggcaggtgagttcgcgg

SEQ ID NO: 9193 - DNA, 2300 bp, Homo sapien
tggctttgccacagataaatttaattactcctttaatatagaattacattatttttaaccccatactatttcctttctataactgagcaaatagaagaattgcttcccctttctcctctttccctttgtcctgttaacatggtccatcaacagtctacaggttaagaatgtgccttaggattttctttttctcatttcttataaaatgcctggcacatacggacactctataaatacttgttcaaccaaatgatgaaaggaaaactaattcagcattccctcaggaaagtaaacagactgaaaaataataggctaataccctctaaaaccaaataaaatgacctttgcattattgagcttattatctcattaacctaagtaactgcaaaaacttgtaaaacatttcagtatttttaaatgtattgagttacacattaaggagaaaaactttgttctacttttaaaatgtgtccattttagatcaggttttgcaattgagaataattgcaatattccctatttttaaaggggaaaaactgaatactgctcaaaattatggtgggggaattctgtacccccctatttacaaaatattcatgggtgattactcaggtgtgtgttttattattctcatggccagtagttgccaagccttagatcgagtgtttcccaagggagaagtagagaggactcagtgtttggggcaggaaatttctttagcacctggatcccctgccctgtaaatgccagttatgtcactgagatgacaaaatctgtggtcctacattttgccatggccccaagagtactacccctggttgagaattactgccttgtagaaatcatttttgtaagattttatatgaattaagaattaaaaactgcatagcttcctaaaggataagcagtaccctggaattacatttataatgaaaatacctcatgcttatttttgtagtttgtagtttacaaaacacatgccgtttattgtttcatcttcatatcaactctattagggcaggtattattattctagttttatgtaagcagaagctgagcctcagagaaattgaataatttgcccaagaacacattagtagtgagtggggaagccaggtcttctaggttcaactttttcattctttttgaaatagactgaaggctatatatataaataacttaactgagcttcttgtgggggcagaaatgatatattcttataaaatgcctggcacatatggacactctataaatatttgttcaactaagtgatgaaaggaaaactaattcagcattccctcaggaaagtaaatagactgaaaaatagtagtctataacatattatctgactcactacctaccactaagccttgcacatgataaacatgcaaaataaatacaagtgaaaatttaactcctctatatattgctttttccagtagtaagccatcctcagatagatattttttaaatgttaagaatgctggtttgacgagttgctcctttgtaggcatattccacagttgggacaccagattacattgctccagaagtattcatgcagactggttacaacaaattgtgtgactggtggtctttgggagtgattatgtatgaaatgctaataggtatgttttatcattcatttatgtacaaaatatatacatttccttgagtgccattgtttgaacatattacagatatcattgactaaaatatttgaagtcttttaagcttaattctgatgttcccccaatgttaaatacatactgatcaataccagtgagctccccacggatcctgtttcaggaaggtgggtatttaacccaaactcccacgtataaaagtggttatctacatagcttttcaggtaaaaggggaggcagtgctttcaatcctttattttattgactttattagcaacgtgattgtaaattgatgaatggtggcatttttgactgttaaatagagcactcagggttgtttggtttcttgtcgcacatgtttggtgggtataaacttcactgctcacaaagctgatgaaacatttttgatttatttgatacataggatatccacctttctgctctgaaacacctcaagaaacgtacagaaaagtgatgaactggaaagaaactctggtatttcctccagaggtacctatatctgagaaagccaaggacttaattctcaggttagtggttaaattcctagaggagttcatagtgtcttaaaacttcctaagaacctaaaagactcatttcacttttgtgggggaagaggggataccactgatgtat

SEQ ID NO: 9194 - DNA, 2300 bp, Homo sapien
ttgttttttgttgttgttgttgttgttgttgttgttcttggaccaaatacaatatctaagtggctttagggactcctctctaatctaagttatattgttacaatcccagcagaatgctaaaaggacaggagtttacagcttgtgaggccgtggttcctaattccagatggacaaaggagtatttgttccacctttaaaatatttgttcttgcctgagtacttagcaatgaaagaaaattaatgaacaaattaagtgaaaggcaagcaatgattcctggagagcaaggcagctccagggcttttggcaggggaaccatgctgaccagaaggaactgtgtgcattctattacacaaattctctagcattctattatacaaatcatccaatcacctttctcacatttttttttccaagttgaaaatatgagaaaaccactcactggaaatgagagattaccttcctatccatctggcaagacattatatgtctctctgccttatcctatgggttatatagctactctttaaaaaacaaaaaaatcatgtcttagaaagtaaagctccagagcataaagaaaaaaagagagcaagcaggctttaaacctgagcagtaaggggaatacctattaagcaatgaaagggttgtgccccatggaatgctgtaggtcggctttgtttgtgcattattacccttcctgctttcgtattttagattctggattccccttctcttgctttcaggctttggtggaagtgaatcatcgtttctaagaaacggggactgcaatgattcacaggcaagcttactggacaccacaataggaactcctaagaaggagacctaacttttatggtcttgcttctactatctactagctgagtgatcctggccaaaatactcgacatctctgaacttctgtttctctactaagacaggaattaagaaagaggttgtgaggctcactgagccgataagggggaaaatgcattgtaagcaaggccatgtatagaatagtatttacattttaacccagatcttaaagcccaggtctaattaattctacctgttaccccttggtaaaccacctcaaaatagtgtacacttgtctggaaagccaaggtttgatcacattcgggaaaccctgtatggaattactgtttctagctgccaggagaagttggtgttggtagaatttggggtggagttccaagtcaaagctaggaatgagacgtttcaagactggttttgattagggatgtgtcttggtgtgtgttgaggacagcacagttttcagcacgtctcccttacctctaaagtcctagcccctgcttaagcctgcaacagttttctcctgtcatgcccacttctgcttgggaacacacttccaaaccctctgcccagcctctcacaatggccctaagtactgccctgaggacacataaggtgctggttaagacgttggaattgagtccttgtaggaaagttattacctttaggctggttgcaaagtttgatttggtgtcttctctactgtgactttcctttacttacttctactagattaccaaggaatgggtctagggaccagtgggagggcagcaaaccagtgtattctagacacgtggccataggatgtagggctgtcaagtgatgcccaaaagatcttgtttctggatttacccaaccgttccaggaggcaaaacggcttcctcgggaccctctctctgtcatctacactctcgtctctgcagctaagcccttccttaagcagaaaagagcagggtctctcgtccagcaccctcctccccaaccctagccccgtgccctccgctaacccaccgtgcaattatcttcattcatcctttacctttgccccgagggtctaacaactgcaatcttcggaatgctgggacaaagcttactatgagcatggaagcctgttttcaatagggtggttgctagaaggactcaactggccttttagtgctttgctgctcgcgggagggctcggcggggcggtgtccgcagcgactccgcccttggcccgggtctctttcccgccgggaagccccgcggcgcccagagcggcgggcggctggctccagtccgcatgctcagtagctgctgccggccgggctgcggggcggcgtcccgtgcgcgcctacgggctgcggtggcggccgccgcggcacccggcagggcccgccagtccccgcttccctgctccagagccgccgcctgggccggggcagggcgggcccggggctcctccatgctgccagccgcggggctgcggagc

SEQ ID NO: 9195 - DNA, 2300 bp, Homo sapien
agaaaatgttttatgtatgatatcaatttgtcaaaatctttgagactggtttttggtccaatatattgtcagtctttataaatgctccatagttggccaaaaacaattaacactggtgtttcaagctactaggcatagtgctccatatatgtctattatatgaagcttgctgattgtgccagttaaatcttccatatcattatttttactacttgatctatcagttactgttaaagatgtgttaaaaatcttccactattattgtagacttattacattctccttgtaaatattgttatatattttcaatctgtgttattaggtacaaattgctttaaactttttatatgcattttaatatgagaaatatagttacagattctcaaatttagactataggttattttggttcagttattctgatttttatattttgtaaaacatttaataaacctcacttgagacaaaaaggattttttaaaatcacacttagcaattcagagttaaaaatattgatatctcttgaccttgttaacccatttctgggatagtgtccaaaataaccagaagtagataaaaagctttatgtaccaaagtatgtatttgtactggcaaataaaataaaattaaatgtaggttctaacaataggagagtggttaaataactggacacagctacatgacagtgtattatacatccattagagtcatttataaagaatttgtaataaaactggaaagttattatgtcacaatgacacataaatctgatgacagtcggcccctcttacccatggcggatacattctgagactccccagtggatgcctgaaactgcggataataccaagctctacatttatgaatttttcctatacatacatacctatgataaaagtttaatttataaattcagcatagtaagagattaactacaataattaataataaggtagaacaattataacaatatgccagcatcattactcttgtgctttgaggccactattaagcaaaataagggttctttgaacaccagcactgtggtactgcaacagtggatctaataaccgaaccagctactaagtgactcgcgggcaggtgacatatgcagcgtggatatgctggacagagggatgactgtggtgtgagatttcatcctgctactcagaaccgtgtgcagttgataacttatgaatgatttatttctggaattttccatttaatattttcagaccaaagttgaccacgggtaactgaaaccacagaaggcaaaactgcagataagaggggactactgtatactgtatgatttcaattaccttaatgataactatagaaaaaaattctcagaagaaatatctcaaaaggattgtaacattggtttgtgtaacattgggaaaaaatttggatttcccccttcctttctatttttctgtgttttctgtgttttctaccatattcaaatttcttttacaatatagggggaaagccttaaaaacatggactaacaaatgcttatttaattaatacttgagtgtacacaattagtctttcattctgtgttatgttggttttggctggtatatatatttaaaatgtgtctatatatatataatgtgtgtatatatataatgtgtatatatagatataatgtgtgtgtgtgtgtgtatatatatatatatgtatacacattttttttgagagggagtctcgctctgttgcccaggctggagtacagtagcatgatctcagctcactgcaacctctgcctcccaggttcaaggaattctcctgcctcagccacccaagtagctgggattacagatgcccacattgtgcctggctaatttctgtactttaatagagatggggttttgctgtgttggccagactggtcttgatctcctgacctcaggtgatccacccgcctcagccttacaaagtgctgggattacaggcatgagccacagcgcctggccttagctggtattttttaaatatcaagatagaaaagtcatttaaaatgtgtgatatggatatgtacaaagtaaaagttaatgtttaaaataaatgtcttgttgtactctgctgcccataggtaaagtgttgagagaggagaaccagtgcattgctcctgtggtttccagccgcgtgagtccagggacaagaccaacagctatggggtctttcagctcacacatgacagagtttccacgaaaacgcaaaggaagtgattcagacccatcccagtaagtgaatttggtcctctaacccagtgagatctttgactttaggga

SEQ ID NO: 9196 - DNA, 2300 bp, Homo sapien
taagctgattattctgcttaaaggtcatttgtttactgcctcaccttgaaccacattataaaaggttcccttgtttacttttgtttagaactggagagaggattttaaaaatttaatcccaagggtcccagagcctggcttaaggagcttaagggtctgctggccccagtttaagttttgttcttctgacacaatgccgagaaaagcattgattccagttcaattctcaggtttgtttatttggttttgcttttatgcagttgggggaaaatagaaagaaaaatggcattaagttcaagtgtggccaccctttctatttcaacaagtagtattctactaaactcagtaaagacttgccgcttgggagaactaaggcggagggcactcttctttatcgtgcaattctgacctggcagacatagcattctgggtttacatctattatgtcactaatcctgacaacacctctgtagggtacttgataatattctcaatttaacaatgagtaacaacttctgggaggagggtgacttgttcaaggtcctacagctagtaagtggtaaatcaagaacttaagtccaaaattttctaaccggaaagctaatactttctctacttgtttctaaaaacatgtatttaattgataactatttttgagcatctgctatgtgtcaggtactgtgctggagtggagaatgcaagcatgcgtaaagatacagttcctgtccctgcggagcttgcaggccacttggctctggtcaggtgcaatgtgttaagtgctagggaaggttgcggtggcagcacataggagaggcactcggctgagtttctggggctcagacgcgtaagtccagagaaagtacatctacagaagcccgaaaacagtttctcaaattttactgtaaatgtgaatcattctaggatcttgttaaaatgtaggttctgattcaggaggtctggagtgaggcctaaagttctgctttttttttttttttttgagacagagtcttgctctgtctcccagcctgcgatcaccactcactgcagccttgacctcctcccaccttagcctcccgagtagttgggactacagatgcggatcaccatgcccagctaagtttttgtattttttatagagacaaggttttgctgtgttgccaggctggtctcaggctcctgggctgaagcgatcctcccaccttggcctcccaaggtgctgggattacaggtgtgagccaccgcacctggccgattctgcctttctaacaagctcccgaagaggctgttgcagctggtccatggatcaccctgttagtagtaaggctctgaagagcaagaaagggttagccaggtagagaggtgtgtcggtggtgacagcttccccagtaaagatgcagaatgggcaaagccttatggagaaaaggatcaagatcatcttcagggaactgtggtttccccagtaatcctggactgtggggcatgaggtggtgaggtagctcaagaaggggctggaggtgaaagtgaagtaaatggaaacccatcatacagggccccataagccttgttaaggggctgtgtctattactgagggcagtgagatgccattcactgttttaagctgatgagttcctttatcggatctgtgctttccaaaaagcacactgactacagtgtggaaactgcattagaacagtgttttcaatgctgtctccatgtcagaatcacgtggggaactttataaaatgccaatgctcagccaccgtccctaaccccgaccccagacaattcaagaggatctctaaggcagaagttcttaaagcatggtccctggaccagcatcagcaaaagcatcagggaacttgttagaaatgcaaattcccaggccccctcccagacttactgaatcaggaactccgggagtgggcccagcagcctgaggtttaagaagctccccaagggcctcaggtacagctaatgtttgagaaccactggattagagggagaaaagtggggagagagagaggatacttgaccaatcagaagcagagagatgatgatgtcacagaacccacattggctcttattaaactcgaggatcaacatcatcttgatagagtcccatagtgtctcaaagtggggaggttaggatgctggttagtcatggagtattttcagagtggaagttgatcagtgacgttttgtcagggattgatccaatttataaactaggtaagtttctgtgttattgactgaattgtttttccctccaaattcatatgttgaagacctacgccccaatg

SEQ ID NO: 9197 - DNA, 2300 bp, Homo sapien
gccaagaaccttgagtccttttctctgtccactgtaacacacagctaagtcttggcagaggacaaggactttaatttaattaggctttgagagaagggtgggacttaacccacagaggagtggggatttcggttaggctgaaaggtgagaacgaagcagggatctgtgagtagacctgtttgactacagagagggtttcctgggagcgaagtgggagataagctgggaaaggtaagaagcaggataagagagagttttaaatggctagataagaattgcagggaaagggggacctgatttagaggggaagatgttgatgacaaaaccaaacattttagaaaactcatcggtagtgagtggtacagagaaataattagaactgggggaaactggagtcagaaattcaagtcaggagtttggaatactgcaggtctgacaagcaacaagatggtaattatataaagtaggtctgtgagagcagtggcccaagcctgtggatttcttgtagcattctattgtttgaaaaagtataaattatggacactcaatacttgagatatagaaagaaaatcaatggctttggagtcaaatagacctcggtttcaatccaagttctagctgatttggagaaatttacttacataactttgctgagcctttgattccttacgttaaaatagggctagtaacactcaatttacaggatgattgagaagattaaacaagacacaatgctggattctgtgcatccctctacaatttttggcagatcggtaaatgtatggcatgtcatcaatcaaaaaacaatgaggcctggtgtggtggctcacgcctgtaatcccagcagtttgggaggccgaagagggtggatcacctgaggtcaggatttcgagaccagtctggccaatatggcggaaaccccgtctctactgaaaatacaaaaatcagccgggtgtggtggtgggcgcctgtagtctcagctactcggaggctgaggcagtagaatcacttgaacccaggagaaggaggttgcagtgagccagatcatgccactgcactccagcctgggtggcagagtgacctgtttaaaaaaagaagaaaaaaaagagaaagttattaattcactatatttttagaagatggtgggttatatgctacctatatctcatacaaataaagctgcttttcaccattcaggtctgcctgtaagcagcatctgccttgaaagaaccattttctgagaatctttttcttctgtcagccaaggggattataccgcatgatatctgtcaaggataaacgttagttaattcttaattgagagctcagccactacaattggttccattctacagtaattattctcatgtggtttgtggaactcaattgtgaggtccctccttcctccacccttttcagtgtgtgcattgaaacagcagccttaaggtctttaaacggggaaatacatttttcttgcttcagagattcaattttacttgcccgagaagcttgtgtggtgtgattttcatcgctaaaagcaacagcagccacatggctgacaacaccaccacttaacaattcaaagctcggtcaccgttttcaggagtctcttccaaatctttctgaagtgcttttgaagttctacattccccgtctaagggaacacccagcagtcccaggataaaagggcagaagggtgagctgacgttttcctttatttgcatggcttaaagctagccattttctacaccacgcgccgccgggcttgtacatgcccgtgtgcctgtgacaccgaggcaattgtttctccttaaaaagggggttcgcgtgggttagtttcgtttctgatctggaatctcagtaactacaacaagaaaagtttaaaactcgacccgccaggttcttccccatcggattatctccgttccttagagatagcaggaagggcagcattttcttccatccacccacttccagccctagtctggctcagcgaggaatgcataaaattagtggactcctctgagtgacgttccccggctccaatcagcgggcgcgcaggcgcccccggccccgccccactgctgactctctttggctgattcctgcagggagggaggagagaagggcggcagtgggagggggaggtacctggaactgggagtgatgtcagctcccagctcggtgcctgcccggattcctgacatggtgtagtgcaggcagggtggggaaaggacggggaaggactcgtgtgctgcgagctggcggccgggccggagtgctggggctttgaactccga

SEQ ID NO: 9198 - DNA, 2300 bp, Homo sapien
caatttccagacctctggtgtcagcacgatctccacaccccaacactgggaacattccaatttggcaacattcctcttaaagtgtatggagtcaagcacaagactccagatgtaggatctccgacaacgtgcacaaaggaaccattatctccagaaactggacactaacttgcattaaatttgctaaacacggttagatgaactttccattcacagcaatatcacagatttggcttctgctgaactacaaacctccagggagtttttaccaaaccaagtcatgtcagttttcagttgattttttttcaagtatattcacagcgtgacatacagctttgttatttaaagcattatcaacttcactttaccattgtcatcgtttgtacggattattttctggattctgactgtcatcagctgtctctcccagcctggtttcaaccgcaactcccaatcactgataaaaatactgaataagaaccctgtagtgagcacttctaaattccaaatcatttcctcctagtgtatatctttttaccaaagaaacacaaattttcagaaagcaattgttttaaatggagggaacagcttcactaggctgagaaatctggcggatggcaacatttaagttaggaataattgggatgttgggatgagtgtaactgctacagttttcttgattacaccaggctgtgcattatccccagggcttaacaggaatcttaacgggattgtgagctaatgtctagaagttgccagttttaagccatttaccgtaatatacatctaagcactcagtgttaaccagatgggtgctgtcaagcagcccttggtatcaaattaaacttagatgaaacactggcattccaaaagatgcctttttctgccctgctcaattctgtgagacagcaggtttacccaaggcacttagcaagagttgcttataaactgcttctttaatcagttttttaagtaacacgtataattcagaaagcatctatttactcaattggaagataaagaggagggaagaaaagtaggaatacttaaggaaccatttgatcgttggctgcagccagcttaactccatctgcctgttctaatagaggatcacccaaaaatgttctaagtatgaagaattacaagagcattgaattagggccacatgaatggtatgaatggtgccccctgcagttgtgaatgctgagtccccgaatatcgatgagcttccttgggggtcttttccttatcactggagataaactttgtagacaagaattgcttcctatttaattcataggtcatcattcataagaaaccaattactcctacagggtcagccacataacttcaaagctattgaaggagaactcatccagcaccagggactttcccaacacatgtcatggtgtgtatcagtcccatccacagagaaagcttcactgggcactcttggctcctgcggggcaggggcaacctatcggtaagacagaaagggctgcagaagaaccaacacagcagagcacaaaacagcattcatccagagtgtgggtgagcaccatccccggcccagctggactgagtggtgacagtggtggcattgttgagggcctggggagagatcagacttgtagtttcactctcttcatgtcatcgtaagcttgagttcgtctttattttcagtcaccctctatccccagcctgggcagtatatggggtcatctggcaatgagttaagttcagttatcaaatgagttatgtagcaaagattctttttctggccaaactttagtcaggctcataaatcttctcctaggcctctgcgtgcacttccttgtaaaatccaagtttagcaaagaaccctgctaagtcagtttagcaagaacctcccactctcggtatctgatcagtctcctcatcctccaccatcccccaggtgtccgatcaccctggcctatcttcagcaagaatcctgttaggttaatttagccagaatcccccttaccccaacattcctcttagtatttttccatccactgactcccaccctgctccttggctataaatgcccacttgtccatgcaatattcagaatcgaacgcaatctctctcccccactgcaaagccctgtagcaatgatcctttgttccatgctttaacaagtatcattgaataatgttttctttaacttaagttcagagttatcaaatgagttatgttccgagttgtcagatggtcttgaaccagagaaaaagagaagagctttttctccctgagaaacatcgatttggaatcacaac

SEQ ID NO: 9199 - DNA, 2300 bp, Homo sapien
tttgcccaaaatcataaagaaccagagcctggattcaaacctcacctccatctgattaaaaaggccatgattttgatcttaaaaatagtccgaggagaggagagaactccattggaatatgggggcagaaggtgatgtgatgtgatgtgtctaccagccaaggagtgccagcaaccattagaagctaggagggaggcatggaacagattctccctcagaacctccagaaggaaccaaccctgccgacacctggattttggactttccagactccaggattgtgagagaggaaatttctgttgttttaagtcacccagtttacggtactttgttccaatcccctaggaaactcatacatcatgcttctattttggaacaataacaggatggtaaaagtccagaaaagatgaagatgatgaatattacaaatacttgtccatctcatgctatttgtccccctcccataccttactgattgatgtccatggcgcactgaatgttcacagctagaatattcttggacacctgcatacctctgctctactggttgtatgcttaccaagaatcggttttgtttatttttagttgtttttactgttataattttgtcactttgagacaaaatagggaaataggccagacccatgcctgtaatcccgacattttgggaggccaaggcaggaggatcacatgaagccaagagtttgggaccagcctggacaacatagcaagacccccaactctacaaaaaacttaaaaatagaaaaaataggccaggtgcagtagctcacgcctgtagtcctatcacttttttgggaggccaaggcaggaggatcgcttgaacccaagagtttgagaccagccctggcaacactgtgagacctcatctctggaaaaacaattttttttttaattagctgggtgtggtggtgcgtgcctgtagcctcagctacttgaaaggctgaggtaggaggatcacttgagcctgggaggtcaaggctgcagtgggccatggtcctgctaccacattccagcctagcaacagagcaagactctgtctcaaaaataataataattaattaattaattaaaataatttttaaaataaagagaaaatagagaatttattttattttattttatttttgaggcggagttttgcttttattgcccaggctggagtgcaatggcgcgatctcggctcatcgcaacctctgcctcccgggttcatgcgattcttctctcgagtagctgggattacaggcatgtgccaccacacccggctaattttgtatttttagtagagaccaggtttctccatgttggtcaggctggtcccaaactcctgacctcaggtgatccacccgcctcgggatcccaaagtgctgggattacaggcgcgagccaccgcgtccggccgagaattgttttattaaggcttgtatgttaattcatcctaccgtagaaaatttaagagtgttcattaaaagtttattttctaggtcctgatgagttctgactttctgtaattctaagctgatctaacaacaagctaaccatatatagctaaaagttataggctacgtacacgcggtgttcactgtatgccaacgctgtacacaaatatttgtctatgctaacttgtctgagatcatacatcccagaagtggtgaagtcaagtttgaaacccaagcactctggctcgggatactgcttctctccccttagcgcatattactggcattagttgaagacttctttaatccaagtaaatgtagaaaagcaacaattataaataacaagagtccctcgggtagaccgcctgactctcggatcaactgaggttccacccagagcacgcccgccttcagtgagccgcaacccctatccctacggtctttatctgcaattctctacgaactgattcactcgatttttaaggattttttttgttttcttttcattacttctttcagtttgggggaatcttcctgcacatttgactcggctctgagtgcgcagaccaacgtgtttcctctttctccagcctagggcggtgccagcccagggagcctgcgcttagcggccccaggcccgcccctgacactgaacgccgcttgtcccctccggcttgccgtcctcgcagccatggcggccgccgcgctcccagcatggctgtctctgcagtcgagggcaaggactctgcgtgcattctccactgccgtctactcggccactccggtcccgacacctagcctgcgtgagtgtctgtctcgtcttctctgggctttgggggaggt

SEQ ID NO: 9200 - DNA, 2300 bp, Homo sapien
tgatcacgcaaagaagaaattaattaaacttgtaggagagcgatactgcaagaccacagatgtgcttaccatcaaaacagataggtaatggaaaaaatgttcagccgactggtcacgtgtgtttcctcattgtcctccaattccttggcagtcctttttaaagaaactatattgaagatgggggagggcgtagccttttcttattaagcagagttctctaattcatatttttaatatcctcacactggcctactattgctgtgatctttatgcagcggcatgcttagctaatttaatgttatttttaaccttgattttaatatttccatgtatataaaactcaagagagagattagaagaaaaaagtgtggtttgctagtgattaatgcttaagcaggcttttacacattcaaagcatataaaaatcttgtagttcaaaagtaaaattattaaatgatctatggatctatttggaaattgatgaaggcacattcgtaaataatcaaaatctcagagccaggacagatgtttataaaggcaatattaaatttatcatatatgaatttataaattgcgtcattttttatttgaagtaaagaaaggttattggtatgttttcactaaatggctattttatttttagaattatactttagctgtttccaaattatgtcaaaatataaaaagacccacttttagagataagttaagtgggccgatctgctgtcttcctgctcatccctgtttgaaagcatttggaggtgtcagtatcgattaggtctcatgatttgcagtggtgggaagaaggagcctgacacacatgcagagattgcaacagtgtggaggcagaaaaagctcaggaccatggtttgtgattattaccatatgggagaaagtagatttgaaatatattaggaatagtctttttactatcttcagataatgttggcttttctagttcatgcaactttaaaaaatgcctttaaaatgttattgtttgaaattctgtgagtatccaataatgttgctttttttttttttaggtagttttacaagtgttagtgtatggatatgttttatggtaactatttagagtagaggacttaaataaatataagtacagaataagcagtatagttgaagttatttgtcatatgatggttttatttgatatttaaagaaattggaagtaatcgtatctttctgtatattattttattatccttaaagctcaatgtgtcatctcatgtatgtagaagttttacctaattttaagttattagttccattttaaatacagcagcaacagcacagcattgtatagtgtaactcatttttaaaagaatcagctctaggaaaaccaagattaacatctatcatctttctatatctacttcttatttttatttttaaatttttttagagattgagtctcactctgtcacccaggctggaggtcagtggcacagtcatagctcactgaagccttgaactcctgggcttatgcagtctcctgcctcagtttcccaagtagctaggactacaggtgcgcatcaccatgcctggctaattttttaatttttgtagaaacagggtttttgctgtgttgaccaggctggcctcaaacttctagcctcaagcaaccctcccacctcaccctccgggattacaggcatgaggtacatgcctagctctatgtctactttttagatgaactcatcagatatgttcatgctatctggcagattcttagcactgagatggtgaagggaacttatattggacacaatcctagtaaaagtagcgtaagctattgttacatacagataactccattagtaatgaaaacaaagagatactcgaaattaagttaaaataacaccggtgtttagcttcctcaagtaatgaactacaaagactatttttattccaaaaacagttttcctaaagcagaaaaggaatacctgaaaacattatcttctgtatttagtatattgcatattttgcaaatttttctgtgtactgagtttttagaattttgacttctcccgctttctctttaataggtgccctttaaggaggcagaattacgattatgcagtgtatctactaacagtgttataccatgagtcttgggtaagtgtgtgtgaatatttaatgattttgtcattgtaatttagatgatgttaacctttcaaaatactctttgtggcaagtactcaactgagtattttgtgaactgctgaataatctaagtatgtatgaaatgtcataggtagcttctactgactttaaaagta

SEQ ID NO: 9201 - DNA, 2300 bp, Homo sapien
ccagggaggccagaatctactagaacattttctatgtcttttattttttagttccttattcctagcattattataaagaaaataggccaggcacagtagtgctttgagagaccaaggcagcaggatcacttggggtggcaggatcccttggggccaggagtttgaggtctgtcttgggcaaggtagcaagaccctatctctatggaaaaaaaaaatgcatttttttttgctgggcatggaggctcatgcctgtaatcccagcactttgggaggccgaggtgggtggatcacgtgaggtcgggagttccagaccagcctgaccaacatggtgaaaccccgtctctactaaaaatacaaaattagccgggtgtggtggctcatgcctggaatcccagctactccggaggctgaggcaggagaatcacttgaacccgggaggtggaggttgcagaaagctgagatcgcagcattgcactccagcctgggcaacaagagggaaactctgtctcaaaaaaaaaaaaaaatgcatttttttttctaaaaaataaaaagataaacctcctttcccaagtaataataataaacaaagtaaaagatgacaacaacacctctctgtgaagcagataaatttcgtagtaagaaccacaaatgtaaccaaactatgttgaaaggatctcatgtttcacctttgactttcttttagttctctggtttttaaccctttctccttcctaaggtaaaatgttagcatggtaggatgtatcttctttaaataggggaaatgtacttatgaagaagatattatttaacaatctgtcattcaagaagaaagctgaagcttgtaataataaaaaaaaaaaccaaacacatattctctccaagttaaggactgtttatcataggtggttctcaaatcttggtttggggtaagttttcaaggttttctgtttttgttttgtaagataagagtgaacacaccctctgcttcctcccaatccttctcccttctcctacccaaagataatccaaacaatatatttctccccccacccccttcctgggatgaattcattagcaagacaaaaagtccttcctattattatttggggtgggccttctaattgcaatgttcagtgagagaacataggaaacaagtggtctctcttttccgagacggcgtctcgctctgtcgcccaggctggagtgcagtggcgcgatctcggctcactgcaacctccgcctcccgggttccagcaattctcctgcctcagcctcccgagtagctgggatcacaggcgcgtgccaccacgcccggctaatttttgtatttttagtagagacggggtttcaccatgttggccatggtgctctcgaactcctgacctcgtgatctgcccacctgggcttcccaaagtcatgggattacaggcgtgagccaccgcgctcagccaaaccgcacgtgtggtctctcttaatagtcctcagatgatgggggcagggtaggtggagaaagggggtgacaagaaaagctacttcttgcagacatttatgagccaattttgtcagatcttttgcgccaggataacattccgtaatggactggactgaagtagaaaagcaatggctcatagaaaacatggtttaaaaccagaagccacgtgatgtaactttatttagtcgggctgcgctttcatctttcttttaataacttagggagaataaggggccccagtggcaaatgcaagctcccctgcctcccaacccgattcctctgagaacctgctgccatctgcctggacctcctgtaagatggctcctacgcgaccacgctaccagagaatcagctctacgtgccaccaacattgccaccaactgtccatagatcgcctgcgtgcctcagcccactgacactcgatgccggactgggccagaaggacgaccccatatttgatgcctttttgtctccctggaccagagactccatccttccctttcctcccacgctcatttctttttctttagcccgtgtaaagcagcgtgggagagaaaacgaatttcttctccctggggtaccccggagcatcactgcagcccccaacaagcggcggagccggcgcgccccgggcgggcggagaggctgcggggacgcgcgccctccgcctcccgcagctgcgcgtccgcagccgaggcgcccgggcccgcagcttcccgggcctccccgagagccggatccagccggcaggtcaggccggcggctggggtcccgcgggcggaagtgagaagggcggcgggggaggagg

SEQ ID NO: 9202 - DNA, 2300 bp, Homo sapien
taaaccgggaaggaagtatagaaatcactgtctctgaccccttccttttatacagttgaagcccatgaggcccaagaatgttcatgttcccaccaaggtcacaacctagtgagtggtagaactgggaccatgagctggagccttccaactgccagctctttccttcccactggttacccttccctgcgcaatgagcttgctacccatccagcttgtgtcttacggtggaccaactagaaaactaaagagatttactcatgtctttgttgtctctatcagcaactaaaatttaactgttttcttcccctctaatattttctttcaaagcaaaagagctgtgtctgaacatcagctcctccatgacaaggggaagtccatccaagatttacggcgacgattcttccttcaccatctgatcgcagaaatccacacagctgaaatcagagctacctcggaggtgtcccctaactccaagccctctcccaacacaaagaaccaccccgtccgatttgggtctgatgatgagggcagatacctaactcaggaaactaacaaggtggagacgtacaaagagcagccgctcaagacacctgggaagaaaaagaaaggcaagcccgggaaacgcaaggagcaggaaaagaaaaaacggcgaactcgctctgcctggttagactctggagtgactgggagtgggctagaaggggaccacctgtctgacacctccacaacgtcgctggagctcgattcacggtaacaggcttctctggcccgtagcctcagcggggtgctctcagctgggttttggagcctcccttctgccttggcttggacaaacctagaattttctccctttatgtatctctatcgattgtgtagcaattgacagagaataactcagaatattgtctgccttaaagcagtacccccctaccacacacacccctgtcctccagcaccatagagaggcgctagagcccattcctctttctccaccgtcacccaacatcaatcctttaccactctaccaaataatttcatattcaagcttcagaagctagtgaccatcttcataatttgctggagaagtgtgtttcttccccttactctcacacctgggcaaactttcttcagtgtttttcatttcttacgttctttcacttcaagggagaatatagaagcatttgatattatctacaaacactgcagaacagcatcatgtcataaacgattctgagccattcacactttttatttaattaaatgtatttaattaaatctcaaatttattttaatgtaaagaacttaaattatgttttaaacacatgccttaaatttgtttaattaaatttaactctggtttctaccagctcatacaaaataaatggtttctgaaaatgtttaagtattaacttacaaggatataggtttttctcatgtatctttttgttcattggcaagatgaaataatttttctagggtaatgccgtaggaaaaataaaacttcacatttatgtggcttgtttatccttagctcacagattgaggtaataatgacactcctagactttgggatcaaataacttagggccaagtcttgggtctgaatttatttaagttcacaacctagggcaagttactctgcctttctaagactcacttacatcttctgtgaaatataattgtaccaacctcatagagtttggtgtcaactaaatgagattatatgtggactaaatatctgtcatatagtaaacactcaataaattgcaacatattattttggtgtttttggaactagttctgattgtaccatctacctatctataatctatttctatctatctatctatctatctatctatctaggggggtatgtttctatgaggcaaaaagtggggcaaatattaatcccattttataaaatagaaagccaaggcattccacggctaaaagacctgagtagtccttggaattgaaataggtggccccaaagctggatttatctccctgttttctgacacgtagacagtgctatgtttgccctgcttctttatcgatgcatttccattgaaatgatttttttttcttttcacttttcagtacagcacttctgtggggtttgaaaaaaaaaaaggaaaacaacagaagaacacatcatatgcaactaatgatctcattatttaagagtcccctgttacttctttagtcatttcctttgactctgctacagataggattataggatgatgcttcaaaggggaccttgaacctattcaccattatttgtctctttaagctgg

SEQ ID NO: 9203 - DNA, 2300 bp, Homo sapien
ttgtgattgactttttttttttttttttttttttttttacagatttcccccttcagatctaacgattacattagggctcctgcatctttttggaaggattctttttataaatcagaaagtgttcgaggttcaaaggttgacatttctgagtgctgatactttgtcctttcatactatccaaacaagtctaacatttagaaatccttacacattcaagggaagttgtggaaattcccagagagagagtgtgtgtgtgtgcgtgtgtgtgttttggttttgttttgctttttttctttgttagtgagaagaagccgagtcttttaaggtacggggtttacagtaatgaactgaggaaggcaggagcttctaagaaaatatgcccccccacccaacctaagcagtaaactttaactgctagctagctgcagtgaaccagtgggagccccgatgagcgagggtctcggtgacagcgtgctatttctcccaccctgggtaaaatatgtggagcatcacccggaaagtcgggcttgataaaggccacattccttgaatcatctcaagaatctaaatcacactagccttctagaaactaatgaaccctaccagcaggattgcctagaagacaaatatcccttgaatggttcccagtccactcgcgctcttttcaaaaagttagaggagccctggggagggtatccactcccgctgcaatcctttcctagatgatactacccagtaattccgagcagtctttcttccccgcccattagctttggaaagaacctcggctttcccgtcgcttctcccaggcagagcagcacataaccatagttccactgcatctgtccgctggctgcagcgactcggatacagtcttccaagaatctgtaacctgggacttttgagggggaggggacaagcaggtagggtatcagagaaaggatgggttagactcccgaccatgagtgaaaagggccgtgtgcgtgctccaggagtgtcggtccccctctgcaattcaaaagggggatctctcctgtgcgcgggttttttgggaccggctccagatgtctcccagcagttctgaaacagcaaaaagtgcaatttagatatgaaatctggaactgtttttgttcttctaagcaaaagatctccctctctctagccgatgctccccactcagttcatcccgggaatgggccagggaggaaggttctcatgcatcgccccgagctgccaggcgagcttcgggctccttaaattcacaggccaacagcccgcgtcctctccgcgcaggctcccggttgcccgcggtccccggcccagctccttggcctcctcctcgtcggtccgcccctggtggtcttggcgcccgctcgtccagctcggcgcgccggggaccgccggctgcccggggcagtccgcacgccctcggggatctcggctcccggatccgccgcgccggcaggagccggccgggcctggagggagcaagcggatgcgcccacgcccccggcacggggatggcgcgacagggcccgggctccggggtggggctcggcagagctcctgacagctccggggtcggcagcgcgggaggggggagctccgccgctcgccgctcattcccggctcggggctcccctccactcgctcgggcggcgcggggcccgttcgggccgcccgtcgccgcccccgccccccgcgcgcccgcccgccagcccgcctgcgccctcgctcgccccgcgcgcgttcctagggcgccacctctttgcgactagctcacttctccggcaggtttgcctcggagcgtgtgaacattcctccgctcggttttcaactcgcctccaacctgcgccgcccggccagcatgtctccccgcccgtgaagcggggctgccgcctccctgccgctccggctgccactaacgacccgccctcgccgccacctggccctcctgatcgacgacacacgcacttgaaacttgttctcagggtgtgtggaatcaactttccggaagcaaccagcccaccagaggaggtagacagacagctatgtatatatatgtgggtttcgctacaagtggctctggaacgaaagggcctggttcgcaaagaagctgacttcagagggggaaactttcttcttttaggaggcggttagccctgttccacgaacccaggagaactgctggccagattaattagacattgctatgggagacgtgtaaacacactacttatcattgatgcatatataaaaccattttattttcgctattatttcagaggaagcgcctctga

SEQ ID NO: 9204 - DNA, 2300 bp, Homo sapien
taaagcctggatagtttgaaacttggctaggtaccttggactttttattgtggaagcaaatattatcatttcaatgttaaacaacttgcaagtattaaatggctcatttgtgattgactttttttttttttttttttttttttttacagatttcccccttcagatctaacgattacattagggctcctgcatctttttggaaggattctttttataaatcagaaagtgttcgaggttcaaaggttgacatttctgagtgctgatactttgtcctttcatactatccaaacaagtctaacatttagaaatccttacacattcaagggaagttgtggaaattcccagagagagagtgtgtgtgtgtgcgtgtgtgtgttttggttttgttttgctttttttctttgttagtgagaagaagccgagtcttttaaggtacggggtttacagtaatgaactgaggaaggcaggagcttctaagaaaatatgcccccccacccaacctaagcagtaaactttaactgctagctagctgcagtgaaccagtgggagccccgatgagcgagggtctcggtgacagcgtgctatttctcccaccctgggtaaaatatgtggagcatcacccggaaagtcgggcttgataaaggccacattccttgaatcatctcaagaatctaaatcacactagccttctagaaactaatgaaccctaccagcaggattgcctagaagacaaatatcccttgaatggttcccagtccactcgcgctcttttcaaaaagttagaggagccctggggagggtatccactcccgctgcaatcctttcctagatgatactacccagtaattccgagcagtctttcttccccgcccattagctttggaaagaacctcggctttcccgtcgcttctcccaggcagagcagcacataaccatagttccactgcatctgtccgctggctgcagcgactcggatacagtcttccaagaatctgtaacctgggacttttgagggggaggggacaagcaggtagggtatcagagaaaggatgggttagactcccgaccatgagtgaaaagggccgtgtgcgtgctccaggagtgtcggtccccctctgcaattcaaaagggggatctctcctgtgcgcgggttttttgggaccggctccagatgtctcccagcagttctgaaacagcaaaaagtgcaatttagatatgaaatctggaactgtttttgttcttctaagcaaaagatctccctctctctagccgatgctccccactcagttcatcccgggaatgggccagggaggaaggttctcatgcatcgccccgagctgccaggcgagcttcgggctccttaaattcacaggccaacagcccgcgtcctctccgcgcaggctcccggttgcccgcggtccccggcccagctccttggcctcctcctcgtcggtccgcccctggtggtcttggcgcccgctcgtccagctcggcgcgccggggaccgccggctgcccggggcagtccgcacgccctcggggatctcggctcccggatccgccgcgccggcaggagccggccgggcctggagggagcaagcggatgcgcccacgcccccggcacggggatggcgcgacagggcccgggctccggggtggggctcggcagagctcctgacagctccggggtcggcagcgcgggaggggggagctccgccgctcgccgctcattcccggctcggggctcccctccactcgctcgggcggcgcggggcccgttcgggccgcccgtcgccgcccccgccccccgcgcgcccgcccgccagcccgcctgcgccctcgctcgccccgcgcgcgttcctagggcgccacctctttgcgactagctcacttctccggcaggtttgcctcggagcgtgtgaacattcctccgctcggttttcaactcgcctccaacctgcgccgcccggccagcatgtctccccgcccgtgaagcggggctgccgcctccctgccgctccggctgccactaacgacccgccctcgccgccacctggccctcctgatcgacgacacacgcacttgaaacttgttctcagggtgtgtggaatcaactttccggaagcaaccagcccaccagaggaggtagacagacagctatgtatatatatgtgggtttcgctacaagtggctctggaacgaaagggcctggttcgcaaagaagctgacttcagagggggaaactttcttcttttaggaggcggttagccctgttccacgaacccaggagaactgctggcc

SEQ ID NO: 9205 - DNA, 2300 bp, Homo sapien
tgaagaagactcttcagatatgtttcaattgtcaggagtttgcgaggtgctcaagtgcttgacctttaagaaccggttctcagagacccccatttcctaaagaccttctcatctcacattggtttgggttcctcccaggaaaccgcctcctctctgggcctcctgcttcagtttgggggaagcagaacattgcccaggaagtagggaagggtgaggaagggtgtgaggcccacttttcccatgggaggatcccatcagcttgatgcatatctatacactcctccctgaggcagttcctccagaggttagcagcccgccctgttcctggagaagtcttatcctcacctaactacaaaaagatttaataaagaaacacaccctttcctattgttacttggggtttgaaggcattacatctttttttcttttttgctaccttgaggtcagctggcaacagcctcctctcaagtctcagtccaggcgagcgatgagagccacattctaatggaatccaatgagagcattacttgagctgattatgcaacgtctctttgtaaacattgaaaaaagtttggagaagagatgggatgagtttagttgtttggttccaggggattttagagacatagcttgcagctacagattggtaaatgtgaaatctggatgcttattggtaataagagaattcccaagcccaggtgcactgtttaaagtgctatagattcatatttggtttataatgtatatctgtttgctgtttgggttaaggaggaaagaagaaagaaggatgaagaggctaagcataaatgctatttacttttttctaagctatgacaggagatatacattaactgggtattcaactgaatttaagagtaatgcatttaaaattttttcaacctcttttaaaatttgatatactgtaataaactgccactggggatgggaagatggaagcctggtgctcatgggctaggcatttgtgtaggtgtagatcttataatgctaaacatggaaatacttcagattagaggcaggccttcccatttgctaaggtgcatttacatgacagcaaggcctaagcaaacatttagcttctattggcacttgttctatttctaaaccttagaaaaaaggtgtgtgtgtgggctggggggacgggggggggagggaggtggtagggggtgctcttgctgtgtctcatttgcagtcatgcatcctctgcattattatgatggagattactcagttatgttaggaactagattatgatgtcagaaaatatcctttccaaaacaggcaaaaagtcagggtcctgggtatatattgaggagaatttctacggaaagtaataaacagggcagcttggaagaggtacctgctttctaataattgcctttagtgggaacagaagtctcctttcaagaagcttttaattcattttaagatttaattttatgttttctgaagaacaacaaaaaatatttctggaaaagactgctgagaagatttccctctttcagccagaagagcagagagaagattgtaaatcaaggaaaaggtgaagtaataaattaggagggaactttggtattccgagtatataaagactatttatttttcctgtgtctatattttctctttttgtggaggagaggaaattctaaaaatatttgatagatgttttgccattaacaccagaaaagtgtgtggggaaaaagaaaggagggaaggagtggggggttaattttgtttaattagtagaaaaagcaacataaatcaaagcagtctattgatgccagtccttaatttataatgttctgaaagtaaagtgaatttatttacaacataagtgatttgataatttcaatctgatttttgttttaaccttctattgggagaagggttgactttttaaagcctggatagtttgaaacttggctaggtaccttggactttttattgtggaagcaaatattatcatttcaatgttaaacaacttgcaagtattaaatggctcatttgtgattgactttttttttttttttttttttttttttacagatttcccccttcagatctaacgattacattagggctcctgcatctttttggaaggattctttttataaatcagaaagtgttcgaggttcaaaggttgacatttctgagtgctgatactttgtcctttcatactatccaaacaagtctaacatttagaaatccttacacattcaagggaagttgtggaaattcccagagagagagtgtgtgtgtgtgcgtgtgtgtgttttggtttt

SEQ ID NO: 9206 - DNA, 2300 bp, Homo sapien
gctgaggaaaataagcatgctggaatgaaaatacaaataaggctggaagactgagaggaatatgttccatgggaaggcccaaaggatacacagtttaccaaggctgtaatgaatgagctggtgaaagaagcactagcaacactaacaagcagagtagtgatgctcctctttaggccagaggtcactgtaggagaggccattacagaacctgactcattggtaacaaagaagttgatagaaccctggaaaaacagaggccagttgtggcatttaactgccagaagccagggattttaaataattgtaagcatcaacaaggtcagaatggcagcccagaaagaaccacagaattatggaacatattaatagaatttgacaatgctagagacaaaataaattggtagtgacaatggaatcactcagcatgtactgttagaagaaatcaagcatgaataacagagtgatactttattgtgtcataatcccttgcccagtttatgggcctgagtcaattttcagacctgtatctcattcattgacgtgtttaggcctcctggggatggaccttgtgatgccatggcaagtacacctggtaatgattcccttagtccttcttcaaagggaccaaaggccatttacttggtgatacggtttggctctctgtccctcccaaatcttatcagaaattataatccctacatgttgaggaaggaacctgtaatccccacgtgttgagggagggaggtgggatcatggggacagttttctccctgctgttctcatgagatctgatggttttataaggcagttttccctgctcttgctcattctctctcctgcctcctgtcaagaatgtgcctgcttcccttctgccataactgtaagtttcctgagatctctccagctgtgcacaactgtgagtctattaaacctctttcctttataaattacccagtctcagggaagttctttatagcagcatgaaaatggactaatacacttgggtaatgtgaaccagctggacatttagttgacactgatactaggagaaccaacacattagggccttaatttatagttggagcatgtgaaggccagttttaaaaatggaattctgtccagattcagcttatattgggcccactggttgcaacaaggaccacctgacttataaagcttaaaatattaactatctgttcctgtacataaaaagtttgctaaccccagatctaaaggatgcagaatggtcatacccatccactggattcactcgtcttgcttctgcaaaaataggatggatcctgaagaatgactatagacttcctcaagctcaaccaagtagtagtagccctcctgacagttattatgccagatgtggtatctttattagagtgaatcaacatggccttaggtacatggcatgtggtcttcagtttggtgaatgcattcttttccatcccacttagattacaggatcaaatatcattcaatatgcattcacatggaaagaataaatatacattaacaaggcagtagcagccgtgaagtagaggaaggagagcgaaagcatttaaggaactgcatctgaaaagaaccagtggctattccacactatatatcatcccactcctctttgtaataaaatccccgaattttagcaggccacaaagctgcccagacaaagagggcagtttgaaacttaccctgtagctcggtatggctatgtggccaagttctagccagtgagatgtgagagtaaaatgtttgccttctgtgccctgctctgctaaagaagaggtatgcccttcacttccccttttcccttttcctgctagttagaatgcggacataatggcagaaattggagcacttatattagaccgtggaaaggacgccatatgttgaaaatgggagaacaacaagatgtaaggaggtcaagtagcgtctccttacgtggagccactgtatcagccctgcattgcctaggcttatgcttttatgtgagataacaattagaacttatcttgtttaagtcacaattattttggagtctttgttaaaggagctgaaactaatgttctaactaatgcaagtgcttacaaaagcaactgagcaaggaggttggataggttgtgtggaggacagatgataactttgttttggaacacgtaagttctaatttcttgtgggacgtctatgtacatatctagtaggcagctataaaatctagtcttaactgaaatctattcttagctattcttagataattctggaccgaataattaaaaaaaacaccaaac

SEQ ID NO: 9207 - DNA, 2300 bp, Homo sapien
agaattatatgttaagtaacttgggacataatttgtttttttaaacgtattaatatttctttgaaaataaaaggaagagtatcatctgcttttttttttttttttttgatggagtttcactcttgttgcctgggctggagtgcaatggtgcgatctcggctcactgcaacctccacctctcaggttcaagcgattcttctacctcagccccacaagtagctgggattacagtcgtgtgccaccacacctggctaattttttgtatttttagtagaggcagggtttcaccatgttgaccaggctggtcttgaactgctgctgacctcaggtgatccgcctacctcagccttccaaagtgctgggattacaggcgtgagccaccgaatatgtaaaagttgctggagtctggaaaacatcagtggtcactagtatgttcttttgcagagctaaatcagaacttaggaaactgactgtatttggttcattaccacagtcaaacaagctgaaatgattgttagatgtgggtatttgtttttattttcaaattttctgtcaccttacaaatagtttattgggaagtgacttaagaaaacacacagaagcattactctaaaaattccattcttttgaaaccatattatttgagtacagcatatgtagatgctaaaaattttttgtttcttcagattcatgggatacatgtggaagagataaagttggtgtttatagtttgacttggttaattcttgatgttcatatcactcttctttcataatttcttcatgaaaaatgtagccacatacagatttctgttcacttgcaacacagaataatgtgagttccatttcaaactaaacatcatcaaaagtttctgaaagtctggtttatattttttaggtgctatacgtggatgacctgcttagttttaatttttggagaaatacattttataaaacattttcatcagattgctaaaattgtgagtaatggtaatgataccatgattatattctggttaatttaatacctttcctttttacaatatgtttctgtctaaatatatattttttagtgtcattacctactgagtttctgtgaaaagaatttcctttgcctgttaaaacaatcgttgaaattaatgtttttactgtttttttctttgacaattttttgaattttctttttgaaggtgttagcactagtttccagaaggtaaagcacagatatagatgactacttaaagcaaatgaccttagaaaatgcccttaagattaatgtttaacatatagtttaatatgtatagctatttttattttagaagtgggaaaggattgttttcctgtaatgaagtccatcttgtattactgagtcaaggaaactataatcaacatttgggtatgttcacttaaagttttctttttaatttaaaacattgctttttaaattaacttttaggttaaggggtacatgtgcaggtttattacaaagacaaactcctgtcatgggggtttgttgtacagattattttgtcatatggtcacttctgaatgatagaaaaataaaccaattattactgactagagtattacttgcagctatagattcacaattacaggttccaaattgtaaattaagaaacaatctatatgagaacttatttttcattttaatgtatacttcctcttactaatttcaccttttcaggttatttagttcttgcatggtttgtttgataaagctgctgctcctttttttttttttaaagccctgatactaatggttttatcttttcatttttatgatatacatttaggactaaaaaagcaaataatatttgagtgcttgtctctcttacatactttaagagtaaagaaaagaggaattctggatatttatttgtgtttttctcatccctcatctcccatgaatacatgacttgatttatcttgatcagcctagtaacttgctccacatttttccaaaagtgcaaagcagtttcagctaaaaatacacatatcaaaatgatccaaaagttgtggccacagctcaaaaatgctgatcaattttgaaaatctaaatcagccttggccctgaaaccgagggaagaacctttgtggtaggggacagatttccaaaaactcaccacagtcctgttcttagctggagtttgtgctgatgttgccagacaactgaggaatagatgcaaaaagcaggaagcattattgaattgagctctagtgccaatttgggaaaagcaaattaaaatgtaaaagaatatttttccactcctggcatctcaa

SEQ ID NO: 9208 - DNA, 2300 bp, Homo sapien
gtactaatctaataaattacggtggttctaaaaacatagaacacaaatattaatgtgaagaactataattcttaagagaaaccttgtctttttcggtatcttttaacaatcaattactgttcacattgctttttctaacagtattttatggtacctgctttatctgttctatctgaatctgaatttgctttttaaggactgtggtgtgcattttaggatattttaggatatatttagagaaaagtaaaatagtttgaaaatagtgctatagggattttctgatactgctaaaaaatgaaggtttggcaatgagtattttttctataatatgaagatagtgctctgactctttataatcctaagttagcgccccccgccccaccaaaaaaaaccactggaaataaaacaaaatttagattccatttagctcagaaacagtaggaatcattgcctaccattcttataccagtatatacaattctcatcagctatccatcctgaattacattttttggcctcagaaaagatactttttattgtttttgagagacacacgtatgtacatatatatatatagtataagggtatgaaagaaaagggaaataatgcaaaagatatacagtgaaaaatttttcttttatcttagttctctagtctcacttctgatgctatagttttataaattcttttttaaccatcccaatatcttccaggcatgtacaattgtgtcgtgtctatttttttaaatagagatgacagtgtattatatatacatagtaatactccttgcttttttttccacaataatttggagacctttctgtagaagtacttatagattttccaaattcattttagtggtcgcatagtactgttttttaaggatatattattattaatgtaactagttattttcacttcagttcttgccgttacaaacagacctgtagtgaatattcttgtattttcagcaaagctattttaattaggatgataatgtatattgtttctgtgacttgaaagattatttaaaattaacagtttacttactaattttactaatataaacatagaacaagacatgctctttgactctgaacagtgtcaaaatttatatttgaggtcatatatacctaattaatatatatacccaattaatatattaattatattatatgttatataaattatttattatatataattatataattatatatattatttattatatataattatatattactatataattatatataattatattattaatatataattatatataattatatagtaatatataattatattattaatatataattatatataattatatagtaatatataattatatataattatatataattattataattatatataattatattatatataattattataattatatataattatatataattattatatataattatatataattaatatatacccaatcttaattatataatacttaattatatgattaataatttaattattaattattaattaaaaattaaaaattaaaaataattaataataataactttttgagacagagtcttgctctgttgcccaggctgcagtgcactggcacaatcttggctcactgcaacctctgcctcacgggttcaagagcttttcctgcctcagcctcctgagtagctgggattacaggtgtgtgccaccatgcccagctaatgttttgtagttttagtagagatggggtttcaccatgtcagccaggatagtctccatctcctgacctcgtgatctgcccacctcggcttcccaaagtgctaggattacaggcgtgagccactgtgcccagctggattatatttatataatagaacaccatacacctggaaaattaacaaactatagctacatattaacaacatggaagaatctcatgaccatctgtactgttctcagagtacctttaagagatcagtaggaagccttaaactgacagactgttctataatgttagattctataacaccacattttcatagaatctgtgaagtctagaatatcagtctcccctttggttctggaattcttcttgttcgttagaatgagggctccattattttggccacagagctatatccaggactgcttcagagcaagccccgtgtctgaatcttcagagggtagaagtcatcatcctgtttactcagtagggatggcatggggaagggaggagggagtagattttacctaaaatctactgtggatgaatagtgcaatatgagactaagaaa

SEQ ID NO: 9209 - DNA, 2300 bp, Homo sapien
ttcttcctttcaacctgttccctctctgttttctctttaataatcctatcctttttgttgttgttgtttttctttagtatctggagtccatctttcaccatcttctcctgagattgtactggaccgtgaccactcttcttccattggctgcctctcttctgatgccattatttcatcaccagagaatacacatgcagcaaatagcattgtgagtcaaactattccaaaagcacaggtaaagacaaacatatttttaaaggaggtttgcatatttaaaaaattgcctgctaatttaattgttgcttttttaatttcttttttagcctatttgtctaaaagaagtatttctgcaatagatattctaattttgaggctaatacttagaattcaaaaaaactatataatatgtttgtgtcgtggcacaattgcaaagtatttaagtagccttagttaccaaagtatgatttgagtatctcatttattaaactttacttggctttgcatttcaaatcttgaacttgaaaagggaaaataatacaaagaagaataagtatttctcttttcagcgaatcttaccgcacattttcaggtattcaagcaactatttcaattttagagtaaaaaccaaaaatatagcagttataaggtttattcattcaaatattttttaaagcaagaatttatgctagctgctgaaggtagtcccaatttctaaagtgctgtacacaattttgagtcacctgttaattttgcgagacagtggtgatcaatagaggtcattgataaatttcagagtttgatttacagtttaaaatataaacaaattctaggtctgtgtgtaaatttaagaactgttaacaaccagatatgtctatccttattcatacattttcaagcacaggaaaaagttaagtcttttagtgcattggtagcaaaataatgaatactttagatttcaaaattaagaggaaattttgtttcttacagcaaagatcgggttgttgtaaaagtttgaggtcttctcttgatttacttaaagggtgaaataatttcggaaccttttcaacaacttaatttccaaatgtggtttctagtgccctttggatgttttcattattggtatagtgtaaactttcctctcttgtgtatttttttttttatgtggtttagattcagcaatcaacacacactcatctggatatctcactttttccattgggtttaactgatgaaaaaagtaatggaacaattgcccttgtggatgattctgaggatcctggagccaatgtatctaacatacagcttcagcaaaaaatttcaagtctggagattaaactcaaagtatctgaagaagaaaaacagagaattaaacaggtatatttacatttgcctaagaaatgtttgaattgcaaatattagaaatttgatataatctcaaactctgattaaaaactcatcagaggaagaagatacttttctcccttggttgtaggtttaaagcagtcatgagcttatcacttagaaaagcctttgataagaaatatattttacatatgtacttttaaagatatgaacatcgtttactaggttttttctaactattgctttcttttttggtttatttttatttactttgaaagcaggtagtattgtgtttcttatgaggaggtgaaattttgcgacatcaacttttccctatgggaagttaggcatcacaggatatttgacaagagtacttaggtatacagccattttagtaaattctttacttatgctttcttccctgtgaatatatagcaaatttatagaaagtgtatgtagaggtagattatgttgatgaaattagttgagatgctcatattcatttgttggaatgagtaaatgttgtgtccatgtttgatattggcctagaaattagagtgaagcatataatttataatattgttagattttaagccgtacttcccatggattctttctctgacaaatgttttctgacatgttcattgaaaaaactaattatattttatgccattaaatattacaaagcttgtatttgtatttttattttaggatgtggaatcattgatggaaaagcataatgtcttagaaaaaggctttctaaaagaaaaagagcaagaggccatttcttttcaagatagatacaaagaacttcaggtaaggcgattgaacttaagatttaaaatgtaagccttttgatgaagcatgtgctataatttcaaaaagtgcataatgaatatcttatgaatgaagaatcagatacttgcttaaatatataa

SEQ ID NO: 9210 - DNA, 2300 bp, Homo sapien
tgaagaaagcagggtctagagaagagaaaataacctctcaaagtttagtgtggacccaaaagtttctacctcccaaatctttttgattgttttacttttccatcaaaccttcttccattaatataattgctaaggtagcagttcattaattggctggttgctcaaaggcctcaagagaagaccctagatagctgaagaaaagtagagaacaccctttctggcatccaaggaacagcaaaacattttttaaccaaggagcaccccagataataaaagaggagatgggaaggaggagaaaaagggcaaaatttgggtaactcagaagttttcttccatcatgtgaaaaggtatgaggtgccagatggagtggctcattgcattccttgggtgtttggttgaaaggataaaaacgaaagaagcaggaattccagaccatctattctagaactttacagatggagagaagtaaacacccaaaaccaatgaatgctctgaagcataccataactagataaagaatttaaatgttggctaccctcttgatggaaattggatcttagtgaaattttttttctttctctcagcaagattggatgtcatacaagaaatgtcaagtcatatatagctttgttctgagaaacctgtgggtcttcaggttttcgttacaacagttaataatggtttccatgtgattccagaatagcataactgtaagtaacgatctaggacatctaaatgttttaactcggtgcttttagcttttctgcaataggcaagcaatgtgttttactggtaaattgtattttaatttatgtttatgctttgtcaatgacttattttaagactagtagtgttcatgattagagagattcaagacaccagatttttgctgtataattttttacatatactcaaatgcctttagacaaaacaagaacctaatttagccacccaccagccacagaagtatctggggcacataatatttttccatggtggccagggtgactgctttttgagcttgtttatttgatctgggaagacataactcacaaacagcatctggatttcagagattcctatatttgcccccaattctccctttcagtcaatggtatccaaatgactcatctgcaaggtcagagagttgagttgctcggcaagactaaaatgcaagactctctggctcattccctgtaaccaccaaaccccacaatctctggatgtgtagcatgggaacctgcatgaagttttgccaagaccaccaggttactggggaaaaaacagtcttgacaaggttaagagtgaccctggagaggtgtagagcttgtttgttttatttaaggagttccctgtaagagcagaggccggggtggggtggggtggggaggagaaactttttttttttttttttcatcaaaaggtgtgactgagaacttgcaatttttgatgacatgtttctccctgagagaccttcactgttggcagacacagttgagacactgatgaaaagctgtggggcatagttttttgaggcctccaagagaaaccccacagttttaacttaatccaatttcagtggggtgagtagcttggagcgaatgaagaaataaacaagtaacgcttcttgaacactaaaaccagaatgaaacaaggttaggccatgacagttgacagtgtcagcttgacctgtagcctctaatcagcctgagaattatgccttccctggtttttacctagtctcttcatttcttttactgtacatacttctggaaacagtccacttgcctagcttgaagtacctaccactctgatttttcgcaacaacaaattgaattccatagttgatttatcatatcaatattgcatcatcaagatatgcttcagcataaaaggaagggtcaaggaacatagagacttctaactgtcattttagtaaatgcataataaggctagaaaaagagaagaaatatctactcatttcttgaccaagtttattagctggtgacttcagttaacatttaactccaggtttctcttacatttttaatgttttctttcttttgttttacatttttgatgtaagaaagaagactccagtttttttgcactgtgtgaaatccagctctaattatgtccgtatgacatcataaatccactaagaattggacagttttattatttgggccttaaaagaacacccaaaataaaggttaatgcttatataatggtaattatataaggacatatcctcaaaatgaacaaacagaaaaccccacataatacttaggattttccct

SEQ ID NO: 9211 - DNA, 2300 bp, Homo sapien
attagtaaagttaaaatgaggccattaaggtgagctctaaatcatatatgactggtatctttataaaggataaattttgacacagacatgaacatagggagaatgccatatgaagattataggagacaggggtcatgtgtctacaagccaacaagaaaccactggaagtaggtaagcatcatggaaaattctctctcaaagccctcataaggaaccaaccctgcagacatcttgatcttggtcttctagcctccagaattatgaaataatacatttctatagtttaatccacccagtttatgtgcatccttatgacagccttagcaaactaatacattctacatatatgaatagcgttttaaatggtgataatcaaattgtggttttgtaatctataattaatgttgtattttatctatgaacatcccactgaaagtatgcttttaatttcctactttataaacaactcggtaataaatatgcaactatgtacatgcggcatttctcttttatggattatctcctttgaatacattgtaagacatgggaatctaggtccagaacaagaaaaaatttcgttactgaacaccttgggaatgtgttgctaaattgctttccaacaaaagcgtgattacaatttaccttccatctgctatctgttaagtgatttctatacgttttcaccagcatttgacattatcatttgaagtgctgtcacacacattttgaagatacattcaaatttattcttgaggaggggaggggtaacgaaaaatactataaatttggttgtaactttttttctgtctcttgcattcaggcggtcaccagaggaaattagtcagtgcctttaggctacacttagcttaacacatttcattaaagagcccagtagtagagaattcaagatgggtgttattattttaatttcatgaaatcactccttaattctaactttcaaaagtcaaattttatttctttaattgcatgtggattgttataatgaggagaatcagaacagcttataggacaatatttcttttctatttttcttaacacaccatatttatttggaaatttacctcctacattgtccagggaattaggatgggcgttggccgtttttcagcacttcctggttgaggccaagggctccactcacgtgcctgtccatccctctacaaggcttccctggcagcttgtttttccgtttaaaatttaacaatgaccaaatcccaaaaaagctaccaggctaagaaatgaaacatctttttttcttttaagtccggagaagtgctgctgagcacagctggctcactgctgtttctgcggcccccatctctgatcctttctagtctcctacccacccccaccccaccataggcaggcagagccggatttctgcccttcaaaccccgagtgtgaggaagcctcacctgaagtcctcgcatcaccctccaccctcacgcccttgggttttaaaaagccactgcgttcgtgggtcactgcagggcgcctccgcaatgtctttagcagatacaagagcatccctcccacgggatgtgcagtgtagtcaagctgagtaaactgggatttttggctgccttttctgctagggtgggtggggaaaggtatgtcccccaagcgttcagttcagactagaacctttgaatctctctcctgtctcggtctctccctccacccccctaccccgccacctttcacggtgtgggagttctcctttcccacaccagagaggggcgcctttctagcttccttgtcccctcgcccactgattaaaaaatggagaaaaaaaccaaccccaaaacccaaaacaaaacaaaacaaaagccccaaacaaacaaacaaaccaaacccaccgaaaccaaaaccaactcccctcccccaaaccacacaaatgcgggagtcatagccagtggatccgctggtgctgaacgaatggaagcgcggggcgggcctgcgcgcgcggccgccctgcccacgatgctgtcgcccccgcgacctgtagggccttcgctggcccctcaccctcctcccgccccgggctgaggctgccgccggtttcgcgcccagtgccgaggcagcggcggagccggggaaggtcggagggagggtggtttcctcccgccccacacccagtctccgagccggatatatagagtgtcacgtttgggagccgaaagactggagccgtttccttgtggctggagcgcttcccgtagcctcggggaaggagcaggatttagaggaccactagttggaccccatcctcgtgctgg

SEQ ID NO: 9212 - DNA, 2300 bp, Homo sapien
ataccccatctattcgatttctcttttgtctttcaagtttgtcaaattattttagacactttatttcctgctaaatggtctatctcaaagccagttttctcccccaatttaatcctgcagccaggcatgatgctatatacgtaagaatgatatatcattattattaccaccaattttagaaaatgagctcgctttagggtcatcctgagttgactttaaaccttttatttttaatgggaaatacaattacagatgctgctcagagaattgcttcaaattttccaaacttgcttttttttttgagacggagtctcgctctgtcacccagactggaatacagtggcatgatcttggcccactacaacctccgcctcccaggttcaagcaattctcctgtctcagcctcccaagtagctgggattacaggtgcccactaccacacccagctaatttttttgtatttttagtagagacgggtttcaccatgttgggcaggctggtttcaaactcctgacctcgagtgatctgcccgcctcggcctcccaaagtgctaggattacaggcatgagccactgtgcctggcccaaattttcttttatgatcgaccactcttcacattcatcactcactgttataagaaaatcggtctctgagcattacatactcttccaatctatttgaacttgtccccattgccttgtgtagagacttactaatgtttcaatcatagtgatatttcattgttttgattgttaaagagaaattattcaaacacattttttaagtgtcaagaaagattttattcaagactattgcaataggggtcaagactattgcactaggggagagagagtgaattcaactccaaatacaaatagggacaagtggggatttagagtaggagagaaaatggacagttactatgaggaacttgcttaaggtatcaaggaagggggtaggaggagaggaattctcctcactcttgatatctagagtgatattttacctgtttctttttcttcatctggattcttcatgggacaccttgatatcactctagatatcaagagtgaggagaattctcaataaactggcttaataggattctttgctaaagcagggttcaggaggtcaatgtcaaggcttagttcagaagaggagcctgactaaagttgggtcaaagaggaagtctttgtctttgttaatctttcaaatttgaattcacccactaataaggaccaatttagaatgctatatgtactttacaagttcttttctagacctggaaaataagctccatcattactcataatgacattataggtaactgacgccagctgtcttcataagaacaaaattatctagcagaattgcacacacactgacaatttggtccaaatgaattctaggaaatctgattaaactcagagggtaatgaaaatatttgtagtatttatattgtgcttagtatttgccaggtactgtcctgaatcatttgcatggtttaatctcttagtcctcccaacagtctattgggaggtattactaacagtctgtagggaagtactattactagccccatcccaggattacagacagagaaactgagacacatagcagtttcaaagcttgtctgaagttactcaattataatatgtcaggtttgtgattggaacctagcactataacttttgagatgatgtgtttactacagtgcattcctacttctgtaaatctcttctccttcctttctctgagcaaacacataaaactgggaggtaggtaggagaattgggatgacattcatttgtggaagtccatatactgtgtcatattcttcatcttcagcacttttaatctctaaaacatagtgcagtatttagcaggtcatcaataatttttgttgttgggtaaatggctgatcgaatgaattaacaaaaggactggatactccatttctgatcaccatagagataaccaaattacgtttctcaaactctgtcatgctgagggctgcagtgacaacattttaggactagaacacattacttggatttcacaatacaaagatgattgcagttgtccctggtaagctcagcccacagagcctttcaattcagcttggggtgagctgcacttcaggcatggggatataatagtgtgatgaaccattcttctgaaggttcttctgaaaagctgctggtcttgggatactgtgagagcccctctcattgctctttagaagtaatttaaatttttctgctacattgtctgctcagctcgtattctggtcatagagg

SEQ ID NO: 9213 - DNA, 2300 bp, Homo sapien
gttacaggtgtgagccaccacacccagccaagaaggtcttcttaatacccaaaatgcaaaagctgaaggaaaacaatgattgattcattttaccacataaaaattttaaacatctttagtattaatagggattattatattctaagcactcatattaaactatataaaataggttacgattactgtgcccattttacagaataggaagttaggatttagagagatgaagtaatttagggctctaatggctaaattggtgaagccaggatttaaatcctataagcctgactccaaactccatgttcctaagccctgcattatatgtatcttcactcatattacaaaaagctttatagtcaaagctaaaaagaaacagacctggagaaaatatatgaaatatgtattcacacacacatgttcccatacattaataaggacaacccaataggaaaatagggagcagaagcaggcagcacacagaggggaaaacttaaatgtccaataaatgaatgaaagtccagcccctccagcaatcatgaatgcaaatcaaaaaaacaaaaagatgtcattccttatgagtttgacaattcagaagttgatttttacaaagtattcttacccccattaagagggtaagacatactgttttgtaccccttggccgggcgcggtggctcatgcctgtaatcccagcactttgggaggccgaggcgggtgacttgcttgaggtcaggagttcgagaccagcctggtcaagatcgtgaaaccccatctctgctaaaaatacaaaaattagccaggcacagtggcgggcgcctgtaatcccagctactcgagaggctgaggcaggagaatcgcttgaacccaggaggcagaggttgcagtgcgctgagatctcgccactgcactctagcctaggtgacaaagcaagactccatctcaaaaaaaaaagaaaaaagaaaaagaaaaaaaaaagacttttgtacccttcatacactgttgtggtagtgccaattgacagtctcttccttagggagggtcacctggcactagtcacaaactccacatactcttcaatccagcagtctccctcctcagcatcctctcctgacacaggcacattctacaaagaggcatgcacactgatattcattgccctatttgcagtagaaaaaaaagacaacaccgggcagaatgacttagattttcatggaaaattagtggaaaaagttgtaaaatatgtacaattgatttatatacacacatacccccctactgcaaagcaaactatgtacgtccatatatggatgtaaaagcataggagagtatacacaagcacacctggagcaggaaagggtctagaaggatttcagctttttctgccataaagattattgctaaaatacataccacacaacaaaccaacccatttcccacaaatattactgtttgacttctcacaagatacatatagatttttattgtgtctcttccttctgtgtttctcttttttcctaactgaactttgttctttatgcaggccctcttccaatcctgatatattttaaaacctttagcatttctgcctacaatatttgggttttcttcttttcctgtctttatttaataagccccatacaaatattttccccataatcacaatgtttccttttcaccttgctcaagaactgagttatgagctccaaatgaggtctttaaaaatttagataaactctacattggctaagttttagtcatttgcactgctaataaagatgacaaacacgctgaagaagacttcctcccttataaaggggctagcacagaaggcaatactgttcatacttctgattcttgatcacgagaattgccttaggcaattataacaatgactcctctgacacataatattattcaagcgagacagataaaggcgtatgtcctgtgtcacacagctaggtggtgacagctgccttagcatcagcacactgtgttccctctaatttcttcactcatctctaggtggcagtaaatctggttccgaatactgactttgagactcggctttctccacatccttcctgtcacttcctttgagactaattcagattctttccttagcttctatttccccatttgtaaaattgggatgatgaggacatcttccttgggtagctgtgacaatgaaaatgggatcatcatgcatcagccttagccccacgagtgccacagtaaactctcagtaagtgaggttgtcatcattattgtatatttaagattatctacctattcagaaaaccc

SEQ ID NO: 9214 - DNA, 2300 bp, Homo sapien
gacagccgaagaaagggacaaattcccgactggtcagcaagccatccccagtatggatccccactgggaccttgactcagatcatggggactgaagtcataaacatctgttgacctgtgttctagaaggactaaggagaattagaaaaaagcccatgaattattcaatcgaactagagaaagaaaaaaatggcacaaaaacaccttttgatcatctttactaaatacaggttgttatggaacaattattaatctcagtctaaaacctatcttatgcgggtaatacataatggactttttaaagcaaattgtttttcagacataacgccactgataacacaagattaagtatctatctctttttaaagatgatcctgataggtacatagatgtcctacagggtctagggcaaacctttgacctcgcttgcagagatgtcgtgctactgttagatcaaaccctggcctttaatgaaaagaatgcggctttagctgcagcccgagagtttcaatcttcaggggaaattaagttccctcttcactgggtagattagaaaatggtgagttgttttctaaataagaaggatcaaattagtcagttttgctacactgggaaatccaactctcatgggatagttgttaccctgaaagtaggttatccaggagatgagggatcagatgtaactaagtgaacaacagccagcctccatccaagcaagagcccatattcacaaagaaggaagagttgctgatgcctttacggcaaagattaaaaaaaggcattttagatgtatattaatttacttaatcctcgtaacaactctgagatattatcatgcccattttacagatgagcaaatggagacacaaagagatgaaataatgtggtcaaggttacatgctagtaagttgctgatctggaattctaacccaggaagtcctgtctccagtgtctatgatttcacccactacactatacttcttaagcatgtcaagaaagtgagaactttaaattgatttaattagactaactctgaaagtctgaaaataaaattgattcattggaaacttttcatcagtccttattttgggggatattcaatttagtgaaatttagtatttcagtaaaggttaattcactacataaaacaatgtgatttttttcctttgaggcacagtttagtattgtgatcaagatttccctgactctcccagcggtctgaatttgggtaaatcacttcactaccccttgactcaaattccgtatttataaaacaggtaaatactggtattatcttctaagagtgttgtgaggatacgcagattttttaaaaaagcagttaaagcctttaaacagtaattataagcagttgtcataattatgccgttgttagacttctaggtcaatgaatcagaaaatttaaatctcaatgtttgattataaaatctggtaacagatgggtgaaaaggaacctggaatgggtttactctccaggagttcacatttaacttttctttccgaagttccgtctattaactcctgttctatgaagtggtagaaaaagatgaggtattaattttctttcttaacaaatatttgaaggcatagttggtgttggcgaagggagatgaggaagacatatgtgctttcttatgatattaaaacctggaagacaataaaaacgctgatcaaataataaaaagcgttacctatggcggaaaaggaagctcaaatgttcttgtcaggggaaaacgacacaaaaactgaaagagggaaacaaaacaattgcacaggtgatatgcattagggttgttagggataatttctgcgcccaaggctcttattagtaatgaaatacggtgtgaggagctgagattcgttctgcagtctcagtgttagtcggaaagtaacccctcccttcccatagaaacagaaccggactggcggcgcgattacacctaaaacaagttgcaacctcatttccctgtaggcacgcctcttttatcttaaccacgcctcttcattccctaagcacgtcgtaagcaaagggaatatcgcgagatctgtacattgtctcttttctgacgttttcagctgtgatagtcgcttttgttctcgcgatatttccgggtacgcgggagccccggcgacccgggcttctgtgaaacatggcggtaggctgggaccataacacaaggtaaaatactgaaacaccgctgggtgctgttccctcggttgttccagggctgtttagggcgtaaatgcaattgagggaactgggagcctgtcatgggcttggct

SEQ ID NO: 9215 - DNA, 2300 bp, Homo sapien
tagagatggggtttcaccatgttggccgccaggctggtctcgaactcttgacctcaggtgatccgcctgcctcaccctcccaaagtgctgggattacaggcgtgagccactgcgcctggcctatggcctggctattaatggtgtgtaattcttattgaatggctctttttccacttaatggaaaggcattattatgtgaggcctgtaagggactaaacctttgtatataagaatagggtctcagttgaagctgtgggttttgaactctggaaacaaagggagttgttctgtaacaggaaatgagacagtgccccaccgcatggagattcccaggtttgaaacaaagaaaccacagagtatgctgcaaagctgtgtgccatgggcagaagagtgaaaggggacagcacctgtgagcctcacggaagggctggccatggtttgaccagcaacttgaatattgctggcctgaccgttcttgcacagcacatgttcaccttctagtccttacccttttgtttagtaaaggctttttggtgggtttcatcttacctcttgctaaaaagaaagagggctttgggtccatgtgggggctctgagcttttattggagaacggtgtggccctggagctggcatggtggttcaaatggtcacccctgtgtgatgactacagggaggaaagtggtgagggccactgttcaggtagccacacatctggacattccctggacagtactgaagcctggaggttcaatgttttattttcacagaagagctgcttaccttaagagcatgctggacaccccctatcccctagacacccaggcatgaaactaaggagtcatctactcaaactgtcatccgaggtgtctttccttgaaataaatactcaaaagaaaatagtgctactctcaagaacagcacagtcccataaaactattggtgatgacagaatgttctgtatttgtgctgttcaatatggtagccactagccacagagggtaaatggacaccttttgaagatgccacagcgacaggcatcattcactttttttagtcttttcttcaaatggtgtccatttaccctctgctctctcctgcagtcacagaggtcattgtccccagtagattgtcacctgcttgtacctgtgcctgcattctctccaccttgactgccttctgttttcccatctacctgctcatctcccacctgcccccattagtttatgtaccctcctacctcaagaagcttttatttctattttacatgaaagtaaaatagagcacttgaacgtaaaatcctccaactggtgctgaaggactggtggccaggttatttgatatatatggaatgtccacttagccttgccttaattttctgacaaaatataagaccattacaaattctggctttgtcttctaacttcagcttaacttattacaaaataatattcatgggaaaaaaagtgatatctcaccactagattaattttaatcatcttaaatgatggatcctacagttttggggccattctgctgaaatggaggacagtactgccacccagaaaatgatgtcagctcaagcctgatctttcctattcactctttgaaaactctagagggtcaagggcaacaagcttcttagaaggggcagtattgtactaagcttcctgaccctccgcctttcagaagtcctgcctgtgtttcgtgtgggggaccagcttcattgcccctgagcttggaccgcactccccagtctgggaattcgcagggctaagcgttccaggccactgattggcttgctgtggatctgctagcaggaacctctgcacacgtgtgagcaccactgtcaccccttgggccacctcgtgccagtctctaaggctgggtggcggggcactgtgacaccaggggtgaccagagagcggcggcagctcacaatgatcaaatgatcgtgaagagggacacctgcgaaccaaggcgccacggcaggtgctgcccataggcaccgcaggaggggataaagggcgagacccccgccttcaccacagttttctcagcctgcagggagggaggacgtgcgaggccggtgcgtggaggctatgggcctgctggccagtgctggtttgttgctgttgctggtcatcggccaccccagaagcctaggtgagcctagggacctgggcaccaggactgcggaggaggctgagcgtgctggagagggaagacttcattactccttgcctcaggaagtcggggtggtatagccacacctgaggcatttgggaagaaagggtgaggg

SEQ ID NO: 9216 - DNA, 2300 bp, Homo sapien
accccaccacacccctaaaaatgataactctgtgaccaccctatgacattgagcctctgcctccagagacagaggctcctagggacctcctagtcaaacttgtattcaaacagatacgcttgaaaagatttctgtgtagataatagacattccattctatttagaatttcacagtgttctaaagtgtagttactgaatatagtttcaccaggaagctactttgaagaaacctatcagagtagagggccttcattctgcttctggccttactctcacttgccttgggatctttatcaagtctgttgaatatctttgcactttagtgtctatatctgtaaagtggaaaatttttgtgtgtggttttttaaatatctcttaaatcctgataaacagctaaacagtatcaaaaggcagctaaattgtataaaaaaatacctgcaaaaaccatacaaatgtaagtatttaaaaatatataatgcattggacaagtgcatggtggcattattatgttgtaagtcttattaattaagtgccattcaaatgaaagtgcatgattttaaaagagattttcactatagagctgatatgtgttatttaaagtaatgcttcaattgctatgttgaagtatagttcattgagacagacccttagaaattgcttctggacagttttatttctacagtagcctgttctattttttatataatgagagccagttatatcttggataaataacaatcactaataatctgaaggcatcctattagcaagagcgatgaccagaaaaatttcgactaaaataatatatataattaaaacaataggttttagtttttactgcttttttgttaatttttttggaagtatgaatgaacagtgaaattgttcaaagttaggcaatggccaggatgagaagctgaaatgcaagctaatttgcatattgaataattttggtataactctgtaataatgagaaagaattataagtcagaagagaaagtgaaatgttcatgtcttttataaaaaggcatgttctgctcttaccaacctgtcactggttacaggcttaccagaaaaggcagtggcccattaccagcaggccatcaaacttagccccagtcatcacgtggccatggtgaacttgggaagactctacaggtcactgggagagaacagcatggctgaagaatggtacaagcggtaaagttccctttcttttctttataagttgcccaggaacctcagcaatcactcatcagcttcttagttaatcagaataggtgtgctctcagaatactagcaaattttgccaattcaggtgatacaaatttttatctccaaagaaagcaaccacaatataaatgggatcataattcatgactttggcttgctggttagactatagtgctgaaccaaggttgaaatttaattcccactttagtcagtttgttgttttctgaagccatggattgcaaccccaatcataaacagcaatttaaaaaatgaggatacatgaaaaactatgcacacatgagaacaaattcatcataattaatgagaaagacccttggggctcagtttccatattgataggtcaataagacattcttacgttccaactatggcatcatgatcattttgtaaaaaccttgttcttggccaggtgcggtggctcatgcctgtaatcccagcactttgggaggccaagatggtcgaatcacctgaggtcagatgttcaagaccaacttggccaacatggtgaaacctcgtctctactaaaagtacaaaaattagccgggcatgatggcgggcacctgtaatccctgctactcaggaggctgaggcaggagaatcacttgaacctgggaggtggaggttgcatgagccaagattgtgccactgcactccagcctgggtgacagagtgagactctgtctcaaaaaaaaagaaaaagccaaaaaccttgttattgatataaaaacaaagaccgtattggagcagaggttcaaaccatggaccgtcttccctaaatctaagcctagacatttggaaatgtacctattagaagagaaatgtcatttagattttctccaaactcagcgccctgcaggtggcacacaaagctgagatattgtcacctttgggagcactgtattacaacactggccgatacgaagaggctttgcagatttaccaggaagctgcagcacttcagccttctcagagggagctccgcttggcactggtgagtaggatgaaagaaaatgaagctggcaacctaagcacaggcagccatagag

SEQ ID NO: 9217 - DNA, 2300 bp, Homo sapien
aagaaaaatgtacctaaaaagtaactcagaattactaaagtttgctaaagtgaatctttagacaaagagaacacaagggcaattagaattggagccctagaatgagagatgtggtgatcgacctgaaccttgccacacaggttggaggtacacccttgaggggacatataaacctgttggagggagcagctcagaggtggaaagcatggactgagtatgggaagtagccaccagtctggtgggctgtagacatacttcaagtaatgaaaggatagggcagagccctccccaacatctgcatctgcctcccctctctacttccctcaaaaacttcccaaaacaagcagtacagtatatagataaaaagagagtcatctatccaaatgcagctagaaaacaaattccccagactgccctgcctcccaaccacattgccacctctgaaaacattccaccatttttgcatcccccgttttcgtatggagagtcaccggggtgaagggcatcctattcgaacaactattttcagtcctttttccccggtaggcgtgcatgttgtacaggtccatatccttccaaaggtcccatttgagaaaacatcatctttttcgccctaagggaactaaatacagatatgaattttgggtattttgtacacagttaatattgcctttaattcaaacaaagttcatagtgccttatctcagtagcctgttgtatattaggtgcttagtaagatttattttttttttgcttttcctgctcctaatattcagttattgttggttttagaaagctttctcacttattttgtttgtttctttctttttaaaggagcggtttaaagaagctgaagaaatataccaaactggaataaagaactgtccagacagctcagatttacacaacaactatggggttttcttagttgatactggtaagtgaaattaaagagaaactgtactgctgagattagctaatacaatttatcaagcaaaatggaaggcaaataatcctcagaagtaaaattcactgggcttggcaggaagctcacactattgacagtcattatacctcggggctgtcatttctctagatcttcaagctcgattcagtaaaatctggccattctcatactcatttctctatggaaaactccccaggggacaggaagtagccttatgatttaataagtcccaatcttctttgaatattatttatatatatttataaatccatgatgatgaaatgtttctctacaatgatgcaaaacctgcctctgaaagcagttactggcagatggtaaatacttttctataacatattttttaaaagcctccagaattgttccatcattccttccttgatgtacattagaaactgcattattaaaattgatacaatgctcttatatgacaggtgctatataaaatacacttactttatcttacttaatgcaaaacattactgggcatgaattctcttttctttatgacttatgtagtgcctctgtactgttggcatgcaatgtaagtaatgaaattatatttaaatgtaaggccaaagcaccactttgttcttgttgattactagactagctgccctgcagcaaaatttagtttaattagtttttcaatatgaaatgcttaaaggggttttattttcaaggatatttggagctctcttgttttacagaatataaaatttacattctgatacatctaagaaacttaccttatttttgcctgtgtaaaattgttgtgtagtgccacctgctggttcattggccacataataataaactgtcttaaaaatataaaaactagaagaaacctctagttgggcaggtctaaccctcctccttttacttcaacaacagtcccaccccaccacacccctaaaaatgataactctgtgaccaccctatgacattgagcctctgcctccagagacagaggctcctagggacctcctagtcaaacttgtattcaaacagatacgcttgaaaagatttctgtgtagataatagacattccattctatttagaatttcacagtgttctaaagtgtagttactgaatatagtttcaccaggaagctactttgaagaaacctatcagagtagagggccttcattctgcttctggccttactctcacttgccttgggatctttatcaagtctgttgaatatctttgcactttagtgtctatatctgtaaagtggaaaatttttgtgtgtggttttttaaatatctcttaaatcctgataaacagctaaacagtatcaaaaggcagcta

SEQ ID NO: 9218 - DNA, 2300 bp, Homo sapien
gcaagtatctttttcgaataataacttcttatgttctgggtagatacccagtgtgggattgctgcatcaaatggtagatctacttttagttctttaaggaatctccacattgttttccatagtggctgtactagtttacattcctaccagcagtgtagaagtgttccctgttcaccacatccatgccaacatatactgtttttgatttttttgattatggccattctcccaggagtaaggcggtatcacattgtggttttgatttgcatttccccgatcattagtgatgttgagcattttttcacgtttgttggccatttgtatatcttcttttgagaattatctattcatgtccttaacccactttttgatgggtttttttgtttgtttgtttgtttgggagtttttttttttgagatggagtctcgctctgtcacccaggctggagtgcagtggcgcgatctcggctcactgtaagctccgcctcctgggttcacgccattctcctgcctcagcctcctgaatagctgggaccacaggcgcccgccaccacgcccggctaatttttcatatttttagtggagacggggtttcaccatgttagccagaatggtcttgatctcctgacctcatgatccacccacctcggcctcccaaagtgctgggattacaggcgtgagccactgcgcctggcctattttttatttttcttactgatttgtttgaggatttgtttcaagatttagagccgcttttagcagttcttgtagtgatggcttggtaattgtgaattctctcagcatttgtttgtctgaaaaagacttttttttcttcatatatgatacttagttttgctggatacaatattcttcactgataattgttttgtttgaggaggctgaagataaggccccaatcccttctagcttgtagggtttctgctgagaaatctgctattaatttgataggtttttccttaaaggttacctggtgcttctgtgtctcacagctcctaagattcttttcttcgccttaactttggataacctgatgacaacgtgcctaggcaaagatctttttgtgatgaatttcccggtgttctttgtgcttcttgtgtttggatgtctagatctctagcaaggacaggcaagttttcctcgattattcccccaaatatgttttccaagcttttagaatcctcttcttcctcaggaacactgattattcttaggtttggtcatttaacataatcctagacttcttggaggctttgttcatattttcttattcttttttctttgtctttgttggattggattaattcgaagaccttgtctttgagctctgaatttcttcttctacttgttcaattatattgctgagaacttccaaggcatttcacatttctaaacatgtatccaaagtttcctgaagttttgattgctttttcttaagctatttccttgaatatttctcccttcacttcttgtatcatattttggatttccttgcattgggctttgcctttctctggtccctccctgattagtttaataactaacctcctgaattcttctccaggtaaatcagggatttcttcttggtttggatccattgctggtgaactagtgtgatttttttgggggggtattgaagagccttgttttgtcatattatcagggtcggttttctggttccttctcatttgggtaggtgctgtcagagggaaggtctagggctgaaggctgttgttcagattcttttgtcccacggtgtgttcccttgatgaagtactctcccccatttcctatggatgtggcttcctgtgagccaaactgcagtgattattgtctctcttctggatctagccacccattgaatctactgggctctgggctagtaccaggggttgtctacagagtcctgtgatatgaaccgtctatgggtctctcagccatggatactagtgtctgttccagtggaggtggctggggtgtgcaatggactccatgagggttcttagctttggtggtttaatgctctatttttgtgctggttggcctcctaccaggaggtggtgctttccagagagcttcatctgtgctagtatagggagggaccgatggtgggcagggccctagaactcccaagagtatatgccctttgtcttttgctaccaggatgggtagggaaggaccatcaggtgggggtagggctgggcatatctgagctcagaccctccttgggcgggtcttgctgtggctgctgtgggggctgggagtgagattcctaggtcactg

SEQ ID NO: 9219 - DNA, 2300 bp, Homo sapien
caatgaccacaataggcattgaagacagttcttggctcaataaattcttggacatttcctctttcctctgctacccttcagggtatattatggatcattcattcattgaatactgtttactgagcacctactatgtgtcaggcactatttttggtgctggaaatatggcagtgaaagaaacaaagtcctatccttataaaactttatgggatgatgatcatgatatttctacataaaacgaactccttttctacttctgtgggcgagataatggttagattttcatttcagtggctcttaaaagttttttcctgtaaataccttgcacataggtgtacaaataaaaaaactaaaacaagtttaggactagagaacagtttggcactaaagtgaattataaggtaattaaattcaagagacatagggaggcatataaatattttgaccttcaatgataaaatgggtagctgatcttttaagtgtcatttttatgttttattgctgtagacctttcatcgtactctttttccccaaagtaagaaatgctgtgcaaattaaactcctgaggtaggcttttgaacttttatgtcacacgttatgattctatgagtagggaaaatgtgttccagattattaacagcctcgtaccatctttgagagaaacctagtgagctagtgatatgagatttgcaggtgacagaacaaatctatgttgaaagcctgtattattgatgaataataactgggttctctttctcccctttatacatcatattcattgattgatctcagatgagccattttcagtctcattcagctgctgctttcaaaaatgaaatgactgaataagaggtgtggagttaactaatgggtccacacagaaaatacatgtaacagttaaaagtgaagtttctaggttcatatttttttaataaatcccacatccctcattttaaaatctcttaaaatataaacctcagtgatgcacgttagaaacacaaaccacctcgtggaagcagatatgaaccaatatcttactttaaagggttgttgcaaatttttaattgctgctaatagctttttccttgcttcccttgctttgtgtataaataagctggtccacatttcactatggaattctctcttcaatggcatgcatagttaagtctttagatgtagtttttaggtgaccgtattcagatcactgtgagttatttccaggaggtaggagcatgatagtggtagacccaagaaagcaataacttttaggctgaactatataatgacactgaccaaactaaccagtataattaaagttacgtattgttaaacaactttataactgtttatactcagggtcctgtcgttcagacacagtacccaaattatatctttcctaatctttatccatatgcattgctgagctttttcccttcttcagcttctttctttttttttttttttttttttgattgagtctcgctctgttgctcaggctggagtacagtgatgttatctcgactcactgcaacctctgccttctgggttcaagtgattctcctgcctcagcctcccgagtagctgggattacaggtgtgccaccatgcctggctaatttttgtatttttagtagagacagggtttcaccatgttggccgggttggtcttgaactcttgaccttgggtgatctgcccgccttggcctcccaaagtgctggaattaaagtcgtgagccactgctcctggcctagtttctttttaatgtagtgaattgaccatcgtttttgctaagaccctgtgccctttggtgttctgggactacaggcacacttggtgaatgttagggcactgcagaagggaggtggttgattactgcaggcaaatgacctcctatagagaaggaaacagtttattgaaaagggtaaatgaatggcggtgttttgctataggtgtgacagaaatggcaggaaatgtgttttaaaaaataaaaaaaattaaagttgggcactgtggctcatgcctgtaactccagcactttgggaggctgaggtgggaggatcgcttaagtccaagagtttgtggctgtagtgagccatgatcacaccactgcactccagcctggatgacaaagcaggactctgcctctaaaaagaaaaaaaaaagttaagtacaaaacttattttcaaaaataaactttgtcagttagtgttaaaaggctttttaattatgaactgtgtttattggaatagtgtcattactgtgcctttaatgttctttggtgggttacttactcaagctgg

SEQ ID NO: 9220 - DNA, 2300 bp, Homo sapien
tctggattatgtcggtgagctttttaagggtttggggaggatgagaataaaagggtgactttttattttcagtttttctatctggatgtgtcaaattcctgataacttctaacactcagcaatggaaatttagaaggtgcctgaaagaacaaatagaattttcagacctggagaaattctagtaatcatcactctgggacatattattaaaattagtattttaaaaaagaaaacaatctttcagaaagacaggaagtttaggagccaaagccagaggccctaatacaaatcgcccccacctccccatccccccatccccaccttcttccccgccctgttcaaacacgcccacagcccaggaaataatgagacccaagtgatccagctagatagaaaaagtagtttgcttggcatctcccaaattatcttgagcaaacaataaaataagaaatgtttcagaagacaattcggctcccaggcccaaaccaaaactcgaacctggtactttttgtaagtgcgggccaagaaaggggctgtaaagttaaagagccggtggcgcctctgaacacacccgggcagggcgagcaggatgtccttgtccagggagaccccttctcctggctttgaggaaggtgctccctatccccgcgggttcctccgccaagcgggacgccgcgccgggcgggtgagagaaagcccgggcaggagagcacagagccggcgactggacgcgagcgcggggcgggtggagagcgtctctccgggcgccgctgctgttgtcccgggtgctgaaaagccgggaacttcccgggaagcagcggcacttttctccctggaaggtgggtgtgggggttccagactgcgcacctgctaaaccctcctgggtcccccgggaggggtccgccagatgtgccccttcccagccccattcgggggagaaggatgggggcgggggcgtgggggtgagcacagccggacaccgcaagtgggaacctggggtgtccttccccgcagctcccgggcagccgcgcgccgcgaaccccggtccacctgcaagcaaggcgggccgggggcagagggcgccgggctgtgcgggggaaccggcccgcgtcccgggattggggggcggtggaagagagagcgagcgggcatgcgcagtggggcggaggaggtggcgatggccgggggaggcggggggactgctgtttatttgcagctgggccaactccgcggcgcaggcggcggcggagcgcggggagctcgcggcgggtccagctgccgcagcaccatgcccgagcccccctccgggcagacgccgcgcgccgccggggccccggtaggggaggatgccagacgcccgggagaggccagggcagcagcggcggcggcggcgcgatggtggtgaccacctctgcccgaggcggcggcggggaccgcacaccctcccggcggcggggctgcgggctagcgccggccggggccgcggcgctgctggccggggcaagctgcctgtgctacggccgctccctgcagggcgagttcgtgcacgacgacgtgtgggcgatcgtgaacaaccccgacgtgcggcccggcgccccgctccgctggggcatcttcaccaacgacttctggggcaagggcatggccgagaacaccagccacaagtcctaccggccgctctgcgtcctcaccttcaagtgagtccctcacctcgcgctagccgccgctgcctcctctaccctccgcccgtccctcggaccgggagaagttgcgggactgacttgggggcatttcatttttgccgccctttccctccacgcctccctcctctccaggatgtgcatggcactttgctccgggatccactgcccggctaatctgggctctcggggcggttcgggaggcgccggctggggagttgggatcgagtttctcaactgtctgccctctcagcgggcttctctctcgaggcagggctgggagcgggctggtgaaaccgcctccgcaccccttcgcctgccggatcgtgaccaagtgggactagcgcggacccagagggttccggaggggtggcggtggtggcgatgcttccaagtagagaatttctcggaggctgttgggcagctttgcagatgagaagtgtatcagccccttaagggtttcgttcagatgagacgaggcgggagccttgagctgacagggctgcgtgggttcaggagagggagcagaaaactctcccgagccccccagcccccgccttgcacccttggctgctcccagaggctctccaatctgccaga

SEQ ID NO: 9221 - DNA, 2300 bp, Homo sapien
tttgagtggacacaaggcgtttcaggaggtagtattgcgctaattatcaatcctttaaaaataattagaggctaagtaacaagaattaaatctaacttccttttgggcccctttattagtcaagatggatgttttccactttaagagagaagcaaatggcttgatgggctggcatatcaatgtaaacctctctctgacatcagtacttctatacttttcctaccacacagagcagtattgaatcaggaggtgatgaggctgcaaagaaactaattattattattattattattattattattattatttttagagatagagtctcacacggtccccaggctggagtgcagtggcgtgatcttggctcactgcaacctccacctcccaggttcaagccattctcctgccttggcctcccaagtagctgggactacaggcgcgtgccaccacgcctaggttatttttgtatttttagtagagacagggtttcaccatgttgaccaggatggtctcgatctcctgacctgatctgcccacctaggcctcccaaagtgctgggattacaggggtgggccaccatgccaggcccgaaggaactaatttttaaaaatattcactgatcagttgtccttgagaagacttgaagcatttcactattttaagtcaatctcaaatttgtcatctgagcaaaatagaataaagatgccactgaacctagaggaaagattaggtaaccaggaatcctactttcaggtttcctttatctcttctttttatgatctctttggagtctcagtcccaagtcctgcactactctccatggtcatggagcactctgatactgtttccatctaaaaaagaaaacaactccgagaagaagggggtagccagagctcttccttggaaaaggatgacttaaggataatttgaggaaggaaaaaagactttctttctataaaaatctactattagaggccactcttttcttttcttttttgaggcagggtctcactctgtagcccaggccagtcttgaactcctggcctcaagcaacgctcctgccttggcctcccaaagtgctgggattgcgggtgtgagccattgcacctggcctagagtcactcttttgggttaagacgttctctctagaaagcctccgttaattataggtaaggattgatacattgacctattacctcaactatgatttcagcaaagataatttcactatcccaatcagctgttaacttagaaagctagacttttatggtgttaaccacacacacatacagacgcacacacacgagcagctttgggtcttccaatcctatacttagcacattgtagcacaaagaatctccttaatatatttttattaagttaataggtgaataggaaaggctgtagtgtgttatacggggaaatagactcaggtgtgtctagatattaaagtcggtatattaaggttaccaagcgtgaaagattttgatggaagaatgaaaacatccatgtccaggacttccagtttcatttctcagtcactaatttcaagtcaccaaataaacaaagtgaaaatgggtgaaacgtactttgagttacaataagtttatcttaattcattgacttttcaactgctcagatgtcttaaaattttttaaaaagtaagttgttatagtaaagagccacacaaatactcatagcagaggaacaatttctggattatgtcggtgagctttttaagggtttggggaggatgagaataaaagggtgactttttattttcagtttttctatctggatgtgtcaaattcctgataacttctaacactcagcaatggaaatttagaaggtgcctgaaagaacaaatagaattttcagacctggagaaattctagtaatcatcactctgggacatattattaaaattagtattttaaaaaagaaaacaatctttcagaaagacaggaagtttaggagccaaagccagaggccctaatacaaatcgcccccacctccccatccccccatccccaccttcttccccgccctgttcaaacacgcccacagcccaggaaataatgagacccaagtgatccagctagatagaaaaagtagtttgcttggcatctcccaaattatcttgagcaaacaataaaataagaaatgtttcagaagacaattcggctcccaggcccaaaccaaaactcgaacctggtactttttgtaagtgcgggccaagaaaggggctgtaaagttaaagagccggtggcgcctctgaacacacccgggcagggcgagca

SEQ ID NO: 9222 - DNA, 2300 bp, Homo sapien
aagtagaagtggcaccattcaccatcatccctagtgatccattagcaaaatttttacttcctgtttccatgacattacgttctgctggcctagaggtcttagttccagagggaggaatgctgccacctggagacataataatgtttccaataaactggaagttaagattgccacctggacactttgggctcctcctacttttaagtcaacaggctaacaagggagttatagtgttggctggggtgattgatccagactttcaagatgaaatcagtctattactccacaatagaggtaaggaagagtacacatggaatacaggagatccattagggagtctcttagtattaccatgccctgtgggaaaattcaatgggaaacttcaacagcccaatccaggcagaactacaaatgacacagacccttcaggaatgaagatttgggtcactccaccaggaaaaataccatgacatgttgagattcttgctgaaggaaaagggaatacagaatggttagtagaagaaggtagtcatcaataccagctatgaccacatgaccagctgcagaaacgaggactgtaactgtcaagtgtatttcctctttttttgcctaaaaacatgtttgtgcatgtatacacttgtactaagaaaatatcttcattttattgccttttcctttatgaggtgacatgagatttattgacttcatattagcatttaaatattgttaactttatgtaatagtatttggaattggtgtgtttctggttgtgtgaaggatagttgtattacattaggcataattatgaccttattattgactttatttgaagattatgtatgatctcaggagatgtgtatgggttcaagttgacaaggggtggacttgtgatggttaatactgactgtcatcttgattggattgaagtattgatcctgggtgtgtctatgtgggtgttgccaaaagagattaatatttgagtcagtggactagagaaggcagactcacctttaatctggtaggcacaatctaatcagctgccagctaatataaagcaggcagaaaaacgtgaaaagctgagatgggcctagactcccagcctacatctttctcccatgctggatgcttcctgccctcaaacataggactccaagtttttcagttttgggactcggactggctctccttgttcctcagcttgcagacagcctattgtgggaccttgtgatcatgtaagttaatacttaataaactcccctttatatatgggtgtgtatatatatatatatcctattaattctgtccctctaagagaactctgactaataccgtttgggatccatggattcaaccaactgagaataagaaatattggaaaataaataatataaagaaaacaatgcactgtgacaactatttatatagtacttacatatattagatcttaaatgtaacctagaaatgatttcaagtatatgggaggatatgcataggttatatgcaaatactacaccattttatataaggaaattttgcatccacacattttggtatctgtgggggtcctggaaccaattccttatgaatgctgaggcacaactgtagtctgttaccagattctcctctacttaataatggaattgcatccagataaacccatggtaagtcaaaaatactctaagtcaaaaaattcatttaatgcttgcaatgcagcagacagcctaagatttaaccatgggtttaacttatgtgtggggaaaagcaagagagatcagattgttactgtgtctgtgtagaaagaagtagacataggagactccattttgttctgtactaagaaaaattcttctgccttgagattctgttaatctataaccttacccccaaccccgtgctctctgaaacatgtgctgtgtcaactcagagttaaatggattaagggcggtgcaagatgtgctttgttaaacagatgcttgaaggcagcacgctccttaagagtcatcaccactccctaatctcaagtacccagggacacaaaaactgcggaaggccgcagggacctctgcctaggaaagccaggtattgtccaaggtttctccccatgtgatagtctgaaatatggcctcgtgggaagggaaagacctgaccgtcccccagcccgacacccgtaaagggtctgtgctgaggaggattagtaaaagaggaaggaatgcctcttgcagttgagacaagaggaaggcatctgtctcctgcctgtccctgggcaatggaatgtctcggtataaaacccgattgtatgc

SEQ ID NO: 9223 - DNA, 2300 bp, Homo sapien
tctaaggatggtacccctctggcaaagataaaatgtaatgtcacagaatgtttaactctttgcagatctcagggatgcctgttctcaaaagtggagtcagaaggcttgttatttgtagcccaggtgctgccccagtaggagaatttggttttatgtgaagcactcttcctagttttcaaaaataggaagagtgaggccgggcgcggtggctcccatctgtaatcccagcactttgggaggccgaggcgggtggatcacgaggtcaggagatcgagaccattctggctaacacggtgaaaccccatctctactaaaaaagcacacaaaaaagctagcagggcgtggtggtgggcacctgtagtcccagctactcgggaggctgaggcaggagaatggcatgaacctgggaggcggagcttgcagtgagctgagatcgtgccactgcactccagcctgggcgacagagtgagactccatctcaaaaaaataggaagagtgagattccaactagtgttatgtgcccacctcaggtcacccaacacagattagtgattgtgttatgctagaaattgagctagctgtctaatttgttttaaaacactatctaatatctaactggaaattaatagtattcttcttaagttttgtgagagatcatttagaaaaatttcctgagaggaacagactccccacagtggttaagacactgctgccacaggcaggagaagatggaggcctggattagggtggggcgttaggaatgggggaacatatttacaagctgctatgcgtgttctaatttttctacttgcaggacactggaattaatccctgattgagatttgttattaaaaccttgaagggaagaacatactatcaaagaaattgttgttaaagttatctctgagaaagatttagggagtagagatttggtaatttaaagttaagcggttggttctcttatgtgtttattagcactggaagcagtctccctgctattgtgtagactgggagtccttgggttgtgcttccttggattctttcgagctctgcttgataatcctcttttctgctgtgatccgtgtggcatgtatttaggggttgcatggatgagaaggtcctcaggtcaagtacagttctgttatagcgtactagttgggcattagtgacttgaatcaatcaaggaatgcaaataatgaagaataacagaagcctgtagaatattcattattggatttgttatattattcgcactttaaacacattgaatcgctgcaagtgaattttttattcacacaattttaagaatgttttgccaatgtaatcttttagttcttaattttttagttttaagcaacttagaggaagcatttagtagaaaaatgtctaatgtttactggtcaaactttttttctttctgaataaaattttccttgtccttatatttttcttatgctattttatagcacaggagtttagtagactgcttaaattaagttcagcttactatcttactagatgctgagtttttgaaacatctttcacctcttagggtttgggtagattatgtgtgctgagaaaccttgtagatcaatctaatgttggaagagtctaagaaactcttcattccccccaaccattgtataggacttttatgctgtcaaatataggtatttctgctttattaaaactccttatgccgaggcccatatataacatttatattaatcataaattgatattacagcaagattcaccatgttaattgcagactcccaataggtctttgaaaataattggtttacaaaatttgatttacatagcatttcatacagtacaaaacagggaatgtctctgtatgataccaacagatgaaccttagagtatgccttggacatttctttttgtagtttctccagaatttgttctttattccacttctcatgtctacattttttttttcttcaaaatttgcaggcatcatgaccggaagatgtgtataataggactgagtatccttttggaattgcaaaatcgacctcctgcagtagatgctgtggtgggacagattgttccctcaattcttttccttttccttggcctaaagcaggtctgtgctactagacaactggtaaaccgggaagatcgttcaaaagcagagaaagctgatatggaagaaaatggtaaagtcttctaattgaaattaatgttacaattgattttgatttgtgtatgcattttatatgaatactagtctatatggagacattaaacagatttacattcttcggcctgctaca

SEQ ID NO: 9224 - DNA, 2300 bp, Homo sapien
agttattaaaataatcctcatttggttgattcacttacttcaatttatcttaatttttagaaatagcttaatttgcactctagcctgggtgacagagcaagactctgtctccaaaaaagaaaaaaaaaaaaaaaaaagaaatagcttaattttttggtaacggatatgggaaccatagacacagttctaaggtctaatttataagacaaggtatattcagagaagtccagcttccaccctatccctctacccttcttcttcttctccatttcttcccctagttttagttcatcctttcattaaaaaacaaaacaaaaacaaaaaatagatattctctccttgccttcttaggtaaacggtagcatactatacattttctctgttgccttctacgctaagtaacatatcctgcagatcacctgatagtagcatgtggagatattctgcattccttctgcagctgcacagtgctctaattgtgcatttacgtagtagtccaaccagcttccataatcgattttgttttaatataatggaattcttttagttttactagttctaaaacttcacaattcctttatgttcttatggctttgtgtgtaatagtaaatacttgttaaaatgaaactttattttctatttatttaagctgacataattgtatgtttatagaatacatagtgatgttttgatacaatgtgtagtgatctgatcagggtaattagcatatccattgtctcaaacatttatggcttctttgtgttgagaacattcaatgtcctcctcctagctatttgaaactatgtattactgttaactatagtcatcccatagtgctatagaacaccagaacttatttctcccatctagctgtaattttgaaactttagttttaaaacatctcaaaaagagcttttcaaacttaatttatattttcttgtggctgcgtttatccacaactaattatttgaccatggtaataatttttaacatagcttatatgtgttatctcaaattagaacacagaatatgttgtatcagcataagtagacgtagagttaaactagttatctcatctttgtagagagctttatggtcttaaaagtatgtgtagtcatgtattttgatttaatatgttatcctaaaccagactaatagtctgctgacccaaatatatatccaatttggcctactaaaaagaaaataataaatataactcaactttctacacaaaaccttgatttttttaaaagtttaatttaaaaaggggcttatagtaagacctcagattttattttatagaaatcatttcagctcatcccctttaactgaaaataactattgggaaatagttctagtaaaattagttcatcaatattgcaccttagaattggagtcagattttattttaatgttcaggctccaccattttttctttagcctttttcatcttatattaacaggaattttctttctcaaaaacaatctgattacatcataattattttcagtcccatttatttatttccaatttaatttgtcaaagaaaatgacatgcagtgatttcaccttagatgtgcaagtggctgtgtccacatagggattattgacactgtttgagcgtggactcttacaggacaatcttcagctgactttaatttacttaagaaggaaggagattttctggcactgctataggacttgtttttgtctatttagtctctctaggttgttataataatataaatcttttaaatacctctaaaatgatttagtcaaaagtctcattgccattaagactgtcttatttattgagaatgctctgccaatattcagcttctataaaagttacttgggctgtctgtgtggttgactttcttttgcttgtcttctagtgcattccactcttcgttcaacttgttttggagagattaactcgaggggtcaaaactagtgagcttcgtactatgtgtcttcaggttgcaattgctgccttgtactacaaccctgatttgctgctacatactttagaacgaattcagttgcctcacaaccctggacctatcactgtacagtttataaatcaatggatgaatgatacagattgttttcttgggtatgtgtcttttggattttacactgcttttctgtttctggaaagtttgctttttaatatttgtgtataatagcatgtacaaagataattttcatgtcttaggaattatttttagtgtattgttaatatttaatttttagaggattaagaatgcatttcagcagggtaatctagtggaaagaat

SEQ ID NO: 9225 - DNA, 2300 bp, Homo sapien
aattagttctaattataaaagaggatattggagttaagattttcagagataaaaaattttttagacattcatgatgtccaagagagtggtttagtgaaatagtgttcataagactctggagtgctaagtttatattttattttgaaattgatgagaaatcaaggaagagacatagtaatattaacttttcagaaactttcttctgatgatagtgtgaataatggattaaagaggggcaatactggaagcaattagacatgttaaattcactgtgaagcacttttgcatccaactgagggggaagctttcaagccaccaagttttcagccacatgttttctactctctcaattgaactcagttaattgacccaatctatcttaattatctgctcctgaaaagatcacagcccctcagctgtgttttgcccacatcatcatctttattaaatgtaattagaaccctctcttctgggttaacctcaggaagaaccagctccttgatattttcatgccattgaaattgtggcgccagatatggccacagtggatagaaacagtataacttttctgcttacctttcactacatttttgagaaggtctgaaaatttttcataaaactctcagggatgtagttttcagtttctgtgacctttgtctttctgaaatgggagaggttcccttgtccccctcacagggcgtgcattgggggtgtggctcgcttcttcagtgccccgctgctcagacctctagagaagcatacagaccggcaggctgtggggctccgaccccttgacagagtctgggggtgaatgtttacagctcctgaagccccagtgggtgtgtgttacaggatgctctttcagtttgcctttagggggcttgtgttaaccagctcaattagaccctctaccttgtcgcacagacagcgagctttctgtatcctgggttcttgccttggtgtaccagaagaattggatcacacgtgggcttggagaatgagtgcaaagttttattgagtggaagtagccctcagcagatgagggacccagaagggaaatggttttcctctggagttaggccgcttggcggcccgggctcttttccgactgcccaggccaacctccgcatcgttctgcccgtgaatggcctgcggatgtgccagcgagctcctcttcttccacccttatgctcctctggacgtctggctgcctgtgtacctgcctgctagggtctggggttttcataggcacagtatgggggagtggcaggccagggtggtcttgggaaatgcaacatttgggctggaaggcaggagtgtcagtcctcacctaggtcggtgggcgtggagccctagcaagggaccacacactcctctacccagcacttcacttcgcccatccctatcatttaaagggaccacgctcttcccttcccagcactcccctatcatttctacactgtaaattttttttgtttatatttgtctcatctatcaggttgtgaattccttcacattaacttgcatggaattcatcttgttataatgtggtacctaaaaatcctagtactctggttcaaaaatatatgtttaacaaatgttcagtgaaagcgaatgaatgaatgaacgatgactcccacacacggaggaaccctgtcctcctgtaaggtacatgatttgaaggtcccaacaagtctatcttggaacaggcccagttgcgatgcccatacagttctcggactaacaaaaagtgtcacaccatccagatatgcttaatttggaagcagctgtaagcagactcccggccagctcaagtttcctcacctgggaagaggcgggaggctgtttaccgtacggaagcatagcggccgcctgcctgagttcgggagcgcgggttcctttccgggaaagaagcctaggccgttttccgtacagcagcatggcggccgccgacgggaggcggtcatagcatcacgcccgggggaagaggccgccgtaaaggaagctctgcttcctcttcttccttctcccgcctcccaccggctgtcgtaaaacggtgaatggagagcgagttgtgggggggaaaaagggaggacagggggcgcggagtcagagtggcgcagcaagtggccgcaggtggcgacggtggcggggggtggggtgtgaggtaatccaggggtcgcggaagaggaggctgagagggtcaaaagaaaactaaagctgcagtccggcctactgttccgggggccgcggagcccccacccggggagatggacctcaaccggatcatccaggcgctg

SEQ ID NO: 9226 - DNA, 2300 bp, Homo sapien
acagtgtatcaggatttcatttttgtatggctgaataatccattttatgtatgtacttcatttcgcttatccattcatctgttgggaaattgagttgtttgtaccttttggctattctgaataatgctgctatgaacatgggtgtgtaaatatctgtttgagtcctgctttcagttattttgggtatatacctagaaatggaattagtggatcatatgttaattctatactttttgaaaaggcagcatactgttttccacagggcgactgcaccattttgcattcccaccggcaatgcatgagggttccagttcctccgcatccttgccaacacttattttctgtctttttgataatagccctgctaatgggtataaaattttatggcattatggtttggatttacatttccctaatgactaatgatgatgagcatgttttcatgtgcttatttgccatttatcttctttggagagatgtctattcaagtcctttgcctgcaaaatagaagtttttgaatgtacaattttgctggataccacccttaagcattttctttgaaacttcccaaatgactcagtgtgtccttgtcttttaaggtatttaacgttaatgcacctctgcctccacgaaaagaacaagaaataaaagaatccccttattcacctggctacaatcaaagttttaccacagcaagtacacaaacaccaccccagtgccaactgccatctatacatgtagaacaaactgtccattctcaagagactggtaagatctttgcatatgatatttggaagacttagagggacagccaattgaatggacagcaagtctaggaagtctgtagtgacactttagaagtattttcctgaccagtaagcattatttctttacatgttcctccagtgttgagaaaaacctaatgcccttttttgtgttaagtttacctattaattttaatttttgtagagatagaacttagatgacggatttaaccttgaagtaggtttgtatttttaaatctatttgctttgattaccacagacagtgattgaggtagatgggcactatctggctgcttatatgaaggttttgaaaccattctgttaatccttttaacaaatggttatctgtccttttctatcttataataaaagattgaagatatgacttagtatgctcattgtactgtttgcttagagatgggaggctattttgatttttcatgctgttctaaatcatgaaagaataggtaactttgtactcatttcttaatttaaatttaagaagcacttgtagattttttgtattggtatttcagatccctattgagttttttaactgaagtcggagcaaatgaattgagcattctgagtacttggctaatcaagtgatgaagaggtagtaatatgaattctgggacctaggcatagatgacctgattctgttctcccctctactgttgaaagacagggcaggtgacttacgtaagggatatttttgtcaggtgccttctcagatattaattagaatccattttcttttactccctcatctggagtatttagcctgctttttaaaaattgtcgtaaagtatacataacataaaaattaccattttaatcatttttaactatatagttctgtggcattaagtacaaccaaactgttgtgtaattattaccactgtccacctccagaacttttcatctccccccaactgaaactttgtaatcatttaatactaactcctcctcctcctctccccccagcccctggcaaccaccattctactttctgattctgaaaatgactgctctaggtacctcatataagtggtatacaatatttgtgcttttgaaactagcttattttacttggcatgtcttaagggttcattcatgttgtagcatgggtcaaaattttcttccttttttaggctgaataatattccattatatatatgaattacgtatttgagtcatgtagatgaattatatacatgaatatatgtatctcctatttatttttaaaggcagcaaattgtattaatgattttgatatatattggcttttaagtataaagactattaccatttaactcttggaccctaaaatcgtttttcttaagcagcaaattatcatcctgatggaactattcaagtaagcaatggtagccttgccttttacccagcacagacgaatgtgtttcccagacctactcagccatttgtcaatagccggggatctgttagaggatgtactcgtggtgggagattaataaccaattcctatcggtc

SEQ ID NO: 9227 - DNA, 2300 bp, Homo sapien
tcaatccccagtctccttcctaaaaagcaacatatcataatgcctccttcaagaaggtcactgaaacatgatttctctgttttgtaacccttcattagtttccagttcacctattttattacttgggcttctgagaaccacatagaagcatttagataaaaggagtggattcactgacactttagatcttgctattgccagatttttatgggtgtctctctgctgtatttgaatacctgttgtgcgatagaattctttcctagccactcttttaattttctgttggttacagttgtcacaactttttttcctaatgtgctttctcccaatttttattttacatatgctatcagcttgatttttcactagaatttttggtgccattctgatttatgtagagcttattcttcctatttatatttcagcctgcctctttaggatgctgatagcacttagcatgaaagcacagttatactatgatctctggcagagctgtgcctacagtgttaaacgtacccggagctcaccttcccgtgaatgctatctactacagggccaagaatcagtgaacatgggatgagatgtgtagttttggtgaccaggcctggacaggcagtgtagctagctggctgcttgagtttgaatctcagctctgccacttaattgtagtatgatcttgggcaaatgtcttaacctttctttgccactgcttaattgtcaataaaatgagaatagtacctacctcacagattactgttaggattaaatatattaacacgtataaagtgtttagcagagtgcttgacacatgtgcgtgttcagtaagagtaacatattaggaaggccagggcccaagaaatataaagtgaacaaaatgtgccttttacaatattttgtattttcctgtgtctaggctacttcttctccagttacttgtagctcaaatgcttgcttggttactaccgatcaggcttcttctggatctgaaacagagtttatgacctcagagactcctgaggtaaaagaccaattgtcttaatttcttttgtatcttaaagaatagcagaaccagtttatcttatgaattacaggcatgattagttgaatgatgtaacatttatactttattaatgtattgctttctatagatattgtgatcttggaacttttacaggtaactttattgtagctttgccatataaatagatttaatatggtattgccttatctagtgcaataaatgtccatttttaatctaaaaaaatgaaaagtgtaggtagcattaagtcaagttttccactatatttacactgaaggacttttaggagaaaagtctcttatttgtataaatgaaagctcaataactttattttattaatattagcacttattgagttggaatgagttacaatcttgttttggctaactttgtcaaaaatattttcggtcagatgcagtggctcacacctgcaatcccagcactttgggaggccgaggcaggtggatcacttgaggtcaggagttcaagaccagcctggccaacatggtgaagccccatctctactaaaaatacaaaaattagctgggtgtggtggctcatgcctctagtcccaggtactcaggaggccgaggacagagaattgcttgaacccaggaggcgggggttgcagagattgtgccactgcacttcagcctgggtgacaaagtgatacttcatctcaaaaaaaataaataaataaaaacattttaacagtattatgtttgtgctttcaatttcaattctaagttacagtttttactaagtttgagtaaatccttgagatggacatagtaggatgaattttgaggagtaatttagcaactatcaggtattttttgttaactgttatagaagaatatgtattcattatagaatataagaaaatatagataatccttagtttttatggtgctggcttgatctgaatttaaattatctcattcctcattttaagaagaggaagaagtgattgttaccaagtaactcacagctgtctgcttcacaatctagttgagattggtttttggtattttttttaagcctttggatttataatctgttatgtcaagaacttgtggcttccttaggtaaggattacttaaattggatcggagttgttttctgttttaggtagctgacttagaaacctactaactaataagtctttaaaatagagaaaaattaacactaaacaactaatccaagttttttcttaaatccaattctgatgtataaattttgaataatattaggttcttaa

SEQ ID NO: 9228 - DNA, 2300 bp, Homo sapien
gctttaaacaagcaggttacgtgttggaaatattaaacattttctgtttcatttgtcaaaacaacggaataaaaatattcttcatagttacattatgcatgctgctgttgaaatactttaagagctagctattttaggtgagattaattccttatgtagtattaatgtttcttttcatagatgtgttaatagctgattttttagcttgttttccttgtgactttctgcagcagttgatattgcagtataactgctgcagtcgttggaaggtttaaccgtagtagaactagaaaatgttttaccacttacttttgtggtgttaggtgaagatttaagattgctaggtgaaagcgtggtagtcagccttgtaaagagacccaggagttaagcctagctacagaaaatgctgttgtaaagatctaaatccttcttcatttcctgagtcatgtagcctgtgaaacagactgcacgttgctttgctgtattacgtttctcttctgcttttggacaggtgaggttgagtgactatctggacctatgtgttgttaagtacttttgtgccaagacctagttagaccttaaagttgcttttaatggaggagtgtgaagagactctttagagtctggttgactcttttttttttttttttttaacctaagaaagtaaagaagggcaagttgctagtagcttctctgtagctctcaccatttatctttttaacgtatgcagttgatcacaagtgtggtaaggtgagtgtgccaggtcagcacaaattccccatcactgtgataaatgatcaaagcaggatctattgacggagcctccctcaggtggaggaactacatatatgtatgcttatgctctctagcttacctatagtacctctttaattttgaataccagatagtacgagtacttttgtttcaaccttctgggaaagaatttttccactaaagccaatacaggaggaacctaaagaatgcttttagagtaccatagtgggtccgggtgcagtggctcacacctgtaatccctgcgctttgggaggacaaggcaggtagatcacctgaggtcaggagtttgagactagcctggccaacatgatgaaaccccgtctctactaaaaatacaaaaagaattagccaggcgtggtggggggtgcctgtaatcccacctactcaggaggctgaggcaggagaatcgcttgaacccaggaggtggaggttgcagtgtgccgagatcgcgacactgcactccagcctgggcaacggagtgaaattctgtctcaaaaaaaaaaaaaaaaaaaaaaaaaaataccatagtgggtttatgtcattattatggggccaacaaatgcaatttatttttcataatttccttaagtatcaaatataatatgaaaaataacttcaagatgagcctactctatgataatgatagaaaagaattcttggtgtttctgtacttccaataggagtttctttttaggaaaatgccacataattcaacaggtaactgaactaatagtttaagcatgagattagagtaggacttcgtaacctctacaccactgacattttgtacaggataattcttcgttgtaaagggctgtcctgtgcattttaagatgtttggcagcatccctggcctctaaccacaagataccggtagcactcttcacctcccttccccctcccaagttgtgataaccaaaaatatccctagatattgccaggtatctttgggggacaaaattgttccctgttgagaagctactgtgttggggacacatgatttagtaggtaagtccccatgggttaagtagtctagttattaatagagtcattaagagaaaatagttttattactgcttaggttttgtaattccagactcatgtgattctgtgtattttttctcccctgactggaactcatctacagttgctgcatgccgtatagtaaaatgatagtcttgcagattgatagcttacttcaaggactttgtttcctagagacaagatctggcatttactttatttgcttctgaattttatgtcagactatggtagatacaagtttctcttttgtagctcaaactggaggattataaggatcgcctgaaaagtggagagcatcttaatccagaccagttggtaagtggcttatgatcttttagtaagacttgctggttttcttttcttaataaaactacatggatttagtgcgatcagtctttatagcacacacacacacagttaaaatccatagtttgttcaaaactgtttcagaagactttgtt

SEQ ID NO: 9229 - DNA, 2300 bp, Homo sapien
gttatactgcaatatcaactgctgcagaaagtcacaaggaaaacaagctaaaaaatcagctattaacacatctatgaaaagaaacattaatactacataaggaattaatctcacctaaaatagctagctcttaaagtatttcaacagcagcatgcataatgtaactatgaagaatatttttattccgttgttttgacaaatgaaacagaaaatgtttaatatttccaacacgtaacctgcttgtttaaagcagctaaacctaaggttagttaaatttttagtagagaacacctatgagctctgaaagaaaaatgtcagctccttaatctttaagatcatgcatctacaggactggaagaaaaaaagttaccttctttttctcgatgtttctaattttgtgtttaaggcatatgagtccattttcaatataggtctcatacgcttgggaaggagatgcagcagaactcagagtagactgcagggggctcaaggcccgctggctttccccatgctgactgtggttcacttggggcttggctgacttcatattcccctctctttcctcctctgaatggcctgaaggtgactggtaaccaaaaggggatgaaaagagttgcaccattgaaacagatgaggctgaaggaggtgggggaaagttaagtataaaattaggactagagggacacagccaggcaataacttccctggaaagtctagaccactcccttaaactcttttccacagaagtgagctcgaaacccaatgatgcttgagatacttgtacttccatcctacttttaaagtaattagtgccgctagccaataaggatagcctttacataggcaaaatctcccaatacggaggatgtttccagaaattcgattttccacatagggaggaagaactgcaacggcttcagagctcctttcttctcatgagggcagatcacattctaaataattcccacggccacgtgatgacaccaaaagaataagctttccacaccgggacctaaggctgagccactcaaacctctttacatgatccctcaccaccagccctaacctcaatcctgaacgtttggaagaaaatccaaactcacaacattcttttatagctctaagtgaaccagcagcttcttgaacaagaatgctaacttccccgattgctctggggcctacaaggcaatccatcactactggacatttgcagacaggtactctctcaacctgcaggaaccccgcgtttattctcagttgtttggtttagactagcccaaaaccgcttacacccaaccagtttaagagctcattctagcgagcccttcccgtgccctaatcagtggcccttgcgcacttacgtatccgtctctcgacctccaagcacccgaggtatccctttctccccccttaggagcatccccaaaccaaggacagaacaggccccatgcacgccagcgcgcaccccctcaagtctccgggggagcctgagcgaagagcacctctcccgagcggccacggagagccctgcaggcaccgacccccacccttcccacagccgccccgggtacgcagaagccgcttctgcaaggccccgggggaggctgacctgcggaaaacgcaccgaccgcggccctcgggagccccgccccgccccggggatgccaagccgcccctccacctcgcagcggcgccggccgcccagacctgcccaccctcgccgggtcagccgcctccctccgccgcgccgaccgaggccgccgcagcccgacttcacctccccaggcagccgaggccgccgctgccgcagcccgggcccgccttccaaagcctgggggaggcaggagcgctgcggaggtggaccggcgccaccccgcactcgcgtctcctcctcctgtctcctccctctcccctcccggtcctcgcccgcggcctctgcggcgccagagacccagccgactcagccgctcgcgcccaggcccgcccaccgcgccgcgcgtggcttttgtaggccgcgccccgccccggcccgctccgccctcggccgccccgccaccgcctccttccggtgctccttcccggctgcagctggccgccagcgcttgtcgggtgttagttccgggcccagcttgggctggtggtaggtcgggagagggcgcggtctcccagcctttgcgcagattgcggggcaccaggtggggccgaggcgacgccgaacgccggcaggccggaaaccgcgcagccccgctggacctcgctgattgccggcggcaccggtggtttcgcgaccttgaacaggt

SEQ ID NO: 9230 - DNA, 2300 bp, Homo sapien
attctgctcttacaggctgattccccggtaaggaaacggtgttttttccccatcctactatgaaagatgctatctgaggggcaaaggcgcatctgcatttcacgactacccactaggctacgacagcctcaagcatggcttatctggtagttccgcgaagggctcgctgccctcctggagctattggagtcacctgttcaaggtcgcgaaaccaccggtgccgccggcaatcagcgaggtccagcggggctgcgcggtttccggcctgccggcgttcggcgtcgcctcggccccacctggtgccccgcaatctgcgcaaaggctgggagaccgcgccctctcccgacctaccaccagcccaagctgggcccggaactaacacccgacaagcgctggcggccagctgcagccgggaaggagcaccggaaggaggcggtggcggggcggccgagggcggagcgggccggggcggggcgcggcctacaaaagccacgcgcggcgcggtgggcgggcctgggcgcgagcggctgagtcggctgggtctctggcgccgcagaggccgcgggcgaggaccgggaggggagagggaggagacaggaggaggagacgcgagtgcggggtggcgccggtccacctccgcagcgctcctgcctcccccaggctttggaaggcgggcccgggctgcggcagcggcggcctcggctgcctggggaggtgaagtcgggctgcggcggcctcggtcggcgcggcggagggaggcggctgacccggcgagggtgggcaggtctgggcggccggcgccgctgcgaggtggaggggcggcttggcatccccggggcggggcggggctcccgagggccgcggtcggtgcgttttccgcaggtcagcctcccccggggccttgcagaagcggcttctgcgtacccggggcggctgtgggaagggtgggggtcggtgcctgcagggctctccgtggccgctcgggagaggtgctcttcgctcaggctcccccggagacttgagggggtgcgcgctggcgtgcatggggcctgttctgtccttggtttggggatgctcctaaggggggagaaagggatacctcgggtgcttggaggtcgagagacggatacgtaagtgcgcaagggccactgattagggcacgggaagggctcgctagaatgagctcttaaactggttgggtgtaagcggttttgggctagtctaaaccaaacaactgagaataaacgcggggttcctgcaggttgagagagtacctgtctgcaaatgtccagtagtgatggattgccttgtaggccccagagcaatcggggaagttagcattcttgttcaagaagctgctggttcacttagagctataaaagaatgttgtgagtttggattttcttccaaacgttcaggattgaggttagggctggtggtgagggatcatgtaaagaggtttgagtggctcagccttaggtcccggtgtggaaagcttattcttttggtgtcatcacgtggccgtgggaattatttagaatgtgatctgccctcatgagaagaaaggagctctgaagccgttgcagttcttcctccctatgtggaaaatcgaatttctggaaacatcctccgtattgggagattttgcctatgtaaaggctatccttattggctagcggcactaattactttaaaagtaggatggaagtacaagtatctcaagcatcattgggtttcgagctcacttctgtggaaaagagtttaagggagtggtctagactttccagggaagttattgcctggctgtgtccctctagtcctaattttatacttaactttcccccacctccttcagcctcatctgtttcaatggtgcaactcttttcatccccttttggttaccagtcaccttcaggccattcagaggaggaaagagaggggaatatgaagtcagccaagccccaagtgaaccacagtcagcatggggaaagccagcgggccttgagccccctgcagtctactctgagttctgctgcatctccttcccaagcgtatgagacctatattgaaaatggactcatatgccttaaacacaaaattagaaacatcgagaaaaagaaggtaactttttttcttccagtcctgtagatgcatgatcttaaagattaaggagctgacatttttctttcagagctcataggtgttctctactaaaaatttaactaaccttaggtttagctgctttaaacaagcaggttacgtgttggaaatattaaacattttctgtttcatttgtcaaa

SEQ ID NO: 9231 - DNA, 2300 bp, Homo sapien
tcctttttgcctgaccgattagaaggcaaacatttctttctttctttctttttttgagatagagtcttgctctgtcacccaggctggagtgcagcggcacaatctcggctcactgcagcgtccgtctccgggtttcaagcgattctcctgccttagcctctgagtagccatgattacaggcacatgccgccatgctcggctaatttttgtatttttagtagagatggatattcaccacgctggccagcctggcctcgaactcccgacctcaggtgatccaccccgcctcggcctcccaaagtgctgggatcacaggcttgagccactgcgccggcagggggcaaacatttcatgattaatctgactgaaataccatttttaggttcatcattagctcggactacaactcaggctgtgctgtaactttgtgtcaactcattgatccaacagtgtgtccttcacattttttcttatggccactgttttttgtgttaccaaaggtgaaggcatagccttcctctcctcatgttcagcatcttctgcgtttctctgtttataaacaatgagaaaaagggaaaatctagtatttctctgaccctgaagaacacatatgggattcagagattcaaagttaaaatgcaacattagggtacattatgtcaccagggaccgaaaagaacacggataatagatgccaaaaaaatgtattaagtaatgttaaaattaatttgtgtgaagttgaccaaggcttttaaaactagacctttgtttccttgattcttcttctgaattttctgttcttttgctagtctcaatattttttatcagagcgtcagggacaatcaggacctaaaaaactccacttggtgtaataagtaaacacatgttggggcaaagtattgctgagtgtgtgtgtgtgtttcttatttggtatcagaaacaccttcctttcctcaataaacttttacatatttccagacttttctcttaattttatgtaaccttacaaagattttttacagctttctctgcgtgccagtcaattaatgtgtgtcacatgaacaaataatacggcttgaataaactcaatcctattattgcaggttgcgaagtcacctactccgtttttatggcgatgctgatttggggcattctgctcttacaggctgattccccggtaaggaaacggtgttttttccccatcctactatgaaagatgctatctgaggggcaaaggcgcatctgcatttcacgactacccactaggctacgacagcctcaagcatggcttatctggtagttccgcgaagggctcgctgccctcctggagctattggagtcacctgttcaaggtcgcgaaaccaccggtgccgccggcaatcagcgaggtccagcggggctgcgcggtttccggcctgccggcgttcggcgtcgcctcggccccacctggtgccccgcaatctgcgcaaaggctgggagaccgcgccctctcccgacctaccaccagcccaagctgggcccggaactaacacccgacaagcgctggcggccagctgcagccgggaaggagcaccggaaggaggcggtggcggggcggccgagggcggagcgggccggggcggggcgcggcctacaaaagccacgcgcggcgcggtgggcgggcctgggcgcgagcggctgagtcggctgggtctctggcgccgcagaggccgcgggcgaggaccgggaggggagagggaggagacaggaggaggagacgcgagtgcggggtggcgccggtccacctccgcagcgctcctgcctcccccaggctttggaaggcgggcccgggctgcggcagcggcggcctcggctgcctggggaggtgaagtcgggctgcggcggcctcggtcggcgcggcggagggaggcggctgacccggcgagggtgggcaggtctgggcggccggcgccgctgcgaggtggaggggcggcttggcatccccggggcggggcggggctcccgagggccgcggtcggtgcgttttccgcaggtcagcctcccccggggccttgcagaagcggcttctgcgtacccggggcggctgtgggaagggtgggggtcggtgcctgcagggctctccgtggccgctcgggagaggtgctcttcgctcaggctcccccggagacttgagggggtgcgcgctggcgtgcatggggcctgttctgtccttggtttggggatgctcctaaggggggagaaagggatacctcgggtgcttggaggtcgagagacggatacgtaagtgcgcaagggccact

SEQ ID NO: 9232 - DNA, 2300 bp, Homo sapien
tggtgaaaccccatctctactaaaaaaataccaaaaaattagccaggcgtggtggtgggtgcctgtagtcccagctacttgggaggctgaggcaggagaaaggcttgaacccaggaggcggagcttgcagtgagctgagatggcaccactgcgctccagcctgggtgacagagcgagactctgtcaaaaaaaaaaaaaagggtagagtaagaagaaagaagagtggaagattgcagacaaatatggccagcaagcatctctctccagccctctctggagccacgctgtgcccctgctcatgactttcagttgcttcactatgcaatgaaagtcaaagcccagttcccatgccacacacagaggagtccctatctccttttctggcatcttttctcacattcctgccacacagattctccactctagccacataccttatcctgtcccacccaaggaccttggcttctaccatccggaagtcttctgccaaccccagggctgtccaaatgccttttctttttcttttctctttttttttttttttttttttggagacagagttttgctctcgttgcccaggctggagtgcagtggcgccatcttggctgactgcaacctccgcctcctgggttcaagcgattctcctgcctcagcctcccaagtagttgggattacaggtacccaccaccacgcccagctaattttttgtattttttttagcagagacagggtttcatcgtgttggccaggctggccaggctggtctggaactcctgaagttaggtgatccacccacctcagcccctcaaagtgctgggattacaggcgttatccactgcgccccaccccagatgccttttctatgaagtatatcccagttggaagtaatttttgtttaccctggatttctgtacattcactgattgtgcaaagagcttgccacaggcggccttgcaagatagttctctaccttcaagccttacttcctccgaaatgagttaggtcccatgacattagagccttcgggatatttctgtacagttctagttcctagcatagcgccttgtattctttaggtacctgacaaatggccaccaaccctccaccggagaggactttttaccaagcctgcaggaagggccagctaggcaggcgtctccctgctttgcccaacagtgaaagtcacagcacatttctcaatattattcacgttaaaaacatctttttcctgctaaatagacacactctccaccctcttttagtcaatcttccacaaaattagataaggagaaataaccctttgtttcacatccgctgactcagatacgagcattattcaactgggcgggggtggcagtggatgggagggggctgagcaaactacaagtggaggaagaagaggacagcctaggagagggagggcagaagaaaggagagcacattgtgcaggggcacagtgttttgctgctcctttttttctttcttttcttaatatggtcctggctcacagcaaggccactacctgacaagcagatgagtcacttcctatgggcacagcgggggtacaacttgatagctacaaaaccagacaacctctcgccatgcgctcaccctgttcccagacccgggtggtggtctggggggttggaaggggcgggaagggcgctgtcttaagaatcatcctcacatctcagggcttcgcccctcgagggaggtgacccttggccaccctctgcgcagttctccctgaaaggtcatgccacgtcttagcactctggtccctgcgcccctgcaggcctcgcggatcccccacttgtctcgacgcaggggacgcccacttgtctgacgcaggggacgtggctgaagtcagtcgggccgcccgcttgctgcacggcagccgtgggactggcacaggctcctcggcagcattatgggcagctggtagagcggccacttctgagagccggatgggccttccgaggtcgggccgtgccccgctgggcagcgcagagggggtgtgtagggcacgcgacttggagccaggtccagacccatcctggctcctctcagggctccttcccctgcccccattccaccccagccctgctggctgtcccgcaggacccagcgccgcggtagccttctctgaactgcggctcaggcggaggtgtcactcctgcctccagcccaggagggcaggtcaggttatgcaacgcgtgccgcgcgatctccccccacctccaacccccttttctcccgggtccacaccgcagttcccaccgctccgggtgtcctcccca

SEQ ID NO: 9233 - DNA, 2300 bp, Homo sapien
gctgaaatgatattttagatatactgtgttaaataaaatatatcattacaattactttcacctgtttctttatattgatttttttttttaaacgtggctcacggaaaatttttaattacatattatatttccattggttctccactgtaaacgtttaatgttactggggatactgctggagagggactaccctagcccagagcttcattcatcactcaccctctcctactgctagaaagtcactccaggccgttttccaaccctctctttcctcattgctgttttaatgttattaactttggtgaatactgacctcccctcacccttaccctcttccagcattctcccctcctcgggcctactccactcttctctcttccatccggcttttgaaaatccatcttctactacgaataagcttcctcttcgctccccattccccaggctctttccttcacaccaccttctctgagtctttctaaccatccctgtctgtttaaactgctccgttagaggccaagttttgtttcctgcgccctttctcagtgtccctgtacctccggttggatttctaggaaacagactctgcacagagatggagatggtatgtgggaggtctcctgggacgtgctcttgggaacaacaccttgagagagtgagggaaacaggattcggcagagaatgaactttaactgtgctgctttccacagaggcctcggcggatcccttgggaagctatggagctggggtggcccttcagggccctccgtaatggaagcaaagaggtgaacctttgtatctccccatcaaccaattggatccgagatacagatgccccgccccaaggagtggcaacctggtttatataagccaccactcaaatagttatcttgaactagcccagagatctccttctttctaaatctaaacctattttcttgggcgccctcctccgtggtgtccctgcagcccgggccccggcccccattgaacctccctcttctcctgagtcctgacaccccgcacagtcctgaccttcccttatggtttctcctgatagtttccgttcctttcatgggctccttctcggtagacctagattctgtcttcagccctgttctctgtaccttttctaccctctccctccacctcttgtgtcggcccaacttctttccagatgattccaaaattgacatcccttgcctcagtctctcctatgaactccagaatcacccttccaattgcatttgctggatatctgcccctggaagaaggtggcctgcttctccaatccaacttgctccacactaaactcagtcacatcactccaggttctcctccagacttccacaatgttacagccccagtgtgctcctcctacaccacacagtctgtagactctcctttgctgcagcttccgcattcatcccccagttaaggtcctcatctcacgggactattggaatcatctccttcctgtgtggccccccgcgaagcccttctcagcagccagctggggtatttagaacgttggtgctcccggtacagtggctttgtcagcgtcccctgcctccagtggcttccctgatctagcaacctggtaaatgggtaatcttcctcactgcagctaagtttcaaaagaacacggttggataagcacaaggcccttgttactttgggaaatagataatccatgccccactgttagggccagtcccgttagggccagctttgcaccttcacagggactcagcaggaacagatgggctctactctctgttattcctttttgcttcagattagagagaccttgattctccccggggcccaggaaatgtaaagctgatgctccacaggactctaagagggacacggcagtgatgggggctggtgaggaagggggatggagaacctctctcttatcagacaggcttgtccctagggtccctggaaacccccaaaggccaacctctcccaggggccgacaaacgtaaagggcagggagacctaagcggggagctgcggagcgcggggagtttgaaagccgctccaccgccctactagtccgtccttttgccccgccccccttagggatccccccggcaaccgcacagctgcctcggactctgacttaattccctccgcgtgctctgaatcgcagagaggcaaacccccaaacaaagagccggcagctcgcgtgcggggctcccgggcgcgtcctgccggctgggctgggagagccggcgccggggcgtcgcggccgagcgctgggcaggcggggactagagggccggcaggaa

SEQ ID NO: 9234 - DNA, 2300 bp, Homo sapien
ctttgcgggcgtacttgtcatggtgaccggcttcctgggcttcggtgccatcctctgggagcggaagggctgcctctccacggtcagtgcccgccctgtgctctgcagggatggggagccctgcaccacccagtcaggtttccagcaagtgagaggggccccagccctggagtgggaggggctgaggctgtgggagtgcccgagaaggggtggctgctcctgggtctggggtttgccacggtctccaggttcttaggacccaagcaagcaggcgtctcagtagctgcagtggcagctccttctccgtatctccatctctgtctcctctcactccccttcttcctcttcctcttcctccttctatttcttcttctcctattcttcctggtcctctccttctccttctcctattctgtacccttcccctcctccttatcccgtttccttcttattctctttttcctcctacttccccttctcctctccctctccctcttcctcctcctcttcctcttcctctttctaggtttttttatggcaattttcaaagatatgcaaaaataaagagtgtttttcatgaagctccatcttcccttcacccagagttcaacaattaccatctcatagccgatcttggttccgtccactctctcacctgcaccctgcccacttcctaaccccagggtgattctgaaacagtcccagacagcatgtcatctgttagagtttcagtgtgtatctctaaacttaaggaccctcttctagaaaacatgataacattaccattatcacactttaaaacaattaacagtcattccttaatatcatgaaataaccaagcagtttcacatcttcccagttgacccataaactgttgttgttgtgtttacatttgagttagaatctaaattaggctcgtgtgttaaaattggttgcttatctcctacgtctcctaaagtgaaggcccccagagtttgggttttgagctctttttcagcaggtgggacaggtgtgctgagagccaaccatgccaccacccacccccacatggggcctaccatgaggatttccagcagggtgatgcaggtcggtcaactgaggtccttgagagccacgtagcacatcccaggtctgaccaacatagctggatgaaggcacgtgacgtgactgaataaaaccaggcatgtagcgcagcccggggatgttccctctgtgtggcactgaccagccatgaggcttatggggatcagtgcagttgggcccagagaaagaacccctctcctctgcagtgtcggcaagcctgtttgtgtcctgtccggctctgcacctgttagcaagcagggccttcagcctagcctcaggcttcaggctgagcctctggccctcacgcctggaggtctgcccatgagcaggctgccaagccacgtgctctcacctgcctccttccttccgtcgggtcatcttgtttagagaggacaggactcacctctggacagcccaagaaagaatacagaagcccccaccgagcgccttcctctgacccagagccatctgtcctgcttctgtggagccactgaaggccagtggtcccctgcagcactgggaaacaggccctgcattcctcccagagcccaattagaacacaaatggccactattcactagagccacctccctctatcctcactacagcaacctgcaaagtcccggtagtctgaactctgtgccgagcaagcgctgcacttgacattcatgcacatcaactcactcagtcctcgccctgccccaaagagcagcaactcttactctgtgtatggacggggaagaaacggagagcagaggcaggtgaagcaatttgcccagagtcaccttgcagttgtgttcttttaggtgatggtcagtcaggtgtggccacaagagggggcacaggagaggcacaggacaagagagtttaccagactcacaggtcctagaccaagcttgaccagcccgtagcccacgggccgcatgcagcccaggacagctttgaatgcggcccaacacaaatccgtaaactttctcaaaacattatgagattttttttgtgattttttttttttttagctgatcagctgtcgttactgtgttttatgtgtggcccagggaagccaaaagatcagacaccctgtcctagacagattcactgcacacaacaacaggaggtgggggtcacacgggcggagagccaaagactagggctcccccaagcaggcagggaacagagagtgggtgagaccctttccttgggggtcagggtagagc

SEQ ID NO: 9235 - DNA, 2300 bp, Homo sapien
aggcaccatgtggctgggcctccaagccgggcccaaccccatctgccacctccagcacctgcggttagctggccttgtgttgtctctgtgtgccccctgttggctgctggagccatccgtgctggtttctcagtgtcctctgtcaggagggagatggcaatgcctattcaggaaccagactgggtggcatcctgtaccctccacatgcttcagcgtggtgttcacgtgtgtgtgtgtgtgcaagtgtgtgtgtgtgcatgtggacgcagtgatgagggtctggcccacacacctctgccccttactgtgcctgtcctgggaggctcgctgggaacacccagctcacgcaggagcctgtctgctggggagtgtggcccctccagtcctcccccagcaggagacgtacattgcaggcgatgcagacatggtttccagcacaaacctgtgccggtcaaacagctcccttctggcctccctcttagcacagataagatccagaaaatcccacaggaaaatcatcaaaccatgaggtagggaaacctgcatgggtggaacggcatgacggccgcctgcgtaaagctagcgggagatgagataacctcctaagccgcctttcagcctgaggccccaggtggattaacaccaagtctgcaggctgaaagcagtgttcacactccacgctgtcctccaggttgggagggatggagaggaggaaggaggggaagaggatgggccccttccacactacctcccccagctagctgtcagagacagtacaggacacacgcatctccaccagcctgctctcctcccactggatagagctccacctgcatccaggtttgcaccggcaaggtcagggcagcagcagctgctaggaaagtcaggacactgtttcaatacttaggagagccaccttcaccccaggtatcacgggacagtcatggggctgctttagcccagtgccccctcctgtgtgcagagagccaagatccaacaacatgtcatcatcattatcaggatcataatcacattaccctcaatgcatccttgggtgggagggaggagaggaagaggaggaagaaggcagaggagggcccatgaagagcaaggagggagaataaagctcctctgcattctggaagtgggagaagtgagaaggcggtgtgcagggtgatcctcccaggcctgtgtctgctttggaccagatgctccagccccttgttcagctgtggataccgacagaagggctggcagacaggacgcctggggcctgagcttggtgctgcattctacactgattgacagggtgagctcaccagctcttattctatgctgactgacagggtgacagctcaggaggctcttcccagagtctcagtttcccccatggctcctgtacaccagccagagcatcgaagatggacctgagttttgctctagagtctaaggacagcaaaacacaggcagactctttcctagagagacagtccacttcagacagctctgatgagggagtggaaacattactcttagggcctaattaaatcaggccatctctggagaagatctaggaccacagaccagcagcatcaactgggagcttgctaggaatgcagactctcaggccgccactaggcctgaagaattgtaataaggaggtccccagatgattcatgcccattaaagtgtgcaaagccctgctcttggatagtagatggcagaatgtggttcccccaggcacaccaccatcacctgggagcttgtcagaaatgcagaacctcaggtcccaccctgacattttgagcagttttgagcaggaatctgccctttgcccaggccccagggtattcgagtgagcagcactgctccagggccctgagggccggcagcttccaggagttctgatttctctttgctcctctgctctctccacctggcagatctgcgggatggttctcacctgctgcttgcaccagaggctccagcggcatttttactaatggccaaccacctcctcttccaactgcccctcaagacaacatgtggccacatgccatctgcaaggcctgcagagttagcaccagctccactagggccatagatgccccctcctttgtgcctagctcctgcgaatccaccgagtgcctgagaccatagcttctgtgcccacccaggcagagaccctcggccccctctcctccatttctgagcccccatggccagatcctgggcagggaaatgatcctttcaggagacaaccagagcccctcaccaggaacgggggcacccgtggacta

SEQ ID NO: 9236 - DNA, 2300 bp, Homo sapien
gagttcctaagtctagtggggacttggagaacctttatgtctagctaagggattgtaaatacaccaatgggcactctgtatctagctcaaggtttgcaaacacaccaatcagcaccctgtgtctagctcagggtttgtgaatgaaccaatcggcactgtgtatctagttaatctggtggggacttggagaacctttgtctagctaagggattgtgaatgcaccaatcggcactctgtatctagctcaaagtttgtaaatgcaccaatcagcactctgtgtctagctcacggtttgtaaatacaccaatcgacactgtgtatctcgctaatctagtggtgacctggagaacttttgtgtctagctcagggattataaacgcaccaatcagcaccctgtcaaaacggctcaatcagctctctgtaaaacagaccaatcagctctctctaaaatggaccaatcagcaggatgtgggtggggccagagaagagaataaacacaggctgccctaagacagcagcagtaactcactaggattttcttaccacagtatggaagctttgttctttttgttttttaggtctgcactgcctttatgagctgtaacactcactgcaaatgtctgcagcttcactcctgaagctagtgagatacacgaacccaccggggtgaactagcaactccagtacatgccgtcttaaaagctgtaacactcaggcgaaggtctgcagcttcactcctgagccagcaagaccacaaacccaccagaaggaaaaaactccaaacccatcggaacatctgagggaacaaactccagacacaccgcctttaaaaactaacaccgcgagggtctgcagcttcagtcttgcgttagtgagaccaagaacccatcaattctggacacactatcaactttgtttctccaagggtgcttcttaaactggatgatgcacaccctaggagtgtgtgtgtaggatggggtttgaagcagtagggtaaaaaacctagcatacattctattccagaggtgtcaatttaccagacaacagttattttaaaacttttttatgcaaaaacatgttatagggtggaatgcaacatttttatgggcctgtgggccatttgtatacatctttggagaaatggctatttaagtactctgcccattaattctaaacttaaaactaagacttcaaagtccctctaaggattttgctgggccacatcccaagaccctgaagggtattacttactcgccctctccaaactgccgaagtcggaagcaggtgacaaaaaagctgaccctggaatcaccttttgtaaatttcccacctccaagcttttcgatagtttgtaacactggctcctctccccaaaagcctttccttcaagtcccagcaactctccctgaccctgctgggaaggcgcaccaattacctgtcattccaggaaagctcatagcataagatgatcccattggtcatctcccagaaccagactttctgaaaagtcctcaaggaccagctagtccaatccctcactgaataaaggagaagcaaagtctagggaggtgaggtgattcgttgtcctcctaattagcaggtgagctcctggcagggctggggtttcatcttctgggctctctgcaaggtcgtgcccggcacgggccaggaacaatttcataaactcgtcatctagacggcctttgactgacaccatctctccgtgtggaggagccgctggggtgcacggggcaggtgtcgtccgtttcaaaggtaaaataacccagctgcagacctccagaggccgactagagccggggtcagaaaacaggttttccctctcggggacagcgcccaggggaccggcattagaacatcggctgatgtttcatctggtcagggaaccatccagcgcttagtacacctggcgctaatcggcggggattaatctcacaccccgcagctggcggaaagcagcgggaggaggcacctagccctggggttgagatcccagttcccgcgtgcgcaaaccacgcccctgtagattctcgctgctgcgtgttcgcgcgcgtcccggagtgcgcatgcgcagcggcgggggttgttccggctgcctttcactgaggggacccgccagtttctaactcagtggcgtttgccctgattcccggggcctggctttcagcgtagcaattctgccggcgaagaaggtgagcgcagtgctgtgtggcagcagagctccttaggacgaggagcagcgggacgaggaagggcagactggtgaaatcgcaaactgggcg

SEQ ID NO: 9237 - DNA, 2300 bp, Homo sapien
tggacagtggtcaaacaccacccccactcctcaccccctagcttgctctaagtcacttttaaaaaatcacattactctgtatttaatttattcatagctcttagcaccatctgaacctatttattcttcctcactggaatatacgttccataaatagaggaaccttgtctgtcttgctcttctctggctccaggactcagaactaggtgcttcgacacctcataggcattcaacaaaaatctgatgaacgaatgagtagccagccagacatcggggctgtaagtgaaggtttctcttccgaggctgggtaacggaggtcccatgacttgaatacctattagttaaatggccagttctttaatggtttcaaaccgttttcagataaccccacaaaaaccctgtgtggtatttttataagctctattttatagagaaagaaactgagactcagtaaacttatatgacttgcccaaggtcactcagcaagtgcttgaactcaggatttgaaccacatctgccagacccccaagccacctgaaactttctatctcctcacttttcctcccaccaggataagtgggataaaaaagacagacttggttaccaaactctagaatgacaacactaaacaatacagaagaaacgtaagtattatttcacttccccatcagtggtaattatggatctcattattccagaagcagcacaggctaaatcatagaggtttagataaatctgagtataacggattcactaagccctattaaaaacatttgcagtgacttgttcagccctcttcaggttggctgtgtggaggacaaccatcacctcccagtgccaaggcacacaccaggacagcaaagctcacgctcataaaacgaggttagagttgtgaaagcacttcaggaacatattagttcttaacgtgttcattttcttcagtccccaattatcactcattactgagtacagactattgttgtgggctcagttgtgtcctccccacattgatcttggacatcccaagcctctgggactgtgagaaaacacatttctgtgtctaagccacccagtttatggtattttgtcatggcagccggggctgaccaagacaactatgtggcaggtactatctaccgtatggccctaaaatgttttaacttcacacacctggaaagcaccacagccccaagaaaaaagcttttccgcactgctgttaagccagggccacacactgcagtactgcggtgctccaccagctggaggatggcctggcccataatacccgcattcccaccttgctctggccctgtgtcccctccaacgtgcatcctgagctcgcaccctgtgtggaacccaaacagctgcttatcagcatttaagtccatttttatgacacttccgtcaacaatctggtcaagtgcactcattcctggcctccgtactgtaccctgctccgcctcgattcccgccctgggggaagctagactcatgcagctaactttatcggctctgggctctgattgccaagtttaggatcccagctgtatccttgctaaagttagcatcgctggggctcagtttccgtaagagacaggtgggttacaagcgctcactcactgttgcagtgtcttatctacgtaagataatccatgaaaagctcaacacagctgggccaaatctaagacccagacacgcggctgctgttaatgcccacttctgcgcaccgcccagttccaccgcaggcacaaccttcctaggcctacccgtccccacacaggggttcccgcttgtcaatcacgctggcccggccctccacttccggaatgttttcccgctccggacgggccacccacctttgcaaataggggtccggcgccggaacagacgcccagtttgcgatttcaccagtctgcccttcctcgtcccgctgctcctcgtcctaaggagctctgctgccacacagcactgcgctcaccttcttcgccggcagaattgctacgctgaaagccaggccccgggaatcagggcaaacgccactgagttagaaactggcgggtcccctcagtgaaaggcagccggaacaacccccgccgctgcgcatgcgcactccgggacgcgcgcgaacacgcagcagcgagaatctacaggggcgtggtttgcgcacgcgggaactgggatctcaaccccagggctaggtgcctcctcccgctgctttccgccagctgcggggtgtgagattaatccccgccgattagcgccaggtgtactaagcgctggatggttccctgaccagatga

SEQ ID NO: 9238 - DNA, 2300 bp, Homo sapien
gacatggaggggacagttaatagacatgaaaacaaatagcacctatgtgaagtcagcatgtttgcctacaaggaaaacaaaatggtgatgtggatggggtggggggctgcacctgatgatgagtcccgtgtgtcctgtgacatcctggccaccacatctgtcggagggtaactgcaagaccagagaccctccatggatattcctgaaggttcatccccggccttcacagtctgtctgcagggcgccttctgatgccacctccagccgccatccaccagacgccagcttccccgctgccctgaacttcctccagcgcaccaggccttcctctgtcctgtctgaggatttgctcatgcaacgtgctgtggccaaacaccctgccctcctcccttggcagatgtcttcctctcctttaaggcctggctcaggtgtcgtcttggtggcttcgggtgtcagctgctctgttttgctcatgcacctgcttgtgcttctgttgttgcctcctctccctggctgggctcgagctgcttcagggcaggaaccacgtctttatagtttgatgttcccagagctgacccagtgtttggcataggggtgtgctcaataaaatcgagttgacatgaatgagcagatgctgcctcgttgcagtctggtagtgtaattccaggctgcgcatgtgaacttcgacttctgcccctgcccagggcagagaccaccgtgttgctttatgcctcgctggtgagagggggtcataaacagtttgtgctccatgaacccttcctgcccgcctccgaggtcatgtttctgctccctctcttctcccttagagcccgtggggacaaggcagagaacttgagtggagatggaggtggtgaatattaaaggaacaaagtgctccttcaggtctgggcaagagccatggatcctgtaggtcagcttctggggcttcccatgccctcacgtttcaggagataacgtgagcctcggaggacctgagttctgaatagaaaatttttgctcttcatttcttcacacacccagcctctcagtgagctcctgctggctttgtccagcatgcgacataagattgaatccaagccttttaagatagagccgcctgctctttagtgaccatgaagccaagcctgtaataattactcttctgatagcccaagacaattgtattctgttttgttagaaaggaatttcgaggtgaacaaaaatgttttctttttatgtgatgttgccataggtagcgtgtgcctgtcagatggttttgtgttttctgaggagcatagactagtagagctagctcagcttcaggccatgggatgcagggctggcttccctgccaacgcctggcgctgatggattcttcccgcattgctgggaagggcagactgaggcactgacacaagaagagttgtagctggtcataagtgacagcatcctctgttcactcgattggtcagttgtagcttcatccaggagatggtcatggggttcctgctgcataccaagctctaggtgaggccacggggactcagcagaaacaaggccgacctgggtcctcccttgtggacatgacagtctggggagatagaccgagaggaagcgattttgaatgagatgggtgtgaagagcaggggccatgaatctgtgtcagagcagccaggcctaccagggaaggtcaaagaaggcttcctggaggaggtgatgtttctgctgctatctcagagttgactgggagctggtgaggggagacaacattccaggcacagaacatccgaaggcctgagatgatgaagagcaaatatccgccctggggcctcagaggggtccagcttgctggagggagggcagagaggagagcagcctgccatgagtcccgaggcttccgactcaagacttgggttgggggtgctgagcccctttctcctttttacatttccctacccacagacctgagcggccatgggaggttggggttggcatttgcctgggggagtttctgagcgagcagcacctgctaccttggtggaacccattgctgggaatggccagggctcagcaccagcgctcagcagatgctcagtgcgttttgctgagtttgctgagggaagactgttttctgttctctctcacacacacagagtggatgaggatgaggatgacctggaggaagaacacataactaaggtaacacaagtgtcctcagctggtgctgtgctgggggtataggctgggctgtgcacccctggggaggaggctggagtcacttggctacttctcaccctcct

SEQ ID NO: 9239 - DNA, 2300 bp, Homo sapien
agcccaagacaattgtattctgttttgttagaaaggaatttcgaggtgaacaaaaatgttttctttttatgtgatgttgccataggtagcgtgtgcctgtcagatggttttgtgttttctgaggagcatagactagtagagctagctcagcttcaggccatgggatgcagggctggcttccctgccaacgcctggcgctgatggattcttcccgcattgctgggaagggcagactgaggcactgacacaagaagagttgtagctggtcataagtgacagcatcctctgttcactcgattggtcagttgtagcttcatccaggagatggtcatggggttcctgctgcataccaagctctaggtgaggccacggggactcagcagaaacaaggccgacctgggtcctcccttgtggacatgacagtctggggagatagaccgagaggaagcgattttgaatgagatgggtgtgaagagcaggggccatgaatctgtgtcagagcagccaggcctaccagggaaggtcaaagaaggcttcctggaggaggtgatgtttctgctgctatctcagagttgactgggagctggtgaggggagacaacattccaggcacagaacatccgaaggcctgagatgatgaagagcaaatatccgccctggggcctcagaggggtccagcttgctggagggagggcagagaggagagcagcctgccatgagtcccgaggcttccgactcaagacttgggttgggggtgctgagcccctttctcctttttacatttccctacccacagacctgagcggccatgggaggttggggttggcatttgcctgggggagtttctgagcgagcagcacctgctaccttggtggaacccattgctgggaatggccagggctcagcaccagcgctcagcagatgctcagtgcgttttgctgagtttgctgagggaagactgttttctgttctctctcacacacacagagtggatgaggatgaggatgacctggaggaagaacacataactaaggtaacacaagtgtcctcagctggtgctgtgctgggggtataggctgggctgtgcacccctggggaggaggctggagtcacttggctacttctcaccctcctctccacaaaggaggagcttccagcacttggactccgttgcttcttgcacacaaccctggtcctaagttgctcccttggccagctgcagtggaccctggagtcctctcctggggtcagggcctggggagtcctctcctggggagacctttcctgggaacagggacctgaggagacctctcttgagtttggggcctggggagacatctcctgggttcggggcctggggagacctctcctgggggcagggccatgcttgccaccccagggcatcgaggaacagctgttctgggctgaaatctgggtgttttctgtccctgctgggtggtacgggtaggacagacatgagtcccctgccctttgggtctctcatggtgtgcttctccctttgtctgtgttcccatttgcatggagggctatgggttgtgtatggtctgacatttcccatttggtttcattgatttatgacttgttttctgtcggaagtaggtattttctttgtattttctttttttctcccttcactcttgccttagaggagtagagagagggtattctggtcagccttcctttttccctttggggatgtgtgtgacacactccctcccctcccaccaacaacccaccctccccaagtggggaccctttgccacgggagatggtcacccatgtccaaagattggccaaccccccaaaagcggttgattagaggctggatatgactcgtggaaggagctgcctttggggcattcccttgaacttctggagctgtgggtgacttgggaatccctgggtccctcgatagatgcctgacatgggacattgctgtcctgcctcggctttgtgcattgggagccactccctttccctcagcctctcaggccctggcgtgccttgatgttagagaatgctgtgggatgttttggttctctctttgaagcgcctttctttctctctgctagatttattactgtagtcggacacactcccagctggcccagtttgtgcatgaggtgaagaagagcccctttggcaaggatgttcggctggtctcccttggctcccggcaggtaaacagtagccagtatttccaccaggggccatcctgctcctttcgccacaactttgtcctgctcgtccaggccttgggagacgctgggtctgtgacag

SEQ ID NO: 9240 - DNA, 2300 bp, Homo sapien
ggccagggttgataatgactgtgccagatttgctggatttcctttgctgttcctgcacatagtttaaacgagactgccagcactgggtatcagtcaccatttttctttttgttagtttgccatcagccttttctttgacctcttctttcagtttgtgtgtacttgctgtctcttagcccagacttctcgcttcctttctgctgggcctctgaggggtcatggggccgtgacgctgtggccttggtctacaggtgtctgacttccggcagcagctgctggcctgtgccggggtggaagctgagcgcgtggtggagttttcctgtggtgagaagctgtgcccagggtggggcaggctagaggtcaggttctggcccccgttttctgtgggtaatacctcatactgcgaccaggcacaggggcggaggagaccccggggtgggagcctcacccttcgtgcgctcgcccaggctctcctgctttgctccctgctgcctgctgcccagtgtgactggtgatggtgggcgggtgagcgctgtcagtcgctgttcctgtgctggatgatggggcagggaaatgccctctctgcagtgtcttgcagcacacctgcatctccagttttcggcccctccctggctcttaccaggtcacgtgatccctccagacaacatcctgcccctcgtcatctgcagcgggatctccaaccagccgctggaattcacgttccagaaaagagagctgcctcagatggtcagtcccagccagctcgccgcaccacagcctggcctcaggcagcaaagggttttctggggcaggggcgctctggcccaccctgagtgttttcagtgttggggaaattgcacagggacacccgcttagagccacacagaatgagcggcgtcgatctagatgcttatggaggaaggtctgagcttccccgcccctcacgccttaggctgcgaaatatgtattcataaaacctccaggcatcctctgaggacgcctcacacaggagaaagctgctagttccctttggctctcttgccctttggttatatctgcccctgccgggggtagggatgtggggcttgggggcatctcctgtggtgtgcctggggtgtgcagcccctgattgtcgttgtggtgcccatcaggaccctggacagaagaagggaggactcagtgccagggcaatagggaggccccctagggacgctagtgctgtgacatgtgtcagaaaggcgcagtcagcagcagcggctgggtgtgtttggtgggaggtggcacctaccaccccgtggttcccacccaggggagccaagtcctcttccttggctgtagtcctgccgagggtctctcctcagttttgagtctcaaggtgaagacgcggtttgtgggtggctgaggggttgctccatgggggctccctccctccctcctttccttccttagatggacgaggtgggtcgcattctctgtaacctgtgcggtgtggttcctggaggggtggtctgtttcttcccctcctacgagtacctgcgccaggtccatgcccactgggagaagggtggcctgctgggccgtctggctgccaggaagaaggtgagtggcctgtcggcagccttcccacttgtgaggacagtgccactgagtcctcctgggagctctcgtgctcatcgggtcaggacaggcttctggctcctcatccccaccgctcccagtccctgactacagaggatttcccccaaagtccctggctgtgaggttctccagtcccctggccagaaaacacaaggccacgagcagactcgagacctggcaccctgaacctgtctctgggaaatgtcctctgtctttctcagatattccaggaacctaagagcgcacaccaggtggagcaggtgctgctggcatattccaggtgcatccaggtgcgggcgtcatgctgggcttgggtctgagatcgtgtgggggtggcagctggaaacgttgtgggtgtcatccaagttttggctcagcaactcagcgtctgggtttctcctacaggcctgtggccaggagagaggccaggtgacaggggccctgctcctctctgtggttggaggaaagatgagtgaagggatcaacttctctgacaacctaggccggtaagtagtggttctgctcgtctcctgggccgtgatacatggccggccctcactcccagcagctgggcccctgcctgctctctgctgccattagagcccacagctgggctgcgactgctcagaccagccagctggagggaggggctcagcagctct

SEQ ID NO: 9241 - DNA, 2300 bp, Homo sapien
ccggggagaagtgggtctggctctcagttcctgcctcgcagggggtgcctcccccctctgcgttgggtgtcctaagagccgggggggggggaaatgggcttgctctcagtccccgcctcgcggggggtgcctccccccactgcgatgggggtcctaagagccacgggaggaagagaggctggctctcagtccctgcctcgcggggggtgccttccccacccgcgatggggctcctaagagccaaggggggaagacgggctggctctcaatcctcgcctcgccgggtggcctcccaccctgcgatggggctcctaagagccacggggggtagaggggctggctctcagtccccgcctcgcggtgggtgcctccccgccctgcgatgggggtccgaagagcagggggaaggagaggggctggctctcagtccccgaatcgcgtggggtgcctccaccccctgcgatgggggtccctagagccagggggggaagaggggctggctctcagtccgcgcctcgcggaggatgcctcccccacttgcaatgtgagtcctaagagccagaggtgggaggggctggctctcagttcccgcctcgcggtgtgtgcctgccccgctgcgatggaggtcctaagagcaagggggggaagaggggctggctctggtagattgcaaatgacctgctttttttctgatcccgagctgcgttcggacccctgtcggatagtaaatcccaggtaaggtacctgcggtcggcaggtctgagctttcttcttggacacctaaaacccccagtcctccaggtgggtgctaaggatcttagaatccgcggtgggggtcctaagccagcgggggaagaggggctggctctcagtccccgactcgtgggcggtgtcttccccccttgcgatggggatcctaagagccagggggggaagaggggcgggctctcagtgcccgcctcgctggaagtgcctcccacccatgagatgggtgtcctaagagccaaggggggggaataggggcaggctctcgatccccgcctctcggggggtgcctcccccccttgcgatcggggtcccaagggccagggggggaagaggggctggctctcagtccccgtctctcgggtggtgcctcccgccactacgatgtgggtcctaagagccgggggtgggagggtctggctctcagtcaccgcctcgtgaggagtgcctcccccgctgcgatggaagttctaagacacagggggggaagaggttctggctctcagtccccgcctcgcggggggtgccacgcgcctgcattgggggtcctaagagccatgggggggtagaggggctggctctcagtccccgcctcgtgggggttgccccccccctgcgatgggggtctcaagagcctgggggggaagaggggctggctctcagtccccgcctctccgggtgtgcgtcccccccctgcaatgggggtcctaagagtcagggggagtgagcggctggctctcagtccccgcctcgcagggggtgcctcccccgcctgcgatgggggtccgaagagcctgggggggaagagaggcaggctctcagtccccgcttcgcgggggttgcctccccgcacagcgatgggggtcacaagagccaggggggaagtggggctggctctcagttcccgccttgcggtgtgtgcctccccccctgcgatgggggtcctaagagccaggggatgaaaaggggctggctctcagtcctcgcctggcgggagtgcctccccccccgcgatgggggtcctaagatcctgggggggaagaggagctctctctcagtccccgcctcgcggggggtgcctccgactcctgcgatgggggtcctaagagccaggggggtaagaggggcaggctctcagtccccgcctcgctgcgggtgcctccgtccctgcgatgggggtcctaagaaccagggagggaagaggggctggttctcagtcctcgcctcgcggggagtgcctccctccactgcgatgggggtcccaggagccaggggggaggtggggctggctctcagttcccgcctcacgaggggtgcctccccccactgcgatgggggacctaagagcaagcgaggggaagacgggctggctccggtagattgtaaatgacctgctttctttcttttcccgggctgcgttcggacccctgtcgattgtaaatcccaagtaaggtacctgccgtgggcagatctgagctttcttcttggacaccccatacccacagtcctccaggtgggtcctaaggatcttagga

SEQ ID NO: 9242 - DNA, 2300 bp, Homo sapien
aggttttgcccaagagtcagcttatttgcttctagtactagcagagtagttgctgccaaggccctcaaacaggggggccatcctgtagaaaccctgtctacttgtttagagacttaggccaccggcctcagccaggtccccacagtttgggataaaagtccagctgccatcttttccctctctgacgcatacaatggaaaaggctttgtcagatccggtagccccagggctggggctgccagaagtttttcctttaactcctgaaagccttcctgttgttgggatccccattccaaagcttcccggtccccgccccctttgtgacctcatacaaaggcttggctaatactgcaaagtttgggatccacagtctacaaaaccccacagctcctaagaattctctcacctgccttctgcccttaggctccggtagattgcaaacgacctgctttcttcctgatcccgggctgcgttcggacccctgtggtatagtaaatcccaagtaaggtacctgcggtcggcagatctgagctttcttcttggacacctaatacccagggtcctccaggtgggtcctaaggatcttaggattcgcgatgggggtcttagccagggggggaagaggggctggctctcagtccccgcctcgcggggggtgcctccccccctgcgatgggggtccgaagagcctgggggggaagaggggctggctctcactccccgcctcgcggggggtgcgtccccccccctgcaatgggggtcctaagagccagggggaaagagccgctggctctcagtccccgcctctcagggggtgcctccaacccactgcgatgggggtccgaagagcctggggggggaagaggggcaggctctcagtccccgcttcgcggggggagcctccccacacagcgatgggggtcccaagagccaggggggaagtggggctggctctcagttcccgccttggggtgtgtgtctgccctgctgcgatgggggtcctaagagcaagcgggggaagaggggctggctccggtagattgcaaatgacctgctttctttctgatctcgagctgtgttcggacacctgtcggatagtaaatcccaagtaacgtcggcagatctgagctttcttcttgggcacctaatacccacagtcctccagttgggtcctaaggatcttaggatccgcgatgggggtcctaagccagggtgggaagaggggctggctctagtccccgcctcgcggggggtgcctccccccttgctatgggggtcataagagccagagggggaagagggtttggctgtcagaccccgcctcgcatggggtgcctccccccactgcgatgggggtccgaagacccgggcggggtcggggggggcggagaggggctggctctcagtccccgcatcgcgtggggtgcctccaccccctgcgatgggggtccctagagccagggggggaagaggggctgtctctcagtccccgcgtcgcggagggtgcctctcccccttgcgatggggttcccaagagccagtgggggaagaggggctgactctccgtccccgcctcgcggggtgtacctccccccactgcgatggtggtcccaagagccaggggggaagtggggctggctcgcagtccccgcctcgcatgtggtgcctccccactctgcgatgggggcctaagagccagaggtgaagaggggctggctgtcagtccctgcctggcgggggttacctccccctctgcgatggcagtcctaagagacgggggaaagaggagctggctctcagtacccgcctcgcgtggggtgcgaagcgcctgcgatgggggtcctaagagcccgtgggggaagaggtgcaggctctccgtccctgcctctcggggggtgcctctcccccctgcgatgggggtcctaatagccagggggggaagaggggctggctctcagtccccgcctcgtgtggggtgcctcccctccccgcgatggggatcccaagagccggggagaagtgggtctggctctcagttcctgcctcgcagggggtgcctcccccctctgcgttgggtgtcctaagagccgggggggggggaaatgggcttgctctcagtccccgcctcgcggggggtgcctccccccactgcgatgggggtcctaagagccacgggaggaagagaggctggctctcagtccctgcctcgcggggggtgccttccccacccgcgatggggctcctaagagccaaggggggaagacgggctggctctcaatcctcgcctcgccgggtggcct

SEQ ID NO: 9243 - DNA, 2300 bp, Homo sapien
ttctagtactagcagggtagatgctgccaaggccctcaaacaggggggccatcctttaaaaaccctgtctagttgtttagagacgtaggcctccggcctcagccagggccccacagtttgggttaaaagtccagctgccatcttttctctctctgacacatacaatggaaaaggttttgtcagatcgggtagccccagggctggggctgccagaagtttttcctttaactcatgaaaaccttgctgttgttgggatccccattccaaagcttcccggtccccgccccctttgtgacctcatacaaaggcttggctaataactggaaagtttgggatccactgtcttcataaccccacagctcctaagaattctctcacctgccttctgcccttaggctctggtagattgcaaacgacctgctttctttgtgatcccgggctgcattcggacccctgtcggacagtaaatcccaagtaaggtacctgccatcggtagatctgagctttcttcttggacacctaatacccacagtcctccacttgggtcctaagggtcttaggatccacgatgggggtaatagccagggggggaagaggggctggctctcagtccccgcctcgcggggggtgcctcccccctctgcgatgggggttccaagagccaggggggaagaggggctggctctcaatccccacctcacggggggtgcctcccccactgcgatgggggtcctaagagccagggggggaagaggggctgtctctcagtccctgcctcgcggggggtgcctaccccccctgcggtggggatcccaagagccggtggggaagagtggctggctctcagtccccgcctcgcgggcggtgcctccccacacttcgatggggttcccaagagccgggggggtagaggggctgactctcagtccccgcctcgaggggtgtgcctcccccccccgctatgggggtcccaagggccgggggggaagaggggctggctctcagtccccccctcgcggggggtgcctcccccccctgcgatgggtgtcctaagagccaggggggtaagagggactggctctcagtccccgcctcgcggggggtgcctcagccccctgcgatgggggtcctaagggccaggaggggaagagggggagaggatgataataatttcagcatcgccggctgtgttcacccagcctgtgaaattgttattaatatcctgaaagggagagaatgatattactccccgtaatagacagatacgactccgcataatagagcacgaggtatacacccaccctgtgatattcttcctcatattcagaggccaagaagttgatattactcgtaatatcgcaggacgtatacaccctcgtgttagatggtccttaataatattccaaggcggagtgggcgatgtgactacatatatggcagaaagtggaaacccccctgggatattgttcccacgatcctggagggaagaaaatgatattactttcaatatgacagaaggtggacatgccaccactgatattgtttctaattgcaacgtgggagaggaggatatgacacgcgatatcgcagggagtagaaacacccctgtgatactgttcttaatattcagggaggaagaggatgatattactcccaatacagacgggtgtacaccctctgtacaccaagggtgtacacctgtctgtgaaacagttcataatctccagaggtctccagagggggagatgatattactcacaatatggtaaacaggctgtgagtccactgcggatcctaagagccagggggggaagaggggctggctctcagtcaccacagtttgggggggcctttatgttcaggttttgcccaagagtcagcttatttgcttctagtactagcagagtagttgctgccaaggccctcaaacaggggggccatcctgtagaaaccctgtctacttgtttagagacttaggccaccggcctcagccaggtccccacagtttgggataaaagtccagctgccatcttttccctctctgacgcatacaatggaaaaggctttgtcagatccggtagccccagggctggggctgccagaagtttttcctttaactcctgaaagccttcctgttgttgggatccccattccaaagcttcccggtccccgccccctttgtgacctcatacaaaggcttggctaatactgcaaagtttgggatccacagtctacaaaaccccacagctcctaagaattctctcacctgccttctgcccttaggctccggtagattgcaa

SEQ ID NO: 9244 - DNA, 2300 bp, Homo sapien
agcctcctgagtagctaggattacaggcatgtgccaccacatctcagcctctcgagttgcagggattacaggtgagtgccaccatgccccactaatttttgtatttttagtagagacagggtttcactatgttggccaggctggtcttgaactcctgacctcaggtgatccacttgccttggcttcccaaagtgctgggattacaggggtgagccaccatgcccggctaatttttatatttttagcagaggcaggttttcaccatgttggccaggctggtctcgaactcctgacctcatgtgatctgcctgccttggcctcccaaagtgctaggattacaggtgtgaggcgctgtgcccagccgtttattacattaaaaaaaaattttcctagccaactaatgcatgcaagatgtcagtatatattatctgatgtgcactgtgtcaggcactggaatacaaagatgggtaagaaaggcataaaatccttgtctttaaggagctcatattttaatgagaggtgtcctttttctttctgttttttgtttttgtttttgtttttgttttgagacagtcttgctctgtcgcccaggctggggtgcagtggcgcaatctctgctcactgcaacctccgcctcccaggttcaagcgattctcctgcctcaggctcccgaatagctgggattacaggtgcccaccaccacgccaggctatcttttcaggtatttataatatagttttcatatacagttacaggaatagtatgttacagaacctaaagaaaaataaagaagtattagttgaggagttcagaagtgggtttatactgtatgtactaggaattgcctgttgaattaaattaacatttcagaagtaactatttaaatctgtattgttgacactgcagtgaaagcagcgaaacgtgtcagcagatgattaagttttatggttgattttcacacttttgtaacttgggaccaatatcaagtttctgggaaaaacatccttcctctctccccaccctctatcattaaccccgggtttctgcctgttggtgttaagtgtgtccttgggacaaaggcgaatcaatcattcggttttcattttcctcttatcaatctgagaagagttacttcagtttttttcttccggagtctagaaagcgcttagattgttgaattattacatattctgcattgaaaagtctgtacgtcactcgttattttttccattcccaagaccaccagttactggaattatttctgggtgagtggaacaccctttacaagctgctagaggaggtatgcctgtccctaggttattggctttccaatgcctagtcttttaaagaaagcggcactgttcccacggaaattaacaatcattcaattcggagagacttgaaatcttaaggccgaagtggaggaaaaaactggattgttatgggttgggttactatttgagaagggcaagcgggagttagcgaatggctagggtgttaaaatgggactttattaaacgactcattacaactgcacaaaaactaaacctttgctggccccagaggattttttttttacaagcttcaaaaacctaacttcaaacaaaatttaggaaacgtgggattagtataaattcagtctgggtgcttacaagaccacctcctctgtcaccgacagtggggacaggtgtgagaattttgcaaaagcagctttcagaacaatttttcagcgctcaatggtgcccctaacaacttcgggggcggaaaacacgccaagcagcgcagccctcccctcagttgctaacctttccctttcccacctcgcctctccctctccgccgcggcctgcagccgggggggggggcgtttgtttatgtgacgtccgccgtagtaagcagtccccgcccccgtttccctctggccgccgcgtttcccgcgccgcggagcttctccccttaaaaggacaatagaggcctcgggagcgcgcgcggtcgccgggacttctccccctcccagcccgcaacgtgcgcgcgcccgtatgcaaataagttcgattcaagagaattttgtgccgggagccgcgcgtgcgcagagggaaagcggaatctacaccttcccggccagcggtagcaactgcagaactgcaggagactatctttctagacaaggcagttgaggaggagggagcgcttgagggggactggcctggcgtgcactccgcacctcggggacattattgcgcgtggaacggctgcttttggaaggtgagtgactctcaccatgcttctagtgcaaaactg

SEQ ID NO: 9245 - DNA, 2300 bp, Homo sapien
cactgttcctcctttatcacactcacttgtcacacaagtttttaacctttgggcagctataaattcctttgacaatctaaggaaagctacaccatccccaggaaaacacacatatgcacgcacacacacactcttaggtacaattctggggtgcctatagaactctaacactaacctgcctttttagatccctgagttaaatggacattaatgtcaaagactccttattcctttggagcagcaaacctcaacaggtcacaggagattcccagagcagatccttactgcaaggatcagagtccaaacgaggcttcaccaatctgagctcatctgagatgcaaattgcatttctcccaggcggggagaggactctcattgttccttcctgactgcatttttagagctgacccttcaccctcatgggggaagggcgctacagggatgagggcagggaggaggccggttaccaaatgaaagaatggggctgctggagattctaagatcatttatttataaacttctgcagccctgctaacatccatgcttgtgatttacctcacctctgtctcccagttggtaatcaacaaacccgtactaccaaaatgacctatgcttctgtcttctgccgcaggagagggtgataacacgggaggctgctctcccaccccaccctttgagaaaaagaggaagactggccagtataaacgtggcaaatagccctgtcacttcccataagttctgtaatctccgtgagcttccattttgcctttagagtgggaataataaaacagacctcatacttttgtgtgaaagcgagggaactgcaaatctcctgcccctagtagcactaataattgttagctgctgcttcttaatattacatagcacctggaaggatgacgggcctgcttgctaaagctggctgtgagtttggggtcggcttgaggagaagagcagagtgcagggagcttcctggaacagggcctgtctgtcttatactttcactctagacagccctttcccgttttggtgttcaggaaatatgccccagatcttcaagggcttcaccgtcccttccctttaactaggattcagatgccctcatctacagacggttccgtcataaggccaaaaatgattggattcaaaggatctgaaagattggtccagccctttctttattctgattagaaacagtcccagaggtgacgtgatttgcccaaagtagcgcaacttcctggaacgagaaaccaatcctaagatttccatgtcggcgttctttccgcggtgatcgggttacctcccagacataggatttacttttgaaagaaaaggagcggtcacacgggagaggcattgaaggaaaaattatttgaatttggcaactgcttgtggtggggggatgagaggtggagggtgataaagcgccccctcacactcacacacaaataatgtgaacaattttaaattgctttactttaggagatcatggattttccaggggggctgagaacttacctgtttacccagccaagttaacaatactctgcattgtttacctaacgcagagtaggtactgaagaactatttgtcgcacggatgactgcatgaccggatgcatcccattccatcatagagtcagatgaggatttgcagagccaagccccacctgggaggcatgttaagtcctttccagttcttctcaattatggctctgcagtgagtatcttttgttcataaattcttgactgcacatcttgattatctcctcaggatattttcctagaagtgggattactggattgaaggggatgcacatatttaagattcttgattccgaacccctccagcagtataaaaatgagtccgcttcccagcaagctggcccaaacaggctattatcaggcttaatttttattttttatttttgtgccctcctaatagaacaaaaatcgcatctcgtttggtttgcatctctttggggactaattagatcgagattgaactagttttgaagaaacactctaaggagtccagagaaatcctgtgtggggcaggagatccatgaaaggaggcacatcccgcccactgaggtgaaaccaaagggcttctattgtttggtgtgatttaaccttaagatggaaacatctgagccttgctagagaggcttccccggaacaacggctgggggtggggagctgtgacttatcagcttccctatgtttattttcatttcctgatggagagtaaatcttataaacaaatgaaaaacctgtggacttatctttaaagactacaag

SEQ ID NO: 9246 - DNA, 2300 bp, Homo sapien
aggtcctgtaactctaattaggcatttgtacatttttagcagcaaaattgcctcagcagagctcccagttttattcccagttgtggctgaaaagcaaagccatggcatcagtatccttgtgcaatcggaggttgctgggctttcaccacctgtgttgttaaccttatttcctggaggaagaaacagatgaaacaagtgcctaactccctttatcaaacacagccaaggacagcctcttttaacatgtgacttcatacttgaggaaaaggagagttgacagctgtatttaaaaacccatggagccgggtgcggtggctcacgcctatgatcccagcactttgggaggccgaggcaggcggatcacaaggtcaggagattgagaccctcctggctaacaccgtgaaaccccgtctctactaaaaatacaaaaaattagccgggcgtggtggcgggtgcctgtacaggaggctgaggcaggagaatggcgtgaacccgcgaggcggagcttgcagtaagctgagatcgcgccactgccctccagcctgggcaacagagcaagactccatctcaaaaaataaatagataaaaataaaaacccatggaaatggtttaagaaaatggttctgggtacaccagaaatttgtttgcctgaagctaaagtgtgtctacaatggtacagctcttccagggacatgggaagtttatcgtgggagatatccagaacctgttttacactgggctcctactgtgtttggtgatcagaaactatagaggggtccaacccaggatttcatgtttgtatcttcataaggccatgctcctgacaggtctaggcaacctgggggatgacttaggttaatgtgctaggattgacacacctcatccagccttcttactttgtggatgggaacacttaaggaatagagagattaaatcttacacttaccccacagctggttactgacaacacaagctctagaattcatgtttgtttgtttgttttatttcaccaggctgcatgagactgaccttccggcattcttactaatagtctttctattatactattggatctttattcatccacctatacaagtaggaaataaggatgaatattcatttagaagaattaatattcatattaacacattgctctcagattattgggaattaacatcttgtaaaaactgggagcaggccaggtacggtggctaacgcctgtaatcctgacactttgggagtctgaggcgggtggttcatctgaggtcagtcgggagttcaagaccagactggccaacatggtgaaaccccgtctctactaaaaaaaaaaaatagacaaaaattagcgggggggtggtggcagggcctgtaattccagctactcaggaggctgaagcaggagaatcgtttaaacacaggaggtggaggttgcagtgagccgagattgtgccactgcactccaacctgggtgacaagagcgagactccgtctcaaaaaaaaaaaaagaaaaaaactgcagccaaagttggatttgcggcctatgaataaaaccattactttaaaaagtaatacccccaaaaaagttacacctgaagtttcatcttcatgcctttgtgtaatattactataatggtgaaatgatgatttaaaaaaaacacatcagaactgacacatcctcttggatgatgggtccttcagtcaccttgtgagcccatgtacttattccgttgatacagcctgtgctataaacatgtggggccctccttgtgtgagctgcttgaatggccagtacccccattcttttgaatattcccaatggcagtcaatcttggcctttaagaataaatttaaatatttggaaatagtccttaggatccaagtttgatcaatgaaaaggatgcttaagctgagtttggggtcacataagaagtgcagttataaagaaataagacatgttgggcatggcagtacacacctgtagtcccagctgcttgggaagccaaggcaggaggatcacttcaacccaggagtttgagtccagcctgggtaacatagggaaaccccatctcaaaaaaacaaaacaaaggacttagtttttatgtggctcataagtgtctctaagttataccaaaagtttgagcacaacagtagtagcagaatgcttagaataaatgcttgacttttaagctgacttttggaaggaccatacccacatagaggcatcttttctgctgtggtaattttttaaattaatacattgctttaggattacatctcaaagtaaataaaaaaatcaatat

SEQ ID NO: 9247 - DNA, 2300 bp, Homo sapien
aggtcagcttttcatcctcaccccgcccccgcccctgggataaaagacccatattgcctacagttcaaacatctgcctgattatcctagcagagtggtaggaactgattttctgatctcctctactacccgcctcacctgcacagagagtaccagctgtctcagcctagcttcttcagtgggccttggctgtaaaatgtgtgtatccaccccaggtaattaggttagctctttgtgctcgtatgactgacccctaccttttaggccacctggtgtttgttctagaagttattcctataaacagattttcacctaaaatttgaatctttatgaatcaaataaggaaaattttaagtaaacttgggctgtggataactgatgattcattaccaaaaaggtagtcatttaaaattataaaatgacacaaaaaatttaaatggaaaacatcctgtttatgcttggtcaggtctttgagttgatgtgactcaagtaacatctgatcattttcttaacctttttaaaaagactcccctaaattcttcctcccaaagattttactgtgtttgttcacagtgggttctgtgaaaggattattacaagcccacaatccattatcctcaattctacaaatccaaaaaattctgaaaaccaaacattctttttgtaactcattcatcagcaaaaccagacctgaaccaaagtgaccctattcatattctttgattatctgtcctactgggacatatatggtttgctgcagaaatattaatgtatttaattataggatactgccctagatagttcatatatgtggtatatgcaccatactgcttttctaaattaaaaaatctgaattctaaagcatatctacttccaaacatttaaatcggacttgtggacatatgtaagtataaagcagcctttgcagagtggtttaaaaggctgctttactattgtggggagcttttaattttgataaactagtgagttcatgtaaataaaacataacaaaaacactaatccttaattttctgttaactcgagaatacccagatatgatagttttgtggctaggggttagacatagaaagtgtaactatgaatgcatgtatctgtttgacttcttgtacccccaaaataaaggctaaaataaatataatcagctaaccaaagctatagccacagtcatatatactgtgtaagaaaaaagcctctgatggaggttgcagtgagccgagatcatgccactgcactccagcctgggcgacggggccagactgtctcaaaacaaaagaaaaaagaaaaatgggaattgtgtaagcattcatgtataaaaaaatgatcaaaaatgttacactggcctggtgcggtggttcacgcctgtaatcccagcactttgggaggccgaggtaggcggattgcttgaggtcaagagttcaagatcaccctggccaacatggagaatccccatctctacgaaaaatacaaaaattagcctggtgtggtggtgggcgcctgtaatctcagctacttgggaggctgaggcaggagaatcgcttgaatccgagatgtggaggttgcagtgtgccaagatcgcaccattgcactccagcttgggcaacaaagcgagactccatctcaaaaataataacaatgttacactgtatcttgtacatttttagtgggataaatgccaagagcagttttattagttcttgattcctccacactttaagagaatataagttcgtctacccatgattttaagaagcaaagagtgtgatgtttcccacctacccacacccccttaaaactattcaaatgaaaccatttaattctttaattatagtggaatagaactgacctattttctgtatgatcataaagaaatatttacttttaacgcagaaatttttttcttaagatccacattttccagcttaatgaagtgattgtgtttttacttggactcttccctttcctttttccttgttctgtgcagattatcaacgcctgatgactgtggcagaaggcatcaccacacttttgttcccatttcaatggcaacatgtttatgtgcccattctacctgcttctctgctacattttcttgatgctcctgtcccttatctgatgggccttcagtcaaaagaaggaactgaccgttctaaactagaacttcctcaagaggtaaaactacaatgaatgatgaagcatttgctgtttgctgatttaggtcaaggcgactttcgttagattgcattgtctttgtcaaaattttatctgtctctttgactctcc

SEQ ID NO: 9248 - DNA, 2300 bp, Homo sapien
tgtggcacaatcatgacatgagcttcaaagccaatagtttttagggtaaaggaaaggaccacaatctgaaatggctgtgaggagcagtttggacacccacccgccttcatgcttaatgacaattgtgttgcattaatcctatcccaccatcaagattttgtttttaagcagtgggaacccagaaatcttaacactgaaagaattccactctacagaataaatgaaagtggaatgtgcataggggaagaagggacactggccctctcaacttcttcctctagcctctcactcccttccaaggccctgagacattcctgctgcctctttggaacccctttgaaaaccactccccttagtgttccaagatggatgtgctaagaggcacgtctaattctgtccctctcctaaaaacccttcagaggtttcccattgtcctccccacagttctaacatggcctaccaaggcccttcatgggctagcccctgattatttctcttgctttctctcacgtcctcccaccttgcattctctgccccacccacactgacctgttcagttcctcaaactcttctgggcttttgcacatgtcctctctgcctggaatcttctttatccactaagacctatactcgtcctgaggtttcagttgggcttcattttttcctggtagctccttcttttctaatgtgtgtcttcctactattatatgtttttcccatagcaacccttatttaccctatcatagcacttcccttactttatagtttatgatttttaaaacttacctgttaaccttactcgactggaaataccataggaccatgggccatgtctgtccttcccaccattgtatcatagggcccctctcataaaaggcacttaataaatgttttttgacggtttgaatgaagaaataaaggaattgtattttcttggtaatgtggggatgtgggagacagtctaaattttgtaccacatcagttattaaatatagaaaaatagtaataatatatggttaaattatttctatgtaaaaagcatattgcaatacaaaaatagaaatatctaaatatgaataatgagtattaggatggttgaattacaagttctgttttccttagtatatttcaacttttctgtaatttcacttcttttatttaaaatgttttaaagaatcaattctaattttctgtgcattttaagtgtcttaaatatagcatctttagctcctctgggtaattttgttctcaagtttcctcaatcctgggtagttcccaagaactagagcataatctctactagaagtaatctaaaatgccttgtttctgtgcttctgctttagtagatcaaaaagctttcaatttccaaagtttctttttcttggataaaataccatactattcaaaatagcaaagatgacactgttgtttttattattctttgtttaacttttttccacttcctaaatgagccttttcctatttccctgtattaaatacttgagtactatttttgtgaagtgctttttaatatttgtgaaatgcttttgcctactctgtcttcaagtcgttgatacagcaactattgtagataaaggaactgaggctcacagaagttatatggcttgctaaaggccacaagcttggttagaggtttactctgggactaaatcagtgattctcttgttcttagtaaagccccttgcatgtaacatcacacagtaaaagtttttcccttgtatatactccttttaagaataattttatatacatgtgtatgaggaatttataatatatttctaatttaaggctattgcgaatattaaatctggataaaacctgtctttttgaatcctgttatgttaaaaaaacaacatttatttctggcttgaagttatttgtgtactgcattctgatttttttttttctttctttcacagttgtgcatgcctaaagggctatctttcaggacacaaacggacaataaagacccccagtttcactcatttataattaccagggaagatggttctcgcacctatggttttgttctcactttttatgaagaagttacaagtaagcaaatctgcacagcaatgcagacactttaccagatgcacaacgctgagcattacagcagtgtgtatgcttcatcttcctgcagtatggactcattggcaagtagtcttgatgaaggagatacaacttcccttttgaaactccagcgatacaactcctatgatattagcagagacaccctgtatgtttcaaaaagtatatgcttgatcacaccgttacca

SEQ ID NO: 9249 - DNA, 2300 bp, Homo sapien
ttttcttttcctttctttcctctctttctttcccttccctcccctcccctctcctccccgccccctccccctgcccttgcccctgcccctgcccctacccctccccttgcccctccctgccccctccactgcccctccccctccccttgccccccctgccccctccccttgcccctccctgccccctccgctgcccctccccatgcccctccccctccaccctccccatgccgctcccccttactttcctttctttcgagatgaggtttcactatgttgctggtctcaagtgatctgcccacctcagcctcccaaagtgctgggattacaggcatgagccaccacattctggccaagtaacttttttttaaatgaagaagtgaataatttacaatttcttagtgttcacaggaaaatctagcatcagcttaaaaacatcatggactcttcctgaaatcagttctgagccctgaatctgttcttcagccacattgactctcatggacagtttcacattcctctgctgactttttgatgcttacatactctagaagcttggtgcaaaaattgataaactctccttaaggatgtctgacaatttctcttctagaaatgaatgctctcaactcttagaagatggaagtatggagtagaaaaatacagagatgaaatgtttgcctaaataagtcagaggaatctaaagaaaataatgatcattagccaaggacttcagttagaaatagtagtttagttgcctaagcaaatgtatttaaattatgtgtccttgttcaaaaaaattcctatgtattttatattgttgtctccagcaagatttttgagtgtgactttttcgtccttctgcgatctgttttgcattccaaggtggtttttttttttcatatttttacccaaaatagaaactgagtctaactagaagtcaaatacaattcataaatcaaattgctttgtgatatttttaatagtataaatactggtaaagtgacatttatcttttgctgtaacagctagtattttgcacttaattagaactctaaaagtaggaaaacacacaacacaataaaattgttgcaagatcttctagttccttgatcccaaatttttgacattgggaatttaagatccgtctaccttaaaatatttcatgaaactaaaacatttagggataataggtcttaagggaattactctggttgaggaggttaaaaaaactaatctgatagctattattgaattttcaatgttttactttttaaaaaatttattaaaaaaaaaataggaagaaaagaaacggggtctcaccatgttgcccaggctggtttcaaattcctgggctcaagcaatcctcctacctcagcctcccaaagttctgggattacaggcatgagctactgtgcctggcctgaattttcttagtaattaaaatgtagcctacttttatgtttccagaattttgccagataatgaatttaacttaggatagctcatttattttaaaaggttagtatgtttaatgtgttctgtctactaaacaggatgactcagcaatgatgtttctaattctgttaattttgttactggagaacctggatatgcaatcacatttctcagagatttttgtggaaactcaagcaaaattgcttcctttgagcactgtagcatgggggtctaagtgtgtataaaattttaggatcataagacatatgattagcttaatgtaagacttttcttttctgaagtaaatgttttcatatagtttattattaccacacactgaaatgtggaccataattaggttacagcaatgattatattaccatattttgatttttagtatcagttgagtagccaggattttaaaattcagattctgaagttttaaatgctgctctgttgttaacagttttttagttgtccatcgggattttacaatacagatggttagaggcagaaattgaatcagatctcaacattatcagtcagtagtaggactataaaataaatagaaaactatgacatgcttttggaaaagttctagatattaactatgtattatttgttgtaggcgaaaattttgaccagagtcctttgagaagaacattcaaatccaaagttctcgcccactatcctcagaatatagaatggaacccttttgatcaagatgcggtgaacatggtatgtgttttttttcccctcatttactctttagccttgttttcactttattaatatgaaggtagtgactgtattttgaatgtctaccttatttcatttcatttatt

SEQ ID NO: 9250 - DNA, 2300 bp, Homo sapien
gattacaggcctgagccaccatggccagcctctttcatttcaaaattgaagaaagaaagtgaagatacaagctacattaaatgatggtatgcacgcacatgtatcttctaggaagaacattattcagtcaaataatcgaggttctctcaggcaacctctctggaaggtttgcttgtatgtctagtggtagatgccccaaatccccaaagaagaaagcagggagtggtgtggaaggggttgccatgtggagatgaattgcattcagttttctatcttttaagttttatttttacttacatggccgggcacagtggcttattatgcctgtaatcctagcacatttgggggccaaggcgggaggatcacttgaacccaggagtttgagagcagcctggtcaatacagtgagaccctgtctcttaaaaaattattttttaaataaataaatgttatttttttacttagatggagacagagtctccctctattgcccaggctggtcttgaactcctggtctcatgtgatcttcctacctgggcttcccaaagtgttgagtaaattacaggtgtgagccactgagcccagccagttttctttcaaaggaaaaagaactggttgtcgagttccttccgagaaggcaaaagacagctgagcagggcaagaaagccgtgcctttgggaggagcagagttcatggtctaattcctgttgctttagcctccgattgttacttgcggggagagccgataacatcggatgggtacagggctgcggaactggagcgccttggctatttacactgacctggaaaatgtcaggataaatgacagaaggcgggggttggtgactgcactccttctagaagtctcaacgctttgtgggtattgagttgtgttttttccccctcacggttgacttgtcactaagtcactaaggatggcctgtaaatggggtgacggctgggggaagggaggaccttaaagtgagacaggcacccccacacaggtcacagtttaaaagacgatggttcagaccgttatgcgaaatgatctcagagcggctgttcaccttccccaaagctgcattaaaagaaataaggatgggtgacaacccctttagaagacagacccccacactgaggctagccctcttatcggctggccagggcgaggaggggtgtgtgcagggtcgccctcgatgccgcagccggggccagtgggcacgaatgcggccccacgccaggcttggcctccgaacccgctaggcgcgcgcgcacggtagaagcgcgcgcctccgtccctcgcgagcgcgccccccacccctctccgtcgcacgcgccgagccccggcgcccccgcccgccccgcgctcccacagcccgagcgccgctcagctgacccgcgggcgccagacgcggcggctctcagctcgcgagcgcagctgcggctgcgagggcctctcaggccgacactccccccgcgcccctcccccacccggccgggctccggacccgccgcgcgcgagcccgcggccgcttcccccgcgccgagcgaggaggcaggctgcggcggcgagaggcggctgcgcggccatgggcgcgccagtgtcgccctagggcgggcgcacagaccacagccggagcggtggtggcagcctccgcagaaagccttcccgggcggcggcggcggcggcccctggagcagcgcggccgggatgagcgggagctgcgcggcgcccggcccgggctcgggctcctccccggccgcctgccgcttcgcgcactacttcgtgctgtgcgggatcgacgcggacagcgggctggagcctgacgagctggcgggtaaggccagggctgcggcggcgctgagccccctcaggggcgcgggggacgctgtggggacgcgcgggaggcggggtgcaggctccagacaaagtcagctcccggtggcgccctcccgccgctttctggccgaactggcgctcgggcgcgatttaatgacattgttatttattccgcgtgcgggctttgcggctgcgcccaccggggctttcgcctccaggcgctgggttattaataacaggcgcgggggtggccccaagggcacggaccccgcctggcgcgccggccccttcgcttgcagccgcactcggaggcggccggtgagtcaccgggcgcgcgggctgccccccgaccgccgtgcctgcctcccacccgccagccacccggccccggccgcgaagtttcggccccgcacgtgacgcggctttcgggcctcttcgggagacggggagtcggactcagc

SEQ ID NO: 9251 - DNA, 2300 bp, Homo sapien
tcttattttttttgagacagtcttactctgttgcccaggctggagtgcagtggcgcgatctcggctcactctaatctccgcctcccaggttcaagtgattctcctgcctcagcctcccgagtagctgggaccacacgtgcgtgccaccacactggctaattttttgtatttttagtagagacagggcttcaccatgttggccaagatggtctcggtctcctgacctcgtgatccgcccgccttggcctcccaaagtgctgggattacagacatgagccactgcacccggccaattcttcttatattttactaattattattttattgattttttttttttttttttttttttagtagagacggagtttcaccatgttggccaggcttgtctcaaactcctgacctcaagtgagcctctcgccttggcctccgaaaggactgggattacaggcttgagccactgcacccggcctcattttatttttatagagacagggtctctcactattttgcccaggttggtcttgaattcctggactcaaatgctcctcctgccttggcctctcaaagtgctgggattacaggcctgagccaccatggccagcctctttcatttcaaaattgaagaaagaaagtgaagatacaagctacattaaatgatggtatgcacgcacatgtatcttctaggaagaacattattcagtcaaataatcgaggttctctcaggcaacctctctggaaggtttgcttgtatgtctagtggtagatgccccaaatccccaaagaagaaagcagggagtggtgtggaaggggttgccatgtggagatgaattgcattcagttttctatcttttaagttttatttttacttacatggccgggcacagtggcttattatgcctgtaatcctagcacatttgggggccaaggcgggaggatcacttgaacccaggagtttgagagcagcctggtcaatacagtgagaccctgtctcttaaaaaattattttttaaataaataaatgttatttttttacttagatggagacagagtctccctctattgcccaggctggtcttgaactcctggtctcatgtgatcttcctacctgggcttcccaaagtgttgagtaaattacaggtgtgagccactgagcccagccagttttctttcaaaggaaaaagaactggttgtcgagttccttccgagaaggcaaaagacagctgagcagggcaagaaagccgtgcctttgggaggagcagagttcatggtctaattcctgttgctttagcctccgattgttacttgcggggagagccgataacatcggatgggtacagggctgcggaactggagcgccttggctatttacactgacctggaaaatgtcaggataaatgacagaaggcgggggttggtgactgcactccttctagaagtctcaacgctttgtgggtattgagttgtgttttttccccctcacggttgacttgtcactaagtcactaaggatggcctgtaaatggggtgacggctgggggaagggaggaccttaaagtgagacaggcacccccacacaggtcacagtttaaaagacgatggttcagaccgttatgcgaaatgatctcagagcggctgttcaccttccccaaagctgcattaaaagaaataaggatgggtgacaacccctttagaagacagacccccacactgaggctagccctcttatcggctggccagggcgaggaggggtgtgtgcagggtcgccctcgatgccgcagccggggccagtgggcacgaatgcggccccacgccaggcttggcctccgaacccgctaggcgcgcgcgcacggtagaagcgcgcgcctccgtccctcgcgagcgcgccccccacccctctccgtcgcacgcgccgagccccggcgcccccgcccgccccgcgctcccacagcccgagcgccgctcagctgacccgcgggcgccagacgcggcggctctcagctcgcgagcgcagctgcggctgcgagggcctctcaggccgacactccccccgcgcccctcccccacccggccgggctccggacccgccgcgcgcgagcccgcggccgcttcccccgcgccgagcgaggaggcaggctgcggcggcgagaggcggctgcgcggccatgggcgcgccagtgtcgccctagggcgggcgcacagaccacagccggagcggtggtggcagcctccgcagaaagccttcccgggcggcggcggcggcggcccctggagcagcgcggccgggatgagcgggagctg

SEQ ID NO: 9252 - DNA, 2300 bp, Homo sapien
acagttaataagtgtaattgaataacttgttgaaaaaccaaaaaacccttaaagacaaagttgtgtagggaatagaattttttacttgcacctgcaagagggaccgattattagagaactggctttgtaaacaaaaatgtagggcaggtatttaaagtaaaaaaatcacaaggatagacaacagctcaaattgttatcagttcacaagtctgcttggatgtatgtgggtcaattttgttaaaatctagacggtcctttctattaagacattacaatgcatcaacaccaaacaacagaaaagaaaatccatatatccctgtttttcatgctttgtctgggactaaaggaagggcaggccttttctagactatggaatctaagtttcagaaaaaaatcatttaagctgcaatataaagaataatcttggccggtcgcagtggctcacacctgtaatcccaacactttgggaggccgaggtgggcggatcacgaggtcaaaagttgggcaccagcctgaccaacatggtgaaaccccgtctctactaaaaacacaaaaattagctgggtgtggtggtgtgcgcctataatcccagctactggggaagctgaggcaggagaatggcttgaacccaggaggcagaggttacaatgagccgagatcatgccactgcactccagcctgggcgacagagcaagacttcatctcaaaaaaaaaaaaaaaaaaaaaagaatagttttaaggaaggcagaattagagatagacaagttataggaacccaggcaagccattataatgccaaactaaggcaatggcaggagggatagaaagaactggaccagttttaaatccattatgggacaggaaaggcatgttgcagtcccttcagccaagttgcaagttttgaatgagttatccaaacattattaaatgcatcttcagtgatgactaccaagcttttttccaggaaccaaccctcttttgtaaaaatgttaggttagcctgttcgttctggtttcttgggcagtgactgggatgttcaaactattaattgggatagaacaccgaagctggttaaaaacaatatttcttatagaaattgatcttgaacatggatcaaggttcactgctagcaggagaatcggagagtgtgtggtaatgaaaagttatagttgagaaaacaagcgtttacatcagcaactaattaagaaaaaagcagctcataagtggatgaatgcagttcataaacacattatatcagttattacacaggaaatctaaggcagaatactgtgaaatgcaaggtgtatagcttatcaacaagaatgtagcaaatacaccattcaactaagaaagaaatgataaggctgcatctggggctgttgactggaagcacaaagtttcctttccttgtagtagttcctaaagattccagtttacatggaaagacagaaagctgtcacacccatggcaggagcgcagaacccaagcgacaaattctaattttgaacaggcaggtgccagtgcatttctcaaactgcaaactaaaatgcagaaacacgattttcctgtttcttagttttggaccgttttcccccctctagcacgccagagcaggttttaattgttgtcaggtcagatggtgagttaactttgagtgttgagttgaggggccagtgggatgtgggtccagttgaaaggtggatatatgtagatccagactcgagtgatataggctgcaaataaattgctagtgaatttatgaattattagaaaagaaaggacattcattatgatttaatcgcagttgaatgtaggcagcacagagggcttatactgtgtctttttttttttttttttttaaatatacggtgtctattttgctcaccactctatgcccggtgcctggaagtgcgactggcacatagtaggtgttgcatagtttcagaatgaactttttaggaatcaaaattctacaaacattgcacacagatttaacgttcccttattttccaggtgaggtcagggcgccctttggtttcgcgcttctgtccctttaagaaagtggaggagaaagaaagcgctgctgggaaaaagggcggggccgcgaggggccgccgtccgtcccgccccctgccgggccgcggcgctctgctagagcgtggctcagttttggtagcgggaccccggaaatgtaaagcatgagcgggaacagtcgccagggcgagtgacaggcgagccctatgctttacttccgagggcggtgtcagcaaagctaggtaaggagacagggaggacggtgc

SEQ ID NO: 9253 - DNA, 2300 bp, Homo sapien
tgggcaccagcctgaccaacatggtgaaaccccgtctctactaaaaacacaaaaattagctgggtgtggtggtgtgcgcctataatcccagctactggggaagctgaggcaggagaatggcttgaacccaggaggcagaggttacaatgagccgagatcatgccactgcactccagcctgggcgacagagcaagacttcatctcaaaaaaaaaaaaaaaaaaaaaagaatagttttaaggaaggcagaattagagatagacaagttataggaacccaggcaagccattataatgccaaactaaggcaatggcaggagggatagaaagaactggaccagttttaaatccattatgggacaggaaaggcatgttgcagtcccttcagccaagttgcaagttttgaatgagttatccaaacattattaaatgcatcttcagtgatgactaccaagcttttttccaggaaccaaccctcttttgtaaaaatgttaggttagcctgttcgttctggtttcttgggcagtgactgggatgttcaaactattaattgggatagaacaccgaagctggttaaaaacaatatttcttatagaaattgatcttgaacatggatcaaggttcactgctagcaggagaatcggagagtgtgtggtaatgaaaagttatagttgagaaaacaagcgtttacatcagcaactaattaagaaaaaagcagctcataagtggatgaatgcagttcataaacacattatatcagttattacacaggaaatctaaggcagaatactgtgaaatgcaaggtgtatagcttatcaacaagaatgtagcaaatacaccattcaactaagaaagaaatgataaggctgcatctggggctgttgactggaagcacaaagtttcctttccttgtagtagttcctaaagattccagtttacatggaaagacagaaagctgtcacacccatggcaggagcgcagaacccaagcgacaaattctaattttgaacaggcaggtgccagtgcatttctcaaactgcaaactaaaatgcagaaacacgattttcctgtttcttagttttggaccgttttcccccctctagcacgccagagcaggttttaattgttgtcaggtcagatggtgagttaactttgagtgttgagttgaggggccagtgggatgtgggtccagttgaaaggtggatatatgtagatccagactcgagtgatataggctgcaaataaattgctagtgaatttatgaattattagaaaagaaaggacattcattatgatttaatcgcagttgaatgtaggcagcacagagggcttatactgtgtctttttttttttttttttttaaatatacggtgtctattttgctcaccactctatgcccggtgcctggaagtgcgactggcacatagtaggtgttgcatagtttcagaatgaactttttaggaatcaaaattctacaaacattgcacacagatttaacgttcccttattttccaggtgaggtcagggcgccctttggtttcgcgcttctgtccctttaagaaagtggaggagaaagaaagcgctgctgggaaaaagggcggggccgcgaggggccgccgtccgtcccgccccctgccgggccgcggcgctctgctagagcgtggctcagttttggtagcgggaccccggaaatgtaaagcatgagcgggaacagtcgccagggcgagtgacaggcgagccctatgctttacttccgagggcggtgtcagcaaagctaggtaaggagacagggaggacggtgcctgcccctttaagatcgactccaccccgcctctggaggaaaatgacgccgccgtctacccgttgtggaacgtaactcttttcatcccatcagctctccttctcattaagagaaataccaagtggtcaccacagtcacatacttcataacccatgcctcatcggtgctgggacgggagagggaagcgccgatctaaatgacatggggtccaaatcccaaataatctctatttgctctgcgttacctttaaacttaggctgcgttgtgtgattcaagtgacagcctagtactgcttaacaattagtctagtgggataccaggccctgagagacccctacgatcccaggacactgatgtggggtaactaacacccactggaagtctacgctgagttcacaggctatgtatgacctgacatgcattttgacctgccctgtgttttgatatttgaatgagttgctgatgtttacaagccgaagctggccgggcgtggtggctcgcg

SEQ ID NO: 9254 - DNA, 2300 bp, Homo sapien
cataaaattcaaacttcagtgtttaggataaggttttattggaacagagacccacccattcatactgtctatggctaattttaagatacaagttgaatagctgtgaccaagccagcatgacccacaaaacctaaaatatttcttgtttggctctgggaagctaaaagacaacaaagaaagaattctccaaagatactgagtttctttgggagtgaacaaaaagaattataatccaagatgtacagctatggcaagccacgggtctggagaagggaagaatagggggaagattttactggtaaaggagggaagttcacataaactcttggaaactaagttgattggttcccaaggctcaaatcaagaattggagtccgttcattggtggaggtcctgctgctgggccaaacgtcctttcgacagtatcttatctgaactgctgcagttttaaagaatatttagcaataaatcttgtcatagaaatgtgcgcatatttgcaaaacaagcaagttgtgcaaaacattaaatgcatgaaagatgtgaagaaattgtgggttttttggtttattttttaaagtccttgaggcagttcgttctttctttttttttttttttgagacggagtcttgctctgtcgcccaggctggagtgcagtggcacgatctcggctcactataacctcctccgagttcaagcgattctcctgcctcagcctcctcagtagctgggattacaggcgcccgccaccacacccagttttttttttttttttttgtatttttagtagagacgggaatttcaccacgttggccaggctggtctcaaactcctgacctcgtgatccgcccgcctcggcctcccaaagtactaggattacaggtgtgagccaccgcgtctggccttgagacagttcttatctcagacatacaagcatgagtttccttcctttctggtctctaggctccaatttgtctgggtctgacaatagttacttctcctggaatctgcaactttcagagcactttatggaaaaagtcggccaacccctgccctacactcactcttgatcactctccagtgtagccatcccaaactatttgcagaccacccttttctctctgatctgtatcccacccccatgggtgcttccatagaactaaccccatctaagcatttaacagttattctaattgcccttttacttgtctgacccaagtgttcgccactcaatcctcagcacccagcacgatccctagccctcgttcagcgcttaataaatccatgttgattcaatgtgtagcatcctgaacaggcaacagcagtgggttccaactttcaaggagcttaaaaaaggaactcagcatacaaacaacagactaatctacaaggaagaatgaggggggtggagggagcactaaaaagcagcaagtactctgcagcagaaccaaagataaaattccacctaaaggtgccctttcttcaggatccttcctaatttgaatacaggttcccttctcctccatgacgaaattcttagtgaggttacttgttggtacgcagtgtcctcatctgtaaaataaggctaaataattacgatttcaccggattataatgaatatggttaagtattgaactaaggcctagaaagcacgtagctcagtgcacgcttcctagaaagtgctcagtaaactcggatcctctaacacgctccgtttgatgttaatggagtccgtatccgagcgggtctccagtgtgcatcgccaagggtatggcccagcatccaacgcatccttttagtaagagtagcgacttctcagcgctcccttcgccccaggagagttctcggctcgcggcgtcgcggcggggctgcgcgctgggctgaactcccaagaaacctcctgcagctgaaccggagcagacgcccgccaggtgaaagaactacaactcccgtcacgttgcatccgagtttagggcctctttatagtttatcacacccagcctcttccgcgcagccctcagtggctccgccccaaagggggctctcttctttccttgtggagtccgaagcgtggccacgccccggtcaccggaaaaatccgtgtgacgtcacaaaaacctacgcgtcgcgcggtgggcgggagttggcggacggtccctggctgggttctggaggccctgggaccgcggaagaggcttcagacgctgcagcgatgcctcgcccacggcgggtcagtcagctcctggatctgtgagtctaccctgtcccgcctcccttcgcgccgccccagcacctcctccaa

SEQ ID NO: 9255 - DNA, 2300 bp, Homo sapien
tggcgcgatctccgctcactgcaagctccgcctcccgggttcacgtcattctcctgcctcagcctcccgagtagctgggaccacaggcgcctgctaccatgcccacctatttttttttgtatttttagtagagacggcgtttcaccgtgttagccaggatggtctccatctcctgacctcgtgatccgcccgcctcggcctcccaaagtgctgggattacaggcgtgagccaccgcccggctgggtacggattttctttacgctgtatataaaagtctgagaaactatcaattgcttataataaagaatgaaaactccaaaggcatctggggtgaggttgagggtctgcacagagattatgggggaaggggacgtccaaagctgtcattggattcaggcactcaacagattggaacacagtgtagagatttatggtagtgtgaaggtgctttatttgttatgaattactcagagattttactatattttaacctggggcggggaacccttcctttttttgcccttttgaaaataaggtagatttcttcagatgtggaaagtatcaatggtcaatccaatagcttttcgttattttatttttttatttttggaggcaaagtctcactctgttaccctggctggagtgcagtagtgcaatctgggctcattgcaacatttgcctcctaggttcaagcaagtctcctgcctcagcctcccgagtagctgggactacaggcgtatgccaccacgcttggctaatttttgtatttttagtagagacaggttttgccatgttggccaggctcgtctcaaactcctgacctcgtgatccacctgcctcggcctcccagtgctaccattacaggcggagccaccacacctggctcactttgtggcatatttctagaagttaaaaaactcacctgacaaaagagatactttgtggccaggcacggtggctcactcctgtaatcccagcactttgggaggctgaagtgggtggatcacttcacgtcaggagttcgagaccagcctggcgaaaatggtaaaacccccgtctctactaaaaatacaaaaattagccaggtgtggtggcaggcacctgtaatcccagctacttgggaggctgagacaggagaattgcttgaacctgggaggtggaggtttcagcgagacgagatcgtgccattgcactccagcctgggtgaggacagtgaaactccatctcccaaaaaacaaaaaaaaaaaaaaaaaagagagagagagagagaaactttatgatttactccatggaacaaatatcatatagaactgtaacatttaaaagtcagatttctgtttctaaactttaggtttatacctcttggcagatgactagatgattctttccccattccaagagtaacagatattcagccaacttgtgtgtgtgtttatcacatgtgattccacatttcagtttgtttctctatattttttgtattttaaattggacaagtattacttttataataagaaaaaagataattactaaaaataaatgagaaatacatatacatgtagaatttgcatagtgtcaagtaaatgataagggtagaaagagtgcagagaaaaaaaggatgaaaacgaaggtggctgaagaatgctttgtgacggaggtgggattgaaatgagctttgaaaggccgggtgcagtggctcacacctgtaatcccagtaatttgggaggctgcggcgggcggatcacctgaggtcaggagtttgagaccagcctggccaacatggtgaaactccgtctctactaaaaatacaaaaattaaccaggtgtggtggcaggcgcctgtaatcccagctactctggaggctgaggcaggagaatcgctcgaacctgggaggtggaggttgtagtgaaccgaaatcacgccactgcactccagcctgggcaacaaagcgagactccgtctcaaaaaacaaaacaacaacaaaaaacgaaacaccgaaatgggctttgaagaatggaagggatgcagataaaagagaggagggcgcagagcggtttggtcgttcgttggaccagtgtcggttcttcgctcgcgactgcggctcttcctcgggcagcggaagcagcgcggaggtcggagaagtggcctaaaacttcggcgttgggtgaaagaaaatggcccgaaccaagcagactgctcgtaaatccaccggtgggaaagccccccgcaaacagctggccacgaaagctgccaggaaaagcaccccctctacctgcggggtgaagcctcatcgctacag

SEQ ID NO: 9256 - DNA, 2300 bp, Homo sapien
gggtttcaccatgttggtcacgttggtctcaaactcctgatttcaagtgattcacccacctcagcctcccaaactgtcaggcctctgagcccaagctaagccatcatatcccctgtgacctgcacgtatacatccagatggcctgaagcaactgaagatccacaaaagaagcgaaaatagccttaactgatgacattccaccattgtgatttgtttctgccccatcctaacagatcaatgtattttgtaatctcccccacccttaagaaggttctttgtaattctccccacccttaagaaggttctttgtaatctcccccacccttaagaaggttctttgtaattctccccacccttgagaatgtactttgtgagatccaccccctgcccgcaaaacattgttccgcggagcctctcccaaaacctataagaattaaagataatcccaccaccctttgctgactctcttttcggactcagcccgcctgcacccaggtgaaataaacagtcttgttgctcacgcaaagcttgtttggtggtctcttcacacggatgcgcgtgacacaaagtgctggggttacaggcctgagccaccacacctggccacccccaatctttaagaatattctggccgggcgcggtggctcatgcctgtaatcccagcactttgggaggctaaggcgggcggatcaagaggtcaggagatcgagaccatcctggctaacatggtgaaaccccgtctctactaaaatacaaaaaattagccgggcatggtggcgggcgcctgtagtcccagctacttgggaggctgaggcagcagaatggcgtgaacctgggaggcggagcttgcagtgagccgagatcgtgccactgcactccagcctgggcgacagagcgtgactccgtcccccccccaaaaaagaaagaatattctgtatgtagtttttttgttttgtttctgacagacgcaaacgcactcttctagtaatgactaaagacttcttcgtttaattcaccaatgaactaatctgacaatttatgtaacaaataaattcctataaacataagctcccttgcccctctccagtggcacaatctctgatttgccatcctggttgcaaccttcattactaagtaaacgcttacgtaaaccttaataatgagattcgggcaatatgattaaatattggtttatttgagtgcaaagtttgaggatggcgacccggtaggacacagactccaaaagatgggggtcagtgcttcgaaagggagaagtttgagggtcgtttacacaggcagggtctgggaagcttaacaggatgtcaacattttccatagaaggttaacgcatagcaatttgattggttcaaggcagtgtttctttttgggaagggtctatttaacattccacattaaggatgtaatagtcaagcggtcatttatcttattcaatgcgtattttatctcagatgccatctggtctgagctgggaacaagaaaataagggagttaatctataacaaaaggtcggcaattaagaggtcgtgcttcgtgatctggtctccaaagtcaactttcctcagggactttcagaatccccaaatagactatccactttctttcacacttatttgcctctaacttgttgatttcttttttttttttctgttttttaagggttaacaatctcttgggtgcactctgacttccatgcgctttatagaaaaaattggtcctgaggccagcagcaacagtcggtctcaggaacttgttagaaatgcacatttttcagccccaccccaaacctactgaatcagcagttttgctggtggttctcaatctctctttaacgtgccctctgggtgctgcggatgcacgctgaaggtagaagatcgctgcaggagatttccgcgtcgggcagatgaaagcgctctgcaagcccgggtgttatctgcgggccgggtccgcggcttctctggtggcactaggaccgcggcggcgcggccctcgcagccaccgcctcgggcgtgaggcggagcgtagctgttcctggatcctgggcctggctcctcgacccgcccctggaggcggaccccacttgacttaaactctggggcccgggaggccgccggttttctccccgcttgccggggtggtcctcttccctttgtcggtaagtgtgagacgagcaccccgaggtccctccgccttccggggtccgggcggggcgggggccgggagccgggagccagaggcactcgcggtccgggcctgcgcgcggcgcagagcgcttttgttct

SEQ ID NO: 9257 - DNA, 2300 bp, Homo sapien
gttccatggaagtgctagcaacctgtctttccctgtggaaaaagcaaccttcagatactgcaaaagaaaaggagtgtgataaactcagaacaaacacaacagcagttggaatttcaaagcctgctaacatccacgttaagagtccttgttcagttgtgggaaattcaaattctcagaataaaataagtaatccctcacagcagacagctttgtcgatggtaatgcacaattatgagtcttcaggtataaatataacaaagggaacagaacttcagatagctgtagtgtcaccgttagttctgtcagaggtcaaaacattgtctgtcaaaggaataacacctgcagtgttacctgaaacagtgtatcccgttattaaagaaggcagtgtttgtagtttacaaaatcaattggcagaaaatgcaaaggcaactgctgctttgaaagttgatgttagtggaccagtagcaagtacagcaacatcaaccaagatttttccactaactcagaaggaaaagcagaatgagtcaactaatggtaattcagaagtcacacctaatgtcaatcaaggaaagcataacaaattagagtcagctatccattctcctatgaacgatcagcaaatctcacaggagtcaaggaatagtactgttgtgagtagtgatacattacagattgacaatatttgttctctggttgaaggtgatacctcttacaattcccaaatagcaaagatattcagctctcttcccttgaaaatggttgagccacagaaaccttctctacccaatcagcaagggattggcagcagagaaccagaaaaacaattagataataccactgaaaataaagactttggttttcaaaaagataaacctgtacagtgcacagatgtttcacataaaatatgtgatcagtcaaagtcagagccacccttagagtcatcttttaacaatcttgaaacaaacagagttattctagagaaaagtagtttggagcatgccactgaaaaaagcacagctaacgatacgtgctcgtcagctgctattcaggaggatatttaccctcaggaaatagatgcatccagcaactatactccccaagatcctgcaagaaatgaaatccacagtgataaggcacctgtcttatacctacatgaccagctgtcagaacttctaaaagagtttccttatggcattgaggctgtgaatacacgtgaaggttctgtgggccagcaaactacataccagacctcagaagatcaaactgctgataaaaccagttctgactccaaagacccagcagatcaaatacaaattacaatattaagctcagagcaaatgaaagaaatatttcctgaacaggatgatcaaccctatgtagtagacaagttggcagaacctcagaaagaagagcccatcacagaagtagttagccagtgtgacctgcaggcacctgcagctggacaaagtcgtgattctgtgatactggactctgagaaagatgatatccactgctgtgcattgggctggctctccatggtttacgaaggagtaccccagtgtcagtgtaattccatcaagaactcatcttcagaggaagagaaacaaaaagagcagtgttctcctttggataccaacagttgtaaacaaggagagagaacttctgatagagatgtcactgttgttcaatttaagagccttgtaaataatccaaagactcctccagatgggaaaagtcattttcctgaactacaagacgacagtagaaaagatacacccaaaacaaaacataaaagcttaccaaggacagaacaagaattagttgctggtcagttttcatctaaatgtgataaactaaatcccttgcaaaatcacaaaagaaaaaaattgaggtttcacgaggtaacctttcactccagtaataaaatgacagcatcttatgaacaagcttctcaggaaacccgacagaagaaacatgtaacacagaactcacgtccactaaaaacaaaaacagcttttttgccaaataaagatgtgtataagaagcatagttctttgggacagtcattatcaccagaaaagataaaattgaaactcaaatcagttagcttcaaacaaaaacgaaagttagaccaagggaacgtattagatatggaagtaaagaaaaagaaacatgataaacaagaacagaaaggaagtgtgggagctacattcaaattaggtgactctttgtcaaacccaaacgaaagagccattgttaaagaaaagatggtatcaaatactaagtctgtagacacgaaa

SEQ ID NO: 9258 - DNA, 2300 bp, Homo sapien
tcaacctcagagttggcaatgatacgacactaaaagcacaaacaaaagaaaaaataaattggacttcatcaaaattaaaaactttcattttttaaaggaccactttatttatttacttattattttgagacagaatctcaccctgtcacccaggctggagtgcagtggtgagacctccgctccaggttcaagcgattctcctgcctcagcctcccaagtagctgggattacaggcatgcaccatcacatccggcttatttttttatttttgtagagacagggtttcatcatgttggccaggctcatctccaactcctggcctcaagtgatccacccacctcagcctcccaaagttctgggattacaggcatgagccactgcgcccggctaaaggaccatttaaaaatgtaaaaggacaatcccctggatgagagaaaatcattccaaatcaaatatctgataaggggcttgtatctagagtatacaaagaacccatacattcagtaataaaatgataactaactcaaacaatagacaaaggatctggacaggcattttgccaacaaagataaacaaatggccaagaaacacataaaaaagtgctcaacataattagccatcatagaattgcaaatcaaaatcgcaacaaaatatgctactttacatctactagggtggctggactcaaaaattcagatgataccatggttgtcaaggatacggagaaatcagaccccttgtacactggtgttgggaatgtaaaatggttcagccactttggagaacaatccagaagtccttccaaacatgaaactttgagttaacacatgacttagcaattccacttccaggtatgcccaaaagaaatgaaaacatacgtccacaagaaagttgtacacgatgtttataacatattattcataatagccaaaaggtggaaataacccgagtgcccataaactgatgatggatgcaaaggtggtatatctaacaatgcaatattattcagccataaaaagtaagcagtggccgggcacggtgggtcatgcctgtaatcccagcactttgggaagctgaggtgggtggatcaccctatgtcaggagttcgagaccatcctggctaacagggtgaaaccccatctctactaaaaatacaaaaaaaactagccaggcatggtggcgggcgcacacctgtagtcccagctactcgggaggctgaggcaggagaatggcgtgaacctgggaggcggagcttgcggtgagccgagatcgcaccactgcactccagcctgggcgacagagcgagactccgtctcaaaaaacaaacaaacaaacaaacaaacaaacaaaaaattagtcgggcgtggtggcgcatgcctgtaatcccagctattcaggaggctgaggtaggagaattgcttgaacctgggaggcggaggttgcggtgagccgagatcatgccattgcactccatccagcctgggcaacaatagcgaaactccgtctcaaaaaaaaaaaaaaaaaaaaaaggaaagtagtatgatatatgctacaacatagatatattttgaaaacattatgttaagaaagaagccagtcacaaaagactacatattatgtgattttatttatatgaaatatcaagattagggaaagctatagagacaaaaaatagtttagtagttccttaggactggggtaatggggtggaggatggggatgggataggaggatgacagctaaagggtactgtggggaaaagcaagagagatcagattgttactgtgtctgtgtagaaagaagtagacataggagactccattttgttatgtactaagaaaaattcttctgccttgagattctgttaatctatgaccttacccccaaccccgtgctctctgaaacatgtgctgtgtcaactcagagttgaatggattaagggcggtgcaagatgtgctttgttaaatagatgcttgagggcagcatgctccttaagagtcatcaccactccctaatctcaagtacccagggacacaaaaactgcggaaggccgcagggacctctgtctaggaaagccaggtattgtccaaggtttctccccatgtgatagtctgaaatatggcctcgtgggaagggaaagacctgaccgtcccccagcccgacacccgtaaagggtctgtgctgaggaggattagtaaaagaggaaggaatgcctcttgcagttgagacaagaggaaggcatctgtctcctgcctgtccctgggcaatggaatgtctcggtataaaacccgattgtatgc

SEQ ID NO: 9259 - DNA, 2300 bp, Homo sapien
ggtcagatgccacgggagcacacaggaggggcttcccacctggagtgcgagataaggaaagatgggtcggatgttgtagtcattatcatccgcttctctacaaggctggaatttatggtggctgcacatttggaatgttttctccttttatttatttatttttagatcagacaatcacaagagaatattcttttgttttatttttagatcagacaatcacatgagaatattctgttgtgatcgctggcgtttagaaggaaacttgtctggtttgtgaagcaatggaaaacacatccagacagcctgctagtggaaactttggaagggcactgtcatatgctttttctcccacgccatcaacaagtgtccttttttttttttttttttgagatggagtctctgttgcctaggctggagtatagtggtgccatctgtaccctccacctcctggattcaagcaattctcctgcctcagcctcccaagtagctgggatcacaggcgtgcaccaccatacctggctaatttttgtatttttagtagagatgggatttcaccatgtgggccaggctagtcttgaactccggacctcaaatgatccatccacttctgcctcccaaagtgctgggattataggcgtgagccactgtgcccggtcaacaatcatcttttttttttttttttttttttttaccaggtacacaatgatgggagagttgagtcctgctttctaacttagaaaacgcatgtgtgttcatcacctggtcactgagaaacagctctggaataggtgccatgcagaagaagagagggaactggaaagacccactgatctgtgggtctcacagcctcccgttacacagaaattgcttcttttctctcatgttgcgttcttcctcttgattctcgacccttctccactctttcatttactccactcttactttgctttcacctccttttgtaaccgttcatcatcactcttcatatggattaatgtgattatcttaaaagcatgtaatatgtagttgctgggtttgtatgagtaatgagtgaacctgaagccaacataatgatcccgtttagtgctcccgagttaagattccagagttgcctgactttggacaaatcacatctccctttgcctttcaccccctgtaaactgaggataatggctcttacctcaaagcattgttaggattggagagaacgcatgttacatacttagaagaatgcttggtatgggtctcaagaactcttagctcttattgtttaaaaaatgcttattacagggcatcgttggtatcttatatagggaatttcaagcagttttcctttattgaagacacagagtaaggtgctttgatggaaactattggggcaagatatacagtacctagctagaggtttcctgggtgcatgtattgtggagatattttttttctgagtggatagcgctcttgtgatacgctgggtgagggcgagcaatatttagcggactgtcctgtgaggatagtaaggttatctggtgagagtgttaggtggcccaggccagacttgggagaggcagggagagagggggacgacggaggagggcgccttggggtgcgtcttgaaagctttgggaaacccagcggtcttttgggggcaggtggcccaaaaagccttctgcgcgcccaggggacgaggaggatgcgcggaccgcgaccgcgatagttttgtttgcttttctcgggagaaagcgttccaggcagtttcctgagcttcggccctcgacgtagcaaaagagcccgggcgcccacgccgctctcggggtcttctactgccaccgggacaaagccctgggaggagctcccgcccccgcgagccggacagggcggaggctcccccgccgcgcgcgccccaccgcttcccagtcccagacccgtcgcctgcgcctcctcctggcgcgcctcacggtgcagcgggcggcggcccgcgcgcccggcgggaggcgcctcgggatgtttccgtctggtccttccctccgccccccgcgctgactccatccgctccccgccccctgctcggagccgccgccacgcgggaagggagggagccggccccgagactgcatcattccgcaccggctgctgcagggccagagggagcaggtggagcgagagagcgagccgcgagccggagcgcgccagacccagggcgagactgcagtgacgcggcccgggagacatggcggacgggcgtctctgaataagcagaatccggagcccctcgctacccgcggccgccgcagcccgggcca

SEQ ID NO: 9260 - DNA, 2300 bp, Homo sapien
tttttcataggcacagtgccttctgatgaagtcagtaaatgcttatgaagcaccgtccatctagcactgtgctagatgctgaagattcaaagaagactaacacatggtccctgccttccagaagactcagcctcctggggatgtcaggatagaaacacaattacagttcaacgttacacatgctgtaatccaagttatgagaacaatgcagaggaagcaactaaggtttcctagaggagcggaaaagacttcacagaagcaattataccttagtttgttattaaaggataagaagttgttttccagaggaggaggaagtaattccagacagaacagtaggtagagaggctttggagtgacaaaatagaataatatattcagggaatgctcacaaaggcctatgtggctggaaataagactttttttatttagaaagtcaactttggaatgtgtggagaaagtggtgaaagcagaaatcagcaaatccagtgagttatggatacttaaaattacttaattctggaaaaactttgcacagtcaatggacaaacaaatctacaaacaaaactgaggctttggggtatttgtcacaaacaataaatgattttgtatttctgtttcagatctagctcttctgttatcccccattttattccccttagatactgaccatgggattctatgtgcttacaaatttgttacatctacatttcacaacttaaacatacttttctgttttaaatgaatatgtgtctaagctttttaaacactaaacaactgccgtttttccccaggtcaatttctgccttgtggataattttctgaatctgtaatatttctgaagattcctccaagtatttacagaacatacagaagtattttatgagtaaagtctcattttaatctgaatttaaatccaatcaaaactcacaagaaactacttcggaatcaaaacagtaacaaagtaccctatcccaacattgatttaattaagaaagaatttatttctatagatgttggcactttgcatatgaaggtttgaagctgcccatttcaagcaacaaaaagaaatgttaaaaaccaaggtagtcttcctgggaaatcccgttagtaatggatttctctgctagtaatggggttgttcattagtatggggtatttgtatacactttgaaaagttatagtttccagtttgtaaaaatcatgtgttcccagtttggcttcaacatgcaaactgtgtgctatgcatcaaacaggcaatccctaagtatacactgattttatgcattgattcagtcagtgtgtttttttacttgtgtgtgtgccagggtagctcttgatttgaaacactattaattccaagaacttcggacatgcccaaatcccagattcaaacaaatgttttaactcattcaacattttataacccctacttttatggagattttgaaggaattatatttcactatatttcattgtttggacaaattgtatgcaaattagaaagtaattagttctttatcacttcttttccttaaatgtatgataacatggatttatagtttatcatatactcatattataaattacaatggtgtatgtcttttattctatgttttgggcccacagagcacaggtgacaaaatttgagttctaacatattccaatttgattattcctattgaagctgtgcttctttactaaataattggtaaaaaaattttttttgtataaagtttcattttggctccctccttgtcctaaaatcgcatactttcagcaatctgcattaaatatttattaaactactgtcattctcttagctcctgatactgactctggctcgcagcgggcttctagggcaatttaaccacattatgaattcacaacacattttgacattaaagaaaaacttccctgtgtccaaagcgcatacctatgtttatataaaatgtaaccaaatcaatttcactttccttttataaaagaacataataggcacagcatgaagcaatctgtatgatggattttcctgatatgaaaattgtaagcagtgtgattttctgctttagacagctgaggtggcgctagctaatctcaagaacaaatatgaaaatgaaaaagcaatggtgactgaaaccatgacgaagcttagaaatgaactgaaggctttgaaagaagatgctgcaaccttctcatccctgagagcaatgtttgcaacaaggtaacagtattttcttcctatgactgggtgtggtaggtggggtaaaggctttaaaattcacagccctgcctttgtg

SEQ ID NO: 9261 - DNA, 2300 bp, Homo sapien
gaaaggagatccaggagccactcagcttattgagcggacatgggtggcacagaaatggagtggtccatcagagaccaaatggtaagtcgtaaagcacattgcaggagctttcgttagtcatacgcctattaagtagtggtcgctattaccaaagcaaccaggacgttttgtgttctttatatgagtgctattttccacagtgtcatttattatgcaacgtggagtaaagagttgaaatcttcaccaaaataagggttcaggttaaagtacagaaacagaaacaaaacgattcgacatgaagttcccaaccatagcagcctaaccttctgctcttttctacctgcatggccttgctgttcctaaacattgtcttcatttcactggcgttgtatctgcctagtaccagtattagtgagactgtggattttatcagagttcaatgaaagaaagcttacccctgccctcactttgtgttttttatttttccccctttctcaagcaccacgtatttggacctgagaagtggcatagctgctaagttgacttttaataaaaaactgtttgtgcctgagggaaatatatgcctttttaaaaagtacctcagaacatgttcgtagatcgtctcatcggttttgtttggtgggactgggagttcagcaggaagtattgtctgtgtgtgatgacggggcagtattgccagtcggcaatgttgtatttgcattctttatccctaactctgaatctaggactccatgaaaagccgggtcacccacaaaacatttcttccaatacaaagtgtattattacgtctattataaactagtttcatttcagttatttatcttcatagagtgggaaagtctttttctgaaatactaattctatgaaaataataattttagtgaatctttgccaagaagttatagaaacttggaaataaatttctcattttcagcacaaaattaagtgatagtccctaagcagtaagagagaataccatgtatttacactgtggcatcatttagtatagtttacactgagccatatttatttataggcatttaaagtgaatcagtatgtgtagtgttgataaaaatcagtatctgtaaagataacatcaggaattcaaaaggaaattgaaaaggggcagaactagtgagaaccaaaaagaatgaactccagtaagactaattgaagacatacttggagaggaaaaataaacagcagaaatgcactaaaaaatactggctaattattgcaaacagagtgagcaaagattaatgctaactagtaaaagtagttagcaaagtaaacaggtagttttttaaaagtaagcacaattacaatattgaatagtatggagaaatgcttttctcctgaggattttccttaatcaaaaaataagaagaagcaataaattgtctttggcctgagtgctgagtggcataaataaaggagcttggcttaatctttctggtccacacataatccattagatcccattcatatatccaactctggattctaataaaataatttggagaactttgagaaaaaggaaaactgttaaataagaaaagacctatttagaaattatactttagtctaacgaagaggaggtacaatagtagtcttcaagaaaagaatatttaacaaatgatagatatcagctatagatattgttactaagtctagaataaaaaaggcttcagtgtgaaggatgtatagtaactctaggaaagagatttttaacactgggaaattaacgtggaaattgataatcataaagaatatttgttttgtaaaaattgaatatcattggtggtctagtaagtattaagtggcaagataggagaatgcatttcagttctgggagctcataatcctgtgattcttttattttaagttttaaaatacattaaaattttactggttaatcataaaatattttatatttgaaaataggatggcaatctttatttttccaagatatttgttggaaaaaaatgatcgttggtattattttttctttcagctatattccatggtatctttaaaattgttcagaatataggacttttactaaaaaaattcaattgtcagagtctaaaaaaacaatgtcctcaggaatacttcagaaatagaaggtatgcaatcccttagtggggggcaaacacatttcagatttcgtctttatttaaaaggatcttcagtctacaacatttgcttttttcgtgctttggaaaatatccttgtgcagataagttcttctgtttgaaacaagcatgaaacattggtcc

SEQ ID NO: 9262 - DNA, 2300 bp, Homo sapien
gaaaggttgaggctgcagtgagccaagatcgtgagcatgggtgacaaagtgagaccctatctccaagaaaaaaacaaaaaaatcttgtatatcattgcaaatgcatactgtttattcgtagtgggtattcagttttgtattctgtttttcctcccacttctgggaggtggtgtagcgcaatgacttagatccaagctttggtctcagacaaatgaggttctcgttccaacggtgagaccaagggcaaagagcataagttctgaatctcagctctatacctaaaaaatgaagataataatacctacttcataggccctgtgaggtttatatgaaatatttgtaaagtgtttattatagtgtctagcacatactagggaccagtaaacagtacttgttaatagaaacatttcccctttgccacatagtctttctgaccttattttattttatttttattttattttattttattttattttattttattttattttattttattttattttgagacgaagtctcactctgttacccaggctggagtgcagtggcgcaatcttggctcattgcaacctccgcctcccaggttcaagagattctcctgcctcagcctccctagtagctgggactacaggcgcccgccaccatgcccggctaatttttgtatttttagtagagacgggatttcaccgtgttagccaggatggtttcgagatcctgaccttgtgatccacctgcctcagcctcccaaagtgctgggattacaggcgtgacccactgtgcctggccatgaccatattttaataactgcatgatagtgtgtcagttgtgtatacattaatatttgcatcaccattcttctaattctggattcttaggtacttctaaatttgcactagaattttaaaacagtctttagtcattcatcagatttactaaattcacactatgttcaaggaccttggcttgctgttgacacagggttcacagtggcactgtccctggtcttgaggtgctcacagtctgaaggagagatgtgtacaaataactgtgccctgtggtaaacaccatcagtgtccaacttattgagaaagtgtagaggagagaacaaaaatgtcagactctgcctagagagctcagggaagtcagcccaggctgaaatacagtgatgcagtcatggcttactacagccttggcctcctgggcccaagcaatcctcccacttcagccttctgtgtagctgggactacaggtgcgcaccaccacacctggctaatttttaaaaaaattttctgtggagatagggtctcactgtgttgctcaggctggtgtcaataatggacattttgagtgcctatagtttatattttctagatttatagtttacctctaatagttggtttttatgtggtatatttggttttcagccaattttatcttccaaggacttaacctctgattccttcatgaggaccagggtgtgggcaactgttcctgcagaatcagtatttaaccttcacatggtgaaacagattaaactcagtacatagtataaaattaagatattttaatcctgtaactgggtaagactctagatgaaaattttaaatccagcaccgcctctccccacaaagttcaattaacacggtaaaaatgaatgtatgtttgcccagaaattattattttataacacaattgatttttgaaaactttattttcaaactaacattttttccaaatttgagtattatatttgttttaaaaaatccttataaaagcagtttcagttctgatgtggattgcaaatcataaaacaacttgctgatgaagcttagatttctagaatgctttatctttagttttcaagttaactttgaggttttattttctgtttgtcaagtcaagcctcttgtgacctttctccctgaatgagcagagttagctatctgaaatgtcaggagtttgtaccaccaagggtaaatttgctggaaagcttttagttgggctgcactggcttgtttaaatagccaaacacctgctaggcaagccctgcgcatgtgagtggctatatatgttccttcctttaggatttgcaaggctggagcacaaagacagcgattgttacccaataagcagtagtcacacacttctaccaatcgccttaggagggctggttaccatggaatccaccatctgttcactccccaccggaatgtgattatccttgctgggctgggaagtggggaaagcaggggagcctgtgctgggtgagattatctgcaatggaccgggttaatggg

SEQ ID NO: 9263 - DNA, 2300 bp, Homo sapien
ttgacacagggcctcactctgtcacttaggctggagtgcggtggcacgatcacagttcactgcagtccccacctcccaagcttaggtgatcctcctactgcagcctcccaagtagttggggccacaggtatgcaccaccacgacaggcaagctaatttttttgtattttttgtagagactgggttttgccgtgttgcccaggctggccttgaactcctgacctcaagtgatctgcccgtctcctgcctcagcctcctgagtagctgggattacaggaatgcaccaccacgcccggttaatttttgtatttttagtagagacggggtttctccatgttggtcaggctggtcttgaactcctgacctcaagtgatccgcctgccttggcctcccaaagtgctggaattacaggcgtgagccacggtgcctggcctctcctcacctgctttaattctttactcaaatgtcacctttttactttgaggtttacttttacctttggaggtttggagtagaggagggatactatctgtctaaaaagaaaaacaacatttagaaatataacagtatgggccgggcatggtggctcaggcctgtaatcccaggactgtgggaggccaagatgggcggatcacttgaggtcaggagttcgagaccagcctggctaacatggtgaaaccccgccccccacccgtctctactaaaaatacaaaaattttcccagggtggtggcgggtgcctgtaataacagctacttggggggctgaggcaggagaatcacttcagcctgggaggaggaggctgcagtgagccgagattgcgccactgcattccagcctgggcgacagagtcagactctgtctcaaaaaaaaaaaagaacggtatgagcaaagagtgagtaaggcagttatcagatgtctactttgccaggaatcaggctacagcaaataaaggtttatacataatattgataataaatgcccagctcttcccctgtaaaactccaatactctaagatttttttcatgaacaccgccccccgctgctccgacccctgcttttttatttatttatttatttatttggtagagatgaggtctcactatgttgaccaggctggtctcgaactcccagctcaagcgatcctcctgcttctgcttcctaaagtgctgggattacaccgcgctcggtcctgaacacacattttgtttgtttgtttgtttgtttacaaaacccctggagaacccgcgtattctaacctgggctggtttttgtatttttgcaaaataacaccccacacattctcgtatcagcgtgcagatttttttgcacccagtttggttgtttgcggccataagcttttctttaagcctttccaacccgtccttctagagaaagtgtcttcataaggaagtcacactgctcacgcctgtaatcccaacactttgggaggccgaggcgggtggatcactaggtccggagatcgagaccatcctggaaaacacagtgaaaccccgtctctactaaaaatacaaaaaattagccgggcgtagtggtgggtgcctgtagtcccagctactccgaaggctgaggcaggagaatggcgtgaacccgggaggcggaatttgcagtgggccgagatcgcgccactgcactccagcctgggcgacagagtgagactccgtctcaaaaaaaaaaaaaaaataaataaataaaaaataaataaaaggaagtgacactggataattaagagacacaccattgcgcctttaacacatattcacacccagcactgtcacatccatcgtgccttgaggacaggcataaatttacggccttcctcctgcgctcccggcctgctcctagcctttgactagagcctgcgcagcatcccagtcccaggctagggcccaccggtgccgcgcagcctcctggaagctgtggggagtagcgttcctccgctccagaactacaactcccagcaggccttgctcctctccacctccctcgcagcgcatggcctgccgggagggggcaggtagccggcgggcccggtccaatgggtgccggcttccgaggagagggcggaggagaggaggaaggaggcgaactgtgggccccggccccattcattgccgtggccggcgggcactggggccccgtgttttcagagtcatggaggcgctaattcctgtcataaacaagctccaggacgtcttcaacacggtgggcgccgacatcatccagctgcctcaaatcgtcgtagtgggaacgcaggtgagagcagcaggcggcgttcgc

SEQ ID NO: 9264 - DNA, 2300 bp, Homo sapien
atgctcgggacattctaatttgaatttgtcagtttctttagctttgtacaagttactttgataatattagcaaattagaacagtaggcaattgatcagtgtgttaaattagccaggttacagaaaggactagcagttgtcaacactatttcctggaggaagaaatggaacatttttataggataacctcaaccacagatacttcttcaagatacggttttatgaggggagttgtttgagtttaacacaaaggtgttcaggttagagtgacttttaaaggctttgcggagttttctgtgatctctggacttcaaattccacatggttatgttgaaggcttaccacgttccacatttatgtgaggacagtttacatcactgtttcttagtgggaaagggggagaagatggcagtctgttgcccctcatttgagaatccccagtacagggagccactgttactgacagtgtattgtatccttcaggtgtgtgggcagaaaaaaaaaagattaagaagctttgggttaaatgatttcttatttattttaaaatatgataattatggcatgagtcccaacagtgagaggatgtatctgtaagttactccacacttttcaattaacatgaacattttttagtaggcatatatctcaatacttggataatcacttttgttttgcttgtgtttcttaggaacaaaggagaaacaggctagccagagaattaccttcagctgtatcacgagacaaggtaaaaaaatgtttttaatgcatattcccaatacctaaagatagattgatgagctcagaatattactcagtcctaggagtaattttttcttcttttcctccctttaacactccattggaactaactgagtaaaggcatacaagtttaaaatgggttttgagtgatttaaagataatagtattttgaattcactgacataaatgcttaaaagtagatttaagcatttatttaagcatttaagcatcaagctttttaaaaaaattcagtcagtgactttatcaactttgcacatagctgaaatgactcaagattttattataataagagggtttcttggaaaaaacagtatgcacagaacagaggttttaattactagtaataattaaaatagttgtaatactaaagtgtgtataaaaatcttttaccttgaattctttgccagaaaagaatcttattaaataccaaaaataaaaatgaagcttttggatttggatttttcttatgtattcatctgaaggaaacttttaacaaaggtgacaatggtgaaggaaataaggcagaataaacaatctcccatgattattttcatctttcatgttattttacgatttcattacagaagggaaaaattcatttatagaatgttcctgaatgcatttttgcatccttgattttttttcccccctggattttttgcctttagtcttctaaagttccaagtgctttggcacctgcctcccaggagccctcccccgctgcttctgctgaggctgatggcaaggtctgttctgattcttaatctaagcctgcatgccttgttctctggtacaacataatcttctggaaacaatacactgaatagaagaatattaatatgggatactgtgctaaggtcagatcactttagtctaatatatattttaaaattatataacaatgcaatgcatagtttatattgttgacatgcttttgcttgcaatatagaagatgcacacagaaaaagtaatttaaagaggaaattatcctgcactttttgaatttcaacccattggtatttaaattttgcttgttaaattgcatgttttaacatatcttttaacagttaattcaggacagcagaagagaaactaaaaatgtgagtctcttgcttcagaatggaaatgttggtacctttggttctcactgaaacactgtctataccaccattaaagaacctgtttgtgtagtggtatctatctcttgtctgtgttatgttcttaatgttccttttatctaacctgtggaagatggcattaaacgttgttttaattagtaacaataataggctttctcactgttttgttaccttcaagaatagttttaaatttagtattttggtaggaaattcagagatttcctagatttcagagatggaattgtatttttggacatttcctttcctctttaaagatcttgagatctgttcagtactaatagatctaatgcttctttcttatgcttccagttagtttgcacttgttaccctatatatagcttcacatatgcttcagaag

SEQ ID NO: 9265 - DNA, 2300 bp, Homo sapien
aagaataggctgatggtacctgcagaaagccacaaaatattgaccaagaaagcaatgatttactgccgacctgagactgcacacgtttcacaaaaatctttttatcatcctttctcttaattgcccttaaaaaccagaggtggtctttgaacgctagctcactgcatcccccagggttgctggtctcttgaataaagctaactttactttcactacagctcttctcttgggtttttggctttcaagtgacaagtggcccagatgtgagtttccttacgtgtgctcaggagaatttcctgccatacctactgaaatctgtccctgatcaaagtggtggaccatatgactgcagattggccttgcgaagtagctcatgcctgtaatcccaacactttgggaggcagaggtgggaagcttgcttgaggccaggagtttaggaccaccctgggcaatacagtgagacccccgtctctacaaaaacaaaaaataaaaattagccaggcatggtagtccacacctgtagctccagctacttgggaggctgaggcaggaagatcgctggagcctaggagttcaaggctgcagtgaaccatgatcctgccacggcactccagtgtggacaacagagtgacacttaaaaaaaaaaaaaacactgaagatcaacaggttatgattgcaaattttaagatattttgaacacactattttcttaagcagttgggagtatgtttaatagcctattgaatgagtatctcaaaatcctattgaagttactatttggcaatgagaaactaattcactgataattatacatgcaaagaaactaattattaaaataagttttcattttgttagataactttataacgttaaaaaatggaaaagtcctgtagggaatgatttggaacatggcccagatcccagtcacaggaccaaggcactcaatcccccagctgctgggagtgttggttgcttattgctcacagctgagtcccttcctgcacatctcactctccaaaagccttaacccagcgttttgcttcctccccagaaacatcccacatttaatgagcagtcagtaagagggtctaaaggtctgccccctggcctcaattcaggatgactctgaaaggaaatcccggctccagagcccttactggattgcctgaggcctctattacaaattgttcacagttcaacttctttctccctccgcccaacccggcctccctcactccattataggtgttgttcttaagagcacactccaattaccctcctgcaaaccagtctcccccccaactcagagtccagggaattctacctaagacgattttgaaagcggtcctagaaatcaggctctaacatgggattttgaagctagatcacctgccagccagctgccaataagaacctcatccctggtcagtattcagagcacctgtcacgctgcacgatgtgattactaacttgaatccactcatgctaagctgtgtcccaacctagttaactgtatttaaaataaataaaccacaggacttgatgcatgtactttattgcactgagtttttcttgctataccttggacaagactgccacctcctggaagagccgatgaatactggggacgaggtgcaattagggaatcggtactatgaaattgcttgcgtctcagcagcaactccctatctctccgcgaacttaaaccaattcctaacctttctcaacctctgtgaacagctttttgcatggaaccaagacttcaaagaacttgcgcatcacaatctttttacgtgaaaatgtaaatacaagttagcatttgtgaagcgttatgtgccaaatgctttaatttttaaggctcacaacagccttatgaggtaggaactatcataagcagatccacactgctgatggaaaaattaagtttaagggaacgtaaggcgacggctctgaggcggaatcgccacttggagtcgggactcaactgctgagagcgcaagctccgtaactacgtaaccgtctcgggcatgcgcagaaaaacactgaagcaccttccctaggagctgtaagtaggtgggtgtggtgggagcctctgcaatcccagcattcccttcgtgccgctaccaagatggcggcgcccatcttgcggtccttttcctggggccggtggtctggtaccctaaatctctcagtattgttgcccttggggctgcgtaaggcccactcgggcgctcaggggttactggcagcgcagaaggctcgaggtctgttcaaggacttcttcccggagacggggacga

SEQ ID NO: 9266 - DNA, 2300 bp, Homo sapien
actatgtagtagatacttttattgctcccatttatagataagagaatgtacagagttataaaaatctaaaaaaacttgcttgtggccatatacttacaaggggtaagctaaggttaaaacctagattttcctcactcacaagctgtgcttttaatcaccttccctcccctcaaatcacctaacaatccaacaacaagatttctatgtgcccaattattggtacctacccaacaggataatcaattccaacaacacactttaaaaaaattaatttgagaggaaaaaagtatctgaggtttggctcattaaaataaatgagaaaaattcctctctagtctcctggtgaggaatctaattggaggcagagctgacattttaagtcatggctcttcaggtacaaaataacaaggaatgccccaactgaccctgtatggacagatactgaaattgtctctcaaagcagcagattctggtctgccagaagaggccatgaaaagagagagagagagagagagagagaaacaggaatgttgctggacgtttctatcatcacttaccttcagttcacccctctcttttcaattacatctcagcatcatggttggatgtttccacctggctacataagcaagctttacacaaggtgtaatttgcctaaatagtggtccattctattggggtgggagcaattgcttccaggactcacatccatatggctcccacttagccatgtggcctgctgacaaagggtggcggaactgtcactactctgttgtccacgctttcagtcctttggtttcctcttcactccctggacgctcatgtaaaaagggaggccatatacctgtgcattgtgtgtctaagcattcagtgtgtgtctaaaggcagaagggtgtgggtaggaaaacaaagacgagggaagctgcgttctccaaacacttcagacttgagtaagtggggttttgcagcaattgagtgatttgagggaaagtgaacatacaaacccaagcaatcaaagggaatattatcttaataccagggatacatgtttttctttctgcctcttaagtccaaagaggcaaatcaggacaagtggctttggttgtaaactttaaggtcaaggatcctttctgttgagcttagctctcaagttctcagtagtcaactgcggtgaaacataattaatagcacgataaatacaagttgtggaagattcgattgaaagttggaggccctctccgtggatctctctacaaagagcctgtaataaagaggacttaatcaacgttagcagggctatttaaaaagcatcgtctattaaaattcatttcttctctagagcctcttgttggagtttctctgtgtgggtgtgttcgtaagagaggaatgggttagcaagagtactgggtacaatttgtgtatccaagagaaaacagaagctctcaatgaggaagaacatatgtttctgggactgcatctgtgcaaaaagtacatagtcctgacgttgtactaagaaaaaaaacactctctttagaaagtcttttatttcacacgttatcttcttggcacatttccctcatattgccctttccgcctgaccaaatagccctttctcaccctcaggtccaggaaaaccaggaaacgtttccaacagtgcgacaaagcctgactaaccagacatactactcgctcggggatcccggaggcaagcctcagtccaagaacaggagtgactctcgagggctcacctgcctgcagggcagcccctccctgcatcgagcggaaatccatcctgtccagcgcggggcgtgggcagagcggggcgcggccccggcaggcggtatccgctgggactccgacaacgtgcgcgaccccaggcgaaccgcgcccctctccccacctccccgcgggcgggtacaagtctccaggtgtccgcgcgctcagcgggtccggcccgcccccgcccccgcccccgggcccgactgcgcgtgcccggccggagccgcgccccctcctcagggaaggccgggcgtccggcccacgaggccgagctcccccccggcccgggcctctcaccggcgcggggggcgggccaggggcggggccggactcgagcggggcggggctcgcgccagcgcccccagctccgtggcggcttcgcccgcgagtccagaggcaggcgagcagctcggtcgcccccaccggccccatggcagcccccggcgccccagctgagtacggctacatccggaccgtcctgggccagcagatcctgggacaactggacagctccagcctgg

SEQ ID NO: 9267 - DNA, 2300 bp, Homo sapien
ttcttgtcatcttatccttcagcattgaaaaagatgaccttcaatgcagtttttactttgcccaaaattcttacctgagcttttagttagtgacaaacaaaactgttttgattcacctgctaatgagctgcgagatggtccaaagaacaaagaaaaaaatcaaaacctgtgatattcattttagatgaaagaaaatttttttcagagaaatgaattcagaaaaacgaatatccaagtgaaattaactctgcttgttgtgaaaacacagcagtaagagtagcaacaggccaggaacagcataaacaaataccaggaaagttattttcagaatttgtttacctaatgtttaacactgaaatcaaacacaagagggtcattagggagaccttctgcattactccacttaagcaattagaatctgtaagtagtataaagataattactcatttggtcctcctacacagcaattagttcatatggtaaatatgaaagtacagcattgcattgcaggctgttttctaccggtctgtctgtgtagactgtagcagaatggggggcaaaaggcaattggaaagggccttattaaagtgtgttatttagttttgtgcatacagtagatgtttaatattttttgattgacagtgaaattatttctttagacaatttgacttaaaaaccacccaagtcagtgtgcataaagacaaaaaccaaatgaagcctgcagattttagtttgtcttaattcgtggtaaaaatagtcctagttaaaccaatcgtcctatggatcaggtcaaaatgattcaactaatgaatgcttccctactggagtgctatgcctaatatttatactaggtttaccatagtcctgtgcaaagcaaataatttaccatgaactgattagctgtttttaaaaaagactacttattctactagcatagacacgctaacaagttcaatgtatcccacttcaaaaataaagaatccctcatcacaagagggttaaatcaatcctcaggttatgatatgggatcaaactctgcccgaaaacagtttaaaaaccatataaacatattatatcctgaagcccatgtttattattttgtcgctttagttctactgatttgcacccatttgcattaaagaattataaaaacaggtgagcttaagacatccgagtccaaatctcccattttacagactcaggcaaagacccgaaagcaggccggccgtggtggctagtgccagcattttgggaagctaaggcggtaggattgattgagcccaggagttcgagaccagccagggcaccatagtgagatccttgtctttacaataagtttaaaaaaaaaaaatagcgcctggagtccctggagtcctagctactagggaggctgaagtaggaggatcgccaagacctgaaaacaacttcaaggttaggctgagatgtgtgacagatttgaacttaatcctgttccctttaacacccatgtcttgttttaagtcgctaagaaaggagatggagggagtcaagttgtgcattctcaatcgccaattacggattaatcgacagaatcttatctgattattagtacaaataacattttattttgtgatctacctaagagggtttgcttattcacgcattcttttttctaattaactttttcagtttttcttcgattgggatgacttttccagaagggcagaagcagatagcacagaaagtagaatacatccgtggaaaagttggagagacaaaggcggcggggatggctgcactgatgcagggaaaagtattgggaaaacggagagggctcctcgggccaactctgggcaacgatgagcatccccggcctcggcaggggcgccgggccgcccgccctccctccctccctccctcgcgagtcccttcttcagaggacgcggggagccgggtctgcgcgctccgccgcctgtcacctagcgcccgcgccgggctgcgattggacgcgtcgccgccaggcacccgccagaaacaccagtgcgctggggagaggaggggggcgtgcttgcgagtcgagggcttgctttggcttttttacggctcccccctcccctcagcactccatgccgggtctctagttccagcgcgcctcggctcgctcgcgcggcgggagagttggcgcaaacctcgcggcagccgcagcctcctcgcgcgcctctccttcccctacgccctccgctcccgccatggggccaacgtggggctcctaagagttgccggctctcagcggcgcaatctccagccaaagtcaccgcggg

SEQ ID NO: 9268 - DNA, 2300 bp, Homo sapien
tctatttcattaaaaccccagaggtagctattttaataggtcttgatttaggagcagagctttggaaagcatttcaagattatcaaagatgttgtaatctaagagtagaaaagtgacaacagcttcatcgatttgcagatagtaaaaataactaacaaacgagtgaagtactctacaaagaactctactgggcccatggagcttcttagcattctcaggtaatatgttttacatcaatcgtttccaaatatgaagattattattcagtgatttgagatggctctctacaatctagtttttcacaatgttcccccagcagattttgatgtaattagtctgtaacatgaacatttttttaaaagatgaaacttgtatttcaacttggtgtatggaaacagaggagagtggaatgtaaatgtaaagttattgggactagtgaaacattcagttcagtatacattgtagattattttaacctataaggctatgaagttattttattactcttggtctgattttctaattcctacacttggttctgacactaattttttatgtaattttaggtaaatcattcatttttttaaaaccaacttcttttataacatgaagtcaagtagattattaataaagatccctacccattctagaaccccatatttccttgaaactttccattttatgtaaagggatgtgtgcagcatgtataggagtcaaatgtttaacataaactattggtggcaattgttatgaagaaaaatggagagcataaatgtctagtcttgttctactccctttaaaaacgacccactatttctagggtgggtcagtaagctgcagagtatatataacacgatttagcaggtcaacaggtcaggagctaattacttgtagatcacatcaacctcttgaagactgaatcatctggagatgtgttacaagtgacttaaacagataagtacagcatggactcaacaataaaatgggagataatggttaaaacaaagctaagcatcacatcagagtaggatcctcacatgactttattccagtaatgtaaatgttcccatcccagccctcattcaccactacttcctcttatcattgaggaaacaggcagagacagaatggaaaggcagtcagcttaatttaagaaactttcttaagtttagaaatactgaattagttttaacccagaaaaagagctcaattgagaactctgaggtttgcaaccttaaatcccgcctaaattctgatatattcctgccaaaggcaacctgattgaggttacctgagaaatagtttttctacaaaacatggccaaccatgctcaagacaaaattacaacacataatttatcttcggcattcttcaaattatttacctcatctcctgcccccagcacctaatcccagaatacaggaatttgatgatgtctacacagcctataaaagtccacaaatttaagtgcctactgtgtgaaagccattttggggactacaaacataaaggatgtataatgccacccactaagatgttcacgcttatgatttagtaggaaaaacagaaggctgccttacagatattaacaaccaaatttacaggcacacctaaaacatcccgaattctaaaatatatatgtattttccaaatcctacagggtaatatgactatgaaagtgcactaggaatgtcaatttaactaaatcctctgagagcatccacattttgaaagagttctcttttaacctaaacaaacaaacgaacaaacactcctctcactgaagttcattcggcattgacgggtctctggttcttcaagttttcatctaaaactctcagtctttgctatcacaaccaacgcacccttcctacactccaaagttgatggaatgaaatgtcttggaattgagggtttaattaattcggatcactggagagaaataacagaaataacgggggaaaaaatgtgtccattttagggcttggaattggaaacgtggggaaacgtcgccaccttctggtaagtgatggaagtgagcaggaaaaaagatccaagctaagaagcggcttttttttttttttttttttttttttttttctaagcagcaagccacgcacctcccgcgctggcgaaatccgagacccgccccttccggaagttttgacactttgtgcgccccgggcaatgcgattgagagggtaatcatccggtccgttatctaaacccgtcactccgggaaacagcgacccgatctttccggatccgcgctctcccagcatcctttgccttccggtatg

SEQ ID NO: 9269 - DNA, 2300 bp, Homo sapien
atgaccctgagctcttaccttatgaattctggtttgaggtacatattaaatcagaaaagaaaaaaagaaacttatacctcaaaccaaagaagcctctccctcctataaagggcctatttccttgtactttaattcctgccatgctgcatatgttcctaatcctaaaaaaacagaagctgtctccaatggtttaacacaaaagaggcttagcagaagcagccctaaacataggtatgaaaaaacacaaatcagatgtccagactgtaacattcagtggtctatgctaacacaactccaacacttatattcaggaaggactgctctgctacatagtatgtcaaccaaagcaaattctaagacaaggacacgcaatcctttaaattttactcttctaaagccagagctatctttttggcctacaggacagacagcactattatgggttaatagacaaggagcaggccttggagttccactactaattgccaaaaagactagaaggactcaaatgcatccaaccctgcaattctgggtttataagtcattctataagcattttaatcagtcagtgacagcttcctccatcaatcaaaaacttatttactcaactaactaaaaacatagctggcagcttagtaatttcctcatgctacgtgtgtgaaaaaactaatatgggggacgagttgctatgggaggctaagaaattaatgccgcaagataacttcactttgcctaaccgtgccagtgaaccaacagcctcagccagtgttcggttgttaaaaacctccataattggaaagtacagtattgcctgatggggaaagactttcacagagacagtagaaaaaacaacctgcctaggacaacagtattatgataagactaaaaacaaaactctatggagaaatgcccagaaggactcttacttaccagatccaaatcccttttctcgattctctaccctaagccacacttggcatcagctacaggctccaaatgcttggaaagcaccctctggcctatattggatctgtgaagcatgggcatatcggcaactgctggctacatggacaaggacatgtgtgttagaaacaatcaagccatccttctttttaattcctctaacgaaaggggaattcttagggtatccagtttataataaaaattaaaaaaaaaataaaactaaaaaaaccataatcacaaaaataaacacaaatgtcaaaaaaaaagtaaacatagaagactaaaaagataataaatggcctccagaaaaaaatcactaaatattatgggccagctacccaggtgcaagatgggtcatgggggtaccataccccaatctatgtgctcaaccgcatcataaggttacaggctgtcctagaaattataaccaataaaatgtcaagggcactaaatttattgacaatacaagcaacacaaaaaaatgctatatatcaaaataaattgactttagattatctcttagtctcaaaaaagtaagtaaaaatttaatttaaccaactgttgcctagaaattgataataatggccgagctgtcataaaaatcacagctaaaatgcacaagttggcccatgttccagttcagacttggtctggatggtccctggattcctcgtttggaaaatgcttctcaacttttggagaattcaaaaccctcattggtgggtttttgtttattcttggcatctgcctcatcctgccttgccttttacctctgtttattaggagcattcagtcaactatagagacagtagtaacccgatacactatcctatcgcacagttgatggcattaaccaaatatcagccactgccagtaaaagaagaagctcagctccacaaaaaggtgacataaagtggtgctttctattaacacctttgttatcaaaagcactaaaggcaggaaatggaagaggaattaagagaaattaaaggatgtgtaaggaaaaactcagttgtatgtaagaaaacccaattccccctgaggtcaagaaagaggtggaatcctttaaaaattaactgcctgtttttctgtctgtggctagtgagccttatctctccctttcccaggcattgtgaagaccctgtttctctagccgtgcagctgcaaggtcactagacagaaaaactcaagtcataaacatgttttttcttgaaaggtaagaaatgatgtaatgcaagtctcaattgaataactgtctttgtttctctcttctgtaatatgcttccccctgcacagatctccccccaccccacaaaatgcttaaaaggtaacttgac

SEQ ID NO: 9270 - DNA, 2300 bp, Homo sapien
cacaacatggcttatgcctatactcccaacactttgggaggctgaggtggaagaatcgcttgagtccagcagtttgagaccagccctggcaacacagtgagaccacgtctctacttaaaaaaaaaaaaaaaaattaaaaagttagctgggtgtgatggcaggcgcctgtagccccagttcctttggagcctgaggtgggagcatctcttgggctcgggaggtggaggctgcggtgggccttggtcaggcaaatgtactgcagcctgttgcccaggctcgtctcgaactcccgaactctagcgaactgcctgcctcagcctccgaacttgcacctgccatatccaacggccctgggggtatacagtgacagattttagtagacatggcgttttgccatattgcccaggttggtctcgaacttgaatccgggaatttgaggctacagtcagccatggtcgtgccactgcactgcagtctgggtgatggagcaagactccatctctaaataactaaataataaaaacaataacaataataacaaacaataatacaaagaaatactaacaacaacaataataataaactagtaggagtgaaaaatataaaaatataaaagataatttagatcacaattaatagcaataatttcaaggagttatttctttaacctgtctctcttactttctgaaacagggtctttctctgtcactcaggcttgaggccaatggcgtgatcatggctcactgcagcttcgacatcccagaatcaagcaattcctgcagtctcagccacttggaaggttgagatagcaagatcacctgagggagcccaggaaggtcgaggctgcggtgagccgagattacattctcatactccaacctttctcaaaaaagaaaaataaaggtaaaacaacagcagcttcagtgtgtaaaaagaggaataagaaacataaaagaaaaaagaaaaacaaaatgaaggacaactgaaagtactgtggaaacaattggagaggaagaaacgacgtagtgagagaacgacatctagtggatgcaggtggtagtgctgctgaccagagagatctgttctaccttagaaatcccaagttaaccatcaaagccagcgctcgccgccgacatttggtggacccggcgctcgcggacggaagcgatcagacccagttggaaccttatcacaccgagcctgcccacctttgcggccatctaactccgccgacctgcccgccgttccgccaccgtcggctggttgacccgggctgcggagagaggaggaaagacagaaaggcagtgactggctcctgtcccattcccgcgcgcctggggcgggtagaggggccgtgaccccagtggccaccactgggcatgcgtgaacactactcggacaggaaccacaggggcacaccctctgacacccacgcctcagccattctcaccaggcccgataaatccgatcccagcccctgaaggaggtcaaagcggggtgcaggaaggaggcggaattggagagggaacgacgagcatgggcgacacccctacctcggcaaaccccagcacagcaccttggaaagcccgcagatggggacgggcgcctcccgaagacacagcgggcaccagtggtctctcgggagggacacctgctgcgtgcttcggggctccgggtccggtgggcatgagcgggcgaggaaactaggttccgggtataacaggagaaaggaaggaaggtagacgtcaagggctgaattacacaggacacgccacatcaccaggtcccccgcgcacgggtgcagggaaccttgtgtggaggtttgactttcaatagatcgcagcgagggagctgctctgctccatagaaaaccctgacccagaagcaggatgtctacaaatagtttagcatccggttccccaaaaacacgttatgtgatgggtcagggggtgaccgcccttctggcagcagcccatttcctacgatgaggggctctctgcaccggatcctggttcccggcgcatggcgggacatgcccctcctgaggcagagcggcccgccggaggggacggcagaggaccgcctatccaaggccaacaaagccaagcacatacacaaaatgtctgaacctgcggttcctctcgtactgagcaggattaccatggtagcaacacatgggcaacaacacaaggggaacgcaaacagtaaaactaacctgtctgacatggatctaaccataatgcttttagggcatgcgcaccgctgttgggtgaatccattctagtccgccttgcccttcg

SEQ ID NO: 9271 - DNA, 2300 bp, Homo sapien
aagaactctactgggcccatggagcttcttagcattcttaggtaatatgttttacatcaatcgtttccaaatatgaagatcagtattcagtgatttgagatggctctctagaatctagtttttcacaatgatcccccagcagattttgatgtaattagtctgtaagacgaacatttttttaaaagatgaaacttgtatttcaaattggtgtatggaaacagagaatagtggaatgtaaatgtaaagttattgggactagtgaaacattcaattcagtatatattgtagattattttaacctataaggctgtgaagttattttattactcttggtctgatgttctaattcctacacttggttctgacactaattttttatgtaattttaggtaaattattcattttttaaaaatcagcttcttttataaaatgaagtcaagtagattattaataaagatccctagccatcctaaaaccctatatttccttgaaactttccattttatgtaaagcgatgtgtgcagcatgtataggagtcaaatgtttaacataaactattggtggcaattgttatgaagaaaaatggagagcataaatgtctagtcttgttctactccctttaaaaacggcccactatttctagggtgggtcagtaagctgcagagtatatataacacgatttagcaggtcaataggtcaggggctaattactcgtagatcacatcaacctcttgaagactgaatcatctggagatgtgttacaagtgacttaaacagataagtacagcatggaatcaataataaaatgggagatgatggttaaagcaaagctaagcatcacatcagagtagaatcctgacatgattttattccagtaatgtaaatattcccgtcccagccctcattcaccactacctcctcttatcattgaggaaacaggcagagacagactggaaaggcagtcagcttgatttaagaaactttcttaagttcagaaatactgaattatttttaacccagaaaaagagctcaattgagaactctgaggtttgcaaccttaaatcccgactcaatctgatatatgcctgccaaaggcaacctgactgaggttacctgagagaaagtttttctacaaaacatggccaaccatgctcaagacaaaattccaacacataatttatcttcggcattcttcaaattatttaccacatctcctgcccccaacacctaatcccagaatacaggaatttgatgatgtctacacagcctataaaagtccacaaatttaagtgcctactgtgtgaaagccatttgggggactacaaacataaaggatgtataatgccacccactaagatgttcacgcttatgatttagtaggaaaaacagaaggctgccttataaatattaacaacctaatttacaggcacacctaaaacatcccaaattctaaaatatatattttcttccaaatcctacagggtaatatggctatgagagtgcactaggagtgtcaattttactaaatcctctgagagcatccacattttgaaagagttctctcttaacctaaacaaacaaacaaacgaacaaacactcctctcactgaagttcattcggcattgacgggtctctggttcttcaagttttcatctgaaagtctcagtctttgctatcacaaccaacgcccccttcctacactccaaggttgatggaatgaaatgtcttggaattgagggtttaattaattcggatcactggagagaaagaaaagaaataacgggggaaaaaaatgtgttaattttagggcttggaattggaaacgtggggaaacgtcgccaccttctggtaagtgatggaaatgagcaggaaaaaagatccaagctaagaagcggcttttttttttttccaaagcagcaagccacgcccctcccgcgctcgcgaaatccgagacccgccctttccggaagttttgacactgtgcgccccgagtaatgtgatggagagggtaatcatccggtccgttatctaaacccgtcactccaggaaacagcgacccgctgttttccggatccgcgctctcccagcatcctttgccttccggtatgtggccccgtctggctagtcctgtctagcgcgcccatttcgagcccaagtttccagctcgggtttccgggctcagaattttccaggagtgggttcttgggcagtggctgtgggagcaggaatggcgcagctagagggttactgtttctcggccgccttgagctgtacctttttagtgtcctgcctcctcttct

SEQ ID NO: 9272 - DNA, 2300 bp, Homo sapien
gggctgacctctgagctgcatatgataagagaaactcgaagacacccaatggaaagtaagaggtggaagtctgcaaacacagagtagggaccactttcttttttttcaccacaagacccaaagactggggcttgaaccctgccaagttagatgtgtttggtaaatactctgagcttcctacagacctagcctaaaaaagaaacccaagccccaacaagttcaaggtgatcagccagtaatttaactgctttctattattatgagaataaaaggaagattatacagacacccaggctagttatgagcacacatcacaggtatttaaaaagatttggttctattttaaaatgactaataaagcttagcattagggaggtggtagacaggggaaaatggctaacaggacagtgtgagggaaatacaaagcttctaatacttggtttaggataagaaaatgtgttaaatagacacaactccctctccctctccctctccccacggtctccctctctctctccctctttcaatggtctccctctgatgcccagccgaagctggactgtactgctgccatctctgctcactgcaacctccctgcccgattctcctgcctcaaccttccgagtgcctgcgattgcaggcgcgcgccgccacgcctgattggttttcgtatttttttggtggagacagggtttcgctgtgttggccgggctggtctccagctcctatccgggagtgatctgccagcctcggcctcccgaggtgccgggattgcagatgaagtctcattcactcagtgctcaatgttgcccaggctggagtgcagtggcgtgatctcggctcgctacaacctccacctcccagccgcctgccttggtctcccaaagtaccgagattgcagcctctgcccggccgccaccctgtctgggaagtgaggagcatctctgcctggccacccatcgtctgggatgtgaggagcccctctgcccggctgcccagtctgggaagtgaggagcgcctcttcccggccaccatcccgtctaggaagtgaggagcatatctgcccggccgcccattgtctgagatgtggggagcgcctcttccccgccgccccgtctgggaagtgaggagcgcctctgcccagcgcgaccccgtctgggaggtgaggagcgtctctggccggctgccccgtctgagaggagcccctccacccggcagccgccccctttgagaactgaggagcccctccgctcggcagccgccccgtccgggaagtgaggagcatctccgcccagcagccaccccatccgggaggtggggggggtcagcccctgcccggccagccgccccgtccgggagggaggtggggggtcagcccccagccggccagccaccccgtccgggagggaggtggggggcagcccccgcccggccagccgccccgtctgggaggtgggggggtgcctctgcccggccaccccttctgggaagtgaggagcccctctgcccggccgccacccagtctgggaggtgtacccaacagctcattgagaacgggccatgatgacgatggcggttttgtcgaatagaaaagggggaaatgtggggaaaagatagagaaatcagattgttgctgtgtctgtgtagaaagaagtagacataggggactccattttgttctgtactaagaaaaattcttctgccttgggatgctgttgatctatgaccttacccccaacccggtgctctctgaaacatgtgctgtgtccactcagggttaaatggattaagggcggtgcaagatgtgctttgttaaacagatgcttgaaggcagcatgctccttaagactcatcaccactccctaatctcaagtacccaaggacacaaacactgcggaaggccccagggtcctctgcctaggaaaaccagagacctgtgttcacttgtttatctgctgaccttccctccactattgtcctatgaccctgccaaatccccctctgcgagaaacacccaagaatgatcaataaaaaaaaaaaaaaaatagacacaacacattataaaatattatcaaacatgaatttatttagaaacaaaataaaaacatgctatttgaacaaacttttttataaagaataagttgactgaaaagcagttttaaataacatcaactcacaaatgacttttagaagccaaataaacatttctattttagagaatagtatgtaatacataacttaaaagcatatagaacacatattcctacattcttaaaaataagagattgtgattccacaga

SEQ ID NO: 9273 - DNA, 2300 bp, Homo sapien
taccatgggcctcaatgcactcccaaatatccctttgcagattctacaaaaacgaggtttccaaactgctgaaagaaaagtaagttttaactctgtgagatgaatgcacacatggcaaagtggtttctcagatagcttccttctagtttttatcctgggatattcgatgtgatggtggaagcggggtcaaagaattgctatgttgctggctttgaaaatggaggaaaggagtgagaatctaaggaatgtggttaactaatgaaagctggaaaaaatacagaatagattctcccttagagcttccagaaggaatacagctttgctaacactttgattgtaacgagatctaggccaaacttcacacctatagtgagatatatgccaaacttcaccctattttagcaagatctatctcaaacttcaaatgtatagaactataagataatatattagggttgttttaagccattatatttgtggttatttgttatggcagtaaataagaaactaatacaccaggtataggtaacatagtaacacttgcttactagagtatttctgtggtatgctgacttggtaaattccttagtgggggtaaattttgagtgctggatcactcatattaaagttcaagaaactcaatattagcattaactgaggatggctttagctagaaatgcaaagcataagaaatacaagaaactaaatacatgactatagcttgctaagaacacatttgacatgcggttaccacatgatgtgtttattaagaatagtctcttcctccaaattatctgagatgtcaggaactaaacagttgcactgtatgttttttaagatgttttaaaactgtgagcctgtattatttttacagaattttaaaaatggaggctgtcttctccacaaaggagaggactcccaggtgttatgaaaactgagattaaaatttgacattcaagatttttgagtaagttgtcaccacttgttgctcatgtactaggtgccatacagtgttttgtggtttagcatgtatttcatcacatatgtatcacatattatatactaaagttgaataaaattagtattcttccaattttagattaatacatctaggcaatataaataccttgttacagatagaaccaagacttgaacacatgcttttgtgcaatttcaaattctttctattaccctatagtgacttattttgtttagctttacaaatattgtctttatcaacaaatattaatgtggaaagtgaagatgattgccatcagggttatttgtaataagaactccttatttatccaggatgattaaaatatctctagaaaagaataatgtcactggtgcaatgaatttggtccaaaatacatctcgtcattttgcagcattaattgtacaaagctttctctaaatttgaaatctatgtttttaaaacacagtgattgacaaattgacaatgacctcattaggtagtgacagaaatgattctgagaaaataggtgctgtcaatctagcagagaaatgaacaagaattttggaagatcctgctaatattgagtagtatttgctatatgcggtgaatctaaaaactaaaaaatgcacatttcataattaaggggtagaaatggttatagcttgagtttgggctaagataaagtgtaactggcgagaacagagagtacatgttgaaaataaagagacgcgaggttgaatagattaggattagattatgaaggatttttgaaagcaggcatggtagatcatagagatatagaacataagtgattgattaaggcaatgataggatgatctgttagcagcatttaggataatccatagcagggaaagagctgaatgagaaactacaggtaggaggccgggcgcggtggctcacgcctgtaatcccagcactttgggaggccgaggcaggtggatcatcaggtcaggaattcgagaccagcctgaccaacatggagaaacccccatctctactaaaaatacaaaaaaattaggcaggcatggtggcatgcacctgtaatcccagctactcaggaggctgaggcaggagaacccagaaggcagaggttgcagtgagccaagactgcaccactgtattccagcctgggcgacagagtgagactccatctcaaaaaaaaaaaaaaaaaagaaagacagaaagaaagaaactacaggtaggaaaacattattacatctctaggtcctaatcctctctgttctgaacagtatcaatacacataaagttggaaatctttggtcttagaaatctccatagc

SEQ ID NO: 9274 - DNA, 2300 bp, Homo sapien
cagcttcctgagcagctgagactacaggcacatgccaccacacccagctgatttttgtattttttgtagaggcagggtttcaccatgttggccaggctggttgcaaactcctgggctcaagctgtccacctgcctcagcctcccagagtgctaggatttcaggcatgagagttgtgttaaataaccatttagtctagtaatggtatttttaaatctctgattccactgggctttggatcaagtggcaaagtccctactttagaagcaagtgtcaaagaaaaatcacactggacacattaaaaaggcaagaaaggctttatttaagaccattgcaaaggggtcaagactgttacaacagaggacaaaaattgaactcaactactccaaaacaaaaggttggagtgtttgtgcttgctgaggtgagctactggaaaagtcctagaggacattagcccggaagttggtttgtgtgcttaggccatctctgtttgctaattggttcttattgaagttaggcttctatcttctcacggagactggaagatagggctgctgtttttcttgatgtttatatttcaaagggatgccttccatgtccttgagaaagatactccttggttgtagaagatttacatctcaaaggtgcagaggaagaatttacaattgcaagttttctaaagtgagagctgtaagaaaagagcggtcagggtcttatagtcaggaaggaactttctacaagtttagtcaagttgaggggaacattaggccattttgataagaagatacttttttagtgattttgttatgtggagccagcccttgaacgctggtaactcttggaaatataaaataaaaaaaagttcaattaattgtttttaggacaaaaatattatgtgtataattacctgtcaaataacccaaggggagatctttattttgtttctctctggatctcaagtgctttttgttacttttgttccttatcagaaaaactatgtcctgaggcttttcttcttcagacaatgctttaacgtaaaattgaggttcatatgctgctacaagtctcatttaactttccatttttatttaaggaaccaaatggactttcaggctgcctttatgctggtaattagggcaacttgttgtgaatttcaatgtgtttgagtggtagcacatattaatacattacactttctctcaatttcatcactattcaagtgcaacatcctacacagtataagcattttgaaattcagaaccttgtggatgacccagactataataactgcagcagttcagcttacaattttatggtgctttattatttttaatcacttttaaacgtgtaatctcattttgtcctccgggtaaacacagtggtaggatttattttacagaggctgccatacaaatggcaagacttgactctggcctctggctcctagcttaatgtctcattcgaaagttgtgaagaattttttagatctagatatttaatcagcctgcacttgaaaatcactatacttcccttttttaagtgctaaattgggatacttctcaaatattcagttatttataggaagccttcataattattgaagtccattaaatctattgggtcatcttgccataggcataaggattcaagctaaaggcacatgattttgtttaaaaataaagattacaataaaataagattaacaaaagtacttttatacttccagaacaaaaactcaaaaataccctgtggcattgaaaataagaatcatttctgaaaacttctgcgtatgctttggcatatcttagaactttctatatgtctaatataatataacaaatatttctgtgttaatatccatccaaaaagaaatgatttgacacactgtatataggcagaaaaacataattttgaatatttcattctgaaatagacaccaagaaaaattttgttaaatttatttaccctaattgcttatgtttgaaatatgtgttctgtcatcaggcaaccctgctcagcccacttccctccactacatgaatccttaccaactgaatgcctatggtatggcactaaaagcagtgggagaaattgttcaagattatgacagtgataaaatgtttccagctctaggatttggtgcaaaactgcctccagatggaaggatatctcacgaatttgctttggtaagaatttgtcaaaaggatttgatgttttgaaaaattaatgttagaccttttaatattgctttggtacttattctttagtcagtcaagtagcaagctttactgactgtagctta

SEQ ID NO: 9275 - DNA, 2300 bp, Homo sapien
agacaggaatacatttcaggaaaaaaaaaatagttgtaaccaattttgaaatttttcaaaacccagacagatcctgtgttggtaatgtactataagttcttacaccctcataaatagggaagtattttcaattttgcttctcattttaacctatttcttccttttcttaaccttaccaagcatcccctgtattagtctgttctcacactgctataaagaaactaccccgaactgggtaatttataaaggaaagaggtttaattgactcacagttcctcatgtctggggaggccttaggagacttataatcatggcggatgaccgatggcacaggggaagcaaggcgtgtcttacatggcagcaggcgagagagtgcatgtgaaggaggacctgtcaaacacttgtaaaaccatcagatctcatgagaactcacttactatcatgagaacagcatgggggaaactgcccccatgatccaatcacctcccaccaaatccctccctcgacacagggggattgtggggattacaatttgagatgagatttgggtgaggacacagagccagaccatatcatccccagagatttaaaaaaagcattggttgtcttgcagtataaaatgtctacacattctattttccttcaccttgtattttcaatacgcaaaagtggagtgaagcaaatttgaatgtgtttagtaacttcatgatgaataacagtcagagatatcactcacgtaaacctcttcctaattatgattcagcaacagccccctgccaccccataaagacactgatagaatgtcctcaggttgaagaaggggttgagggagtggggggaccaagggaacaaagatagcttcacaaaacccagagagcttgcctcttgttgctcttaattaaggatacaaagcaaacaaacaagcaaaatacctacttaaatgagtactctttgctatatacgggcatccaaaatgcaaagtggctgcacagactaagaagcaacagtggttgtttcaataaagttaaagtacaaagtagaaaaaaaagtttgccaactcttagtattccaatgtctttgcctatttttattttcagaagataggaaaatagaatgttgaatttgtcataaaaatatattttattcctgtaaaaactccttagtagttgtaggtaatagtgttacaggatctttggggtgccgctttttctggcctgaaacctctggccggtggcaccttttcctgagtttgctagggcctgctgggctcgttccatccgcttggcctagcaggctgcacttttctcatgctaccagcctgcatcccacgcctgccaagggtgaatcaggtatgaagtggtgaggggtgtgtgagcgtgagatccagccactgtgcagtcagacatgctggctgctgcagcagggtgggcagctcagggtgctggcataggtaccagctctccgcaaggctatggctggaccagacgcaccacaagcagcttccctggctggcaccggggaattcagtggcacccgaaagcttgaagatgctaggcactgcaggacaccaaaaaggaagtcacatccctggctcagggagctcccaggtctgggctcccccaggggccacagctattctctccttctctatgcctgcaacatggtgagcaatgggcaggtttcagccctgcttgtgttgtagtttgtttagctccgccagttggcaggtcccaagttcttctcctatagccaggaagaatgaggtatgcagaaaatgaagggtgagccaagatgaagaggagttttattgagcaatagaactgcttacaggagaccctcagggggtagctcctttttgcagccagggcgcccctagtgtttagctcctagcagagaggggaccctggagtgggaagctcctctctgcaggcaggttgtcctatcatcttcccagatctcccagataggaggccttggagtgggttgctcttctctgcaggcaggccctctcatcatctccccagctcctagcagacagaagggcctggagtgggttgctcctttctgcagctggcagtcctgatgtccctgcaagtctctaaagtgctcagcagaaaggaggccctagagtgggtagctcctttctgctgctggtcaaccccatccttaccaggcatccatcccatcggcccaggaatctgtctgcctcctgctgctcttcttggcacctgggctcagcactgactttgctccaagattagagcggaagccaacagcagggagaagccaggcagtgggag

SEQ ID NO: 9276 - DNA, 2300 bp, Homo sapien
aaccacaaagatggggaaaaaacagagcagaaaaactggaaactctaaaaagcagagtgcctctcctcctccaaaggaacccagttcctcaccagcaacagaacaaagctggacggagaatgactttgacgagtagagagaggaaggcttcagaagatcaaactactccgagctaaaggaggaagtttgaaccaatggcaaagaagttaaaaactttgaaaaaaatttagacgaatgtataactagaataaccaatacagaaaagtgcttaaaggagctgatggagctgaaagcaaaggctcgagaactacgtgaagaatgcagaagcctcaggagctgatgtgatcaactagaagaaagggtatcagtgatggaagatgaaatgaatgaaatgaagcgagaagggaagtttagagaaaaaagaataaaaagaaatgaagaaagcctccaagaaatatgggactatgtgaaaagaccaaatctacgtctcattggtgtacctgaaagtgacagggagaatggaaccaagttggaaaacactctgcaagacattatccaggagaacttccccaatctagcaaggcaggccaacattcagattcaggaaatacagagaacgccacaaagatactccttgagaagagcaactccaagacacataattgtcggattcaccaaagttgaaatgaaggaaaaaatgttaagggcagccagagagaaaggtcgggttacccacaaagggaagcccatcacactaacagctgatctctccgcagaaactctacaagccagaagacagtgggggccaatattcaactttcttaaagaaaagaattttcaacccagaatttcatatccagccaaactaagcttcataagtgaaggagaaataaaatactttacagacaagcaaatgctgagagatgttgtcaccaccaggcctgccctaaaagagctcctgaaggaagcactaaacatggaaagaacaaccggtaccagccactgcaaaaacatgccaaattgtaaagaccatcgagactaggaagaaactgcatcaactaacgagcaaaataacgagctaacatcataatgacaggatcaaattcacacataacaatattaactttaaatgaaaatggactaaatgctccaattgaaagacacagactggcaaattggataaagactcaagatccatcagtgtgctgtattcaggaaacctatctcacatgcagagacacacataggctcaaaataaaaggatggaggaagatctaccaagcaaatggaaaacaaaaaaaggcaggggttgaaatcccagtctctgataaaacagactttaaaccaacaaagatcaaaagagacaaagaaggccattacataatggtaaagggatcaattcaataagaagagctaactgtcctaaatatatattcacccaatacaggagcacccagattcataaagcaagtcctcagtgacctacaaagagacttagactcccacacaataataatgggagactttaacaccccactgtcaacattagacagatcaacgagacagaaagttaacaagcatacccgggaattgaactcatctctgcaccaaggggacctaatagacatctacagaactctccaccctaaatcaacagaatatacatttttttcagcacaccacacctattccaaaattgaccacatacttggaagtaaagctctcctcagcaaatgtaacacaacagaaattacaacaaactgtctctcagaccacagtgcaatcaaactagaactcaggattaagaaactcactctaaactgctcaactacatggaaactgaacaacctgctcctgaatgactactgggtacataaggaaatgaaggcagaaaaaaagatattcttttaaaccaacgagaacaaagacacaacataccagaatctctgggacgcattcaaagcagtgtgtagagggaaatttatagcactaaatgcccacaagagaaagcaggaaagatccaaaactgacaccctaacatcacaattaaaagaactagaaaagtggaggagtcaagatggccgaataggaacagctccggtctacagctcccagcgtgagcgacgcagaagacgggtgatttctgcatttccatctgaggtaccgggttcatctcactagggagtgccagacagtgggcgcaggccagtgtgtgcgcgcaccgtgcgcgagccgaagcagggcgaggcattgcctcacctgggaagcgcaaggggtcagggagttccctttccgagtca

SEQ ID NO: 9277 - DNA, 2300 bp, Homo sapien
ttaatttaaaataaattaaaaatttatttctttgtatatatgaataaatatttaaaaagtagaatgaactattgatgctaacatagatgaatctcaaaagaactttgcttagtggaagaagccagaccaaaaatactacctgctttatgattccacatacataatttttaaaaatgcaaactcttctatagtgacataaagatcagtggttgcttagagggttgtttcagtgatgaaaggaggtactgattacgacgtaagaaaacttttgggtgatggaatgattcattattttgattttggtgatggcttcacagggagatacatgagtcaacatttatcgaatgatggatgcactttaagtgcagttcattatatatgttatacctcactgaagtggaaacaaattggatgtaagtatcccacatgttgactactaaagttctcaagtttcatctcttcagtaggcttctgtaaagtaaaattctggtgagcttaaaaaaaaacctagatctctatgccaaattaactttgagcagcataatagaaatgcctggggttttagggcatttccaaatcgcagtaaactacagtttaatttgtaataggacaagaggaaggaaaaaaaaagaagaaaaagcggtgggtggggaaatcaggaaaggaaagcaagaagaaacaggggaagtacactcggcaggggaatcggcaagactgcacctacacactctcacccgcctctatagattctctaggcaggaggctgcaagtggattaaaatgttacaacgcaaggcaagtcctccaccgcaaaaactgctcctcccagacttagcccaaccagctggaaactccgtgcttggagcgttaaatcggacggacacccgccccctctccaccctctgccttccagctgcgccgcatcctgttctccgtcgccgcctggtggcgagctcccgggacccgcaggcgctcgggtgaggcaggagggaaggcgcggggaacaaaggtccctgcagtggaggggcgcctcgtctacctccggatgcttttgccacgactccgtcttggcaccagtcttgctgccctggaatgcagtttcccaaacgcagcgctcactctgactcctctctgcttttatccgtcaggtctcagttcttgcgggtgggagtcggctgaaggagctgcgttatatggttgtgacatcaccctccccggcccccattttcaggtcagaactttcatgcctttggaaacgagggacccagaagagcccttactgtaggaggaatgtcgccgttagacctctaagctccgaagaaccaaggggagacagaatccagattgcttccttaaatcccaagtagtattgttttttccaccttagagtccgcccccccgcccccacttgtcccatatattgatcggccactttgccaccgtgttccaaggttggagagcgtcacaatgccccaccgtccccaactctcaagtggccgacagtgggcagtccagaagctgggaccagactcatctgcccgagggcacagtaggagggacggagggatctcccaagagctccgagggcgaggtgagaaccaattgtggggagggggaccttataacggggcagttaggaacgggcagaggtgcccccacctccagctttcaactcaggcgaggaaacttcgagaccttcccgtccacacctgattgacagaaggaagctgtcgcggcccaggaggcgagtgtgggtgtgcagaggtggagacaaaacctaaaagcacgcagagccggcgagggcttgcggtcctggacggtaggggtctgcgtctggtgccaccttctccatcaggctgcttgctgggtccaccaagcctgacccctccagccaggaggggatcacggagtgtgtcccccgcccgggctgctgcctgccggaagggggctgggaaaccgggatccccgcgcgccacttgcctggcagcgtcagtttcacccaggactggctagcggttccctcgtggctctgcgcggaggtccgcctcctcccttccctcccccatcccgcgcgctgcctccgcctccttcttctgcctccaccctcaacccccatccccgcctgacgggagctagccctcagtccgcccgagctgtggttgtgggcgccggacaagtccaaggcgcctcctcccaatatggacagccgctacaacagcactgcgggcatcggggacttgaaccagctgagcgctgccatcccggccacgcgggtggaggtgtccgtgtcctgcaggtgag

SEQ ID NO: 9278 - DNA, 2300 bp, Homo sapien
gtgttccagggtcaggctccttccaaggtctctaagaaaaacctttcctggcctcttccagcttcctgtggttactgataatacttgatattctttgcctttggtggtacaacttcagtctctgcctctatctccacatggccttgttctcggtctgtatttttccaagtctctctctccttaagcacaccactccactgctgacatatattaaggaagacctaaataaatggaaagatatataatgttcatagatcagaagataaatttggatcagatgtcaattattctctgatttgtccatagaatcaatgcaaccccaatgaaaatctcaacaagactttttgtggaccttgtctagctgattctaaaatttatatgaaaatgagaaggattaaaaatgaaaaaacaattttgaagaggatcaaagttggaaaatttatactacctgactttaagagttattttaaagctatagtaatcaagactctgtggcattggcttaaagaaagacaaataggtaaatggaataggatagagtctaaaaaatggactcatagatatatgttaatttttggcaaaggatgcaaagatttttcaatgaaaaagggtagtattttcaacaaatggtgctagcaaaatctgatgacaatgtgtaaaaatgagaactttgattagaaaaaccaaaataaattatagagataaacgtaaaacctaaaactaaaattttaggggaaagtatagaagatgataatttttgtgatctcacattagacaaatatttcttagttttgacatcaatattatgatttataatagataacgttgaagaactagattcatcaaaattagaaacttcttctctttgatagacaggagaatgaaaacacaagccacagactgtcagaaaatattttgtaaaccacatgcgataaaggtcttggatacagaataaagaattctcaaaactcagaaataagaaaaccaacaacataataaaaaaataagtaaaatatatgaagacacttcaccaaagaagatacgtatacacatagcaaaaagacataggaaaatacgttcaacatcatttgtcatgaagccacatgagatattactacacatctgttagataagctaaaatttaaaagaccatcataaatgttggcaaggatgtgtgcaaccagatctcttatatactgttgtggtaaagaaaagtagtaaaactcttttgaaaaaaaagtttaatagtttctttttctttttgagacagagtctcgctctgtccctaggctggagtgcagtggcgcgatcaatctccactcactgaaacctctgcctcaggggttcaagagattctcctgcctcagcctccggagtagctgggactataggcgcacaccaccatgcccggctaatttttgtatttttggtagagacagggtttcaccacgttagccaggatggtctcgatctcttgacctcatgatccgcccacctcaccctcccaaagcgctgggattacaggcatgagccaccgcacctggccttaatagtttcttaaaaagttaaacatacacattccatatgatccagctgttccactcctaggtacttacccagaagtaatgaaaacatacgtccacagaaagagttgtacatatatgttcatatcagtttcatttgtaattgcccaaagttcgaacaaccaaagtgtccatcatcaggtgaatggacaatttatagcgcatatatacaatgaaataaattaaaaatttatttcattaaataaatgaaatttattaatttaaaataaattaaaaatttatttctttgtatatatgaataaatatttaaaaagtagaatgaactattgatgctaacatagatgaatctcaaaagaactttgcttagtggaagaagccagaccaaaaatactacctgctttatgattccacatacataatttttaaaaatgcaaactcttctatagtgacataaagatcagtggttgcttagagggttgtttcagtgatgaaaggaggtactgattacgacgtaagaaaacttttgggtgatggaatgattcattattttgattttggtgatggcttcacagggagatacatgagtcaacatttatcgaatgatggatgcactttaagtgcagttcattatatatgttatacctcactgaagtggaaacaaattggatgtaagtatcccacatgttgactactaaagttctcaagtttcatctcttcagtaggcttctgtaaagtaaaattctggtgagcttaaaa

SEQ ID NO: 9279 - DNA, 2300 bp, Homo sapien
cccaaagtgctgggattacaggcattagccgctgcacccggcccaagatcccatctctaaacatatacaaagaaaaaaaaaagttagtgaattattttatgaaagaatgtagatcgtttatgttgaggcttagtcccatcatactaagaaataattttaaacaaaactatttttctttatttttaaaggtttcagtctacaggaaagttaacaggacacctaggccctgttatgtgccttactgtggatcagatttccagtggacaagatctaatcatcactggctccaaggatcattacatcaaagtatgtataagagactttctgaattatatttgtctattaaatgataattttgaagtattcagattcatctaggacctctttctcttattttcttttttcctttctagtctttgctttttctttttaatcttttcctcattcatagttagtggttttgttgtcttattgttcaatcatgcattctcacttttcatagaagaaaggttggaaaacattttaaagctcttttaactcagtcttccaactcatacatgagtcttattgtcatgatcttttatcccgaaaatattatgatcttcagaattttatgaaattaacagataaggtaaggaaagatgcatagtttgattctaaaaatgttaaatttaaatgttaaatgaaatactaataaaggacattcacgtggccagaaggccattagaaattcaagtctagagtttaaaataagttgtgactagagatgtaggtttggggagccattcaaagagaaccagatgttcaaagagtaaagagttgatgatgtggccaaggtagagagaagttgactgggaactcagccttggggaatatctgtgagaatcaataggaagaaggtaagaaagagaggtaggaagaatgtaagtactcattctagaaactttgattaagaaatgagagatgggttaatgacttgaaattagaatggttaagaaaagaggattctataccctagagacatgaacgtatttatgtacttaggagctgggcttagtggagagggaatgagtgaggagaaaactgaagtggtggcaattgatgaaggtggtaggaggagttagatcatagatgtgaacattgaaaataagtaagtatactttagcctctgataaagaagggaagggtaaaaagaagtttgaagataaaaagaaacttttagaatggagaagagtgtctaaaaagtttattttttatgacactagccttttcaggaaagcacaaggttacgggctaagagagatgagtgcaactgaggaaagtgaaacgattttgaacagcagctttggggaattggagatgacctccgggactgcagagttacctaatagtcattaaataataaccatattgtttatttgaatttcaactggattgatatgtaatatttttattattgaacatatcatttgtgcacttatacatgaaaaaaatctggtttcctttcttaaaagcctacagacacaaagcatgtaacatgcaagcaaaagtagtgtgaaaaaaagggcacaggtttatcttcagttgtcattcatgccaggttaatttaattaacttagtaaaacatacataacaacaaataacaaaacaaaacaataattaagagctggtgccatcatgcatgcctgtaatcccagctactcgggaggttgaggtaagaggatcgcttgagcctgcagttaaggcagctgtgcagtatgattgcacctgtaaataagcactgcactccagcctgggaaacatagtgagaccttatctcaaaataataaataaaataaataaaaagaaaacatttaacaaaccagaaacaatagataacaaaacaagtcatgtctgattaacatacatgtgtatgtgtttctaggactgtacaaatattggtgtttatttgcaagttaaataggataactgctttgtttctacctttttagatgtttgatgttacagaaggagctcttgggactgtgagtcccacccacaattttgaaccccctcattatgatggcatagaagcactaaccattcaaggggataacctatttagtgggtctagagataatggaatcaagaaatgggacttaactcaaaaagaccttcttcaggtaatgcagaaccttttcatggtatagagtgggcatttcaacacaatcctgtagcctgtagaagaacttgaagagcttctatgtagatttttatcatttacagataatattaatcaggcctttttcttaaagaatgtt

SEQ ID NO: 9280 - DNA, 2300 bp, Homo sapien
aagtaataaaacactgtgtttaatattgagattttttttctcaaaagactgaataatcaatgacataaaaatacataagaatgaaaaaagggcatcctgatctcctggaaataactgtgccatacataagttactggggcaaatatttactgagtattttatgatactataacctttgacatgacagaattgtgttgaatattacatcatcagggaaacatttaatagattcttaggataaagcttgtaatctgaaggaaagaaacctttggagacacagtattacatctgagggtactgtttagcttttttcttaagaagatttgttattaaatgcacattgaaaatagctcttaggctgttaacatgaattgttttcttacaatcagctttttgacctatatatacatatatattttctgtttgagaattaacagtagcaacctactattctgtagaatcataccttttcaatatttgaagaaatatgtgtaaatttgatggcttcagttcatatctatgaaccttaagacatcaaaatttccaaatggcagattcagacttttgagcgggttttgctccaatttcaattttaatctggttaaattgttagattacaaattactgagcattagtttcagtaatctcaaattgacacatgtatgcaaatcatggcatcacatttcataattatatatccagagataataattccttatatcatttatagggataagaaactcctatcacttttgtgatcattataaccagactctaaaaataaatgtttttttctccccaactctaaatttacctcctttaaatttccattcgttagtcttcatcagccctttttttcccttaccagaattaattttatatatctttttgtttatatatgacagctcttcatatattcagcccttttaaattatgctgttgtatcctctctccggtaaatgttcttttatcagctcaatagtttcatcatctgttccttatgtaatatagtctacagatccttcattctgcttctactgttttgtaaaggctccaatttttcaatgttcttcttaaaatgggacatctaaaactacacctcattccatatatggcctacatagaatgcagtaagtctatcgctgtctttctcctgaaatatttatttctattaaacaaatcattgatagtgagtcggcatataaaataaatgaattttgtttcagtgatttttttcaggcaatataatgtccagttctttaatatatccatttaataagcatgccacttctccctagggctaggtaaagattgactagataccaaagatcttccagatcagcagtgaccttgactcgttaggtatgactcttcaactacctgtggaaatactttactctaacagttccatacttattcacattgtccacaaggatatcatttaaaagtcttattgtatgggctttattagagtcaacatatattgtgaatgtgacattcccttaaattggtatccattaaccctacaaaaaactttccccatgaaattgataagcccatgttatcttttgttggtgaacatttatttttaagtggataatgatttgcttaatgtattcctctttgagactcaacgagaagttgagtttctgaattccacgtttttcctgcattttggaagatcaggtctacatgttttgtccctttttttgatctttgtgatttcttagagcactgacaaggattttgcttacacaatggcatatactttcaaaaccctatgatataatgatttaaaaacagaaatacttgaatttattgaataaatctccattgtcagctctaacttatctggggctcacgtttcttaatcatttctgccctcttgcatctcgaagattattctctttcattaagaagatggaaacaaaacagttttcctttatccttatatttgtcctaatatgccatttgtcttacataatggacataattcaacataatttgaagcatataatgctttgagtgaaggtacatttgactgtttgtcatgtcttaattcattatcatctttagcctccccaacaccattattttaattcagaccctatcttaaattcctttgggagagggacaatgttttgataatctttatatttccatagtacatagcccagtgccataaagcagaaactacaaaaatatcaaatttatgagaaagctccctaaagagcttcattgtttttaatttttttattttaaatttttgcaggtacatagtagatatatatttatggagt

SEQ ID NO: 9281 - DNA, 2300 bp, Homo sapien
aaaaccttctattcaaaataaatcttgcatagactatttttaattattatcttgaggacaaagaaagattttcccacatagtcctgtgtgtgtatgcgtatgtgtatgtgtgtgtgtacatatgtgtaccatgtgtgcatgtgtgtgttttgatagttatattaatattagattagtcattcactggtaaagatttttaacgttatttttcaaactaatcctcacatgtgatctagcagataatttatggaatgaatacatctctgcactgaggaatattgcccccccaaaagtggcacacactatatgatctgtaaataatacaaaataacaaactttccaaacttgaatagccatttttcataatattcttcattttatgaggacatttccattgttttccattcagtatcccatctgctaccttttgttccagaattaattttaatgatggcagaactttcttgcatgtgcttgaggtggcctatgtaattaactgttggatctgctgttagagattgctaaccagaatagtttatggcttcattgcttttgtgataagatgagaatagaagaaatgcttttggtgaaggtagtgatgtagaactgaggtcagattttaggaactaaatgtgttaggtatttagtctgtcagatgagtgagacttttggaacttcaagactaaatctgtggcctggaatccagattcaggtaatctatttgtctttttacattttaaaaatgtatcctttatgacaggttgtaaaaaatatcttttgggctctgcctctaaataacttactttaaagttttcataaattcacatgcttatactcatatatttgtaattctttatacattgtgagagtttggtcactcacttggtgcagtaactcttataagccattactgcgtaattttactcaggtgatgcttataatttaaatgatgcaggattgctaaaatgtgatttcctgattagaaaaaatcaagcacacaaaatttaattacatttagtttttgcttttaaataggaatcatgcaaacccattctggaagtgttgctgtctaattccttagtgttttttttttcccagactttttttttttttttttttttttttttggcagagtcttgctctgttgcccagactggagtgcagtgatgtgatcttggctcactgcagtctctgcctcctggcttcaagcgattctcctgcctcagcctcccaagtagctgggattacaggtgcccgccaccacactcagctaattttggtatttttaatagagacagagtttcaccatgttgtccaggctggttttgaactcatgacctcaagtgatccacccacctcagcctcccaaagtgttgggattacaggtgtgagccaccatgcctggcccagactttttttttttttcagttaaaattcattaccaccatatacaaaaattattttcttgaatttttaattacaagcagacatttggcatttaaaatatttaaggccagaatacttttattactaaaatgtacatagatacaaattaaatactagctaagtaaaataattatgtatttttgtgtgtgtgattacctatagaactattttgtgattgtgtctcaatattaattcattaaatctcattgtttctcatattctgatattctaatatttttgttcttacaaaactataaagataatttttcttcatctgaaataattaccaatgaaattaaaacacatctaaaatatttgttgtggctatttggcggtatatcactgatatttatattcaaagatagtaagttgttacatatttaataagatcaccaatttaaaaattatagttgctgagcttccatcaactaaatataactcatgtagtattttcctatgttagttttattttttgttctcaagtaataatctttctgaggttccagttattaacctattacaaattttagattgactatctaccaaagttgtatgtgcaaatttagaattaggtaattaaagaatcttcttttactttagttccaggcagtcatctctatcagaaaaaaaaattccagagccttctcctgtaacaaggagaaaggcatatgagaaagcagaaaaatcaaaggccaaggaacaaaagcagtaagtgactaatgttttttacctgctagactgtattaaatgcctgctgcacttagatgctaaagataatcatgaaattattttccagatttaggctggtgctgtggttatgactatttgactaatcaagacagtcaagtcagctt

SEQ ID NO: 9282 - DNA, 2300 bp, Homo sapien
aatcccagctactccggaggctgaggcacgagaatcccttgaaccccggaggaggatgtcgatgtcgcagtgagctgagatcacaccattgcattccagcctggatgacagagcgagacactgtctcaaaaaataaaataggctgggtgtggtggctcatgcctgtaatcccagcactttgggaggccgaggcgggtggatcacaaggtcaggagttcaagaccagcctggccaatacggtgaaactctgtctctactaaaaatacaaaaattagctgggcatggtggcacacgcctgtagtcccagctactcaggaggctgaggcagaagaatcgcttgaacccgggaggcagaggttacagtgagccgagatcacgccactgcactccagcctggtgacagagcaagactttgtctcaaaataaaataaaataaaaaagaactttttttaaaaagagggtcttaattatacaaatttctctttagttttcttgttaaatgtgctgggccattcttgctttccttgcagctttcatcaacaaaagaagcaaggtggccagcccagatccacccagatatgggcttgccagggcagggtgaaatgcagctctgatttgttgatggataaattttgaggctaggaaaggccctccaaagagtagccagaggagagctttcccaccaatttgatctatagaaggatactcagcatctctgccctctttacctcccagttacatgtctgttaagatttaggggtagtgagattaagggacagaataaatttaaaactatctataattatataccccatcggccttcccatgggtttaaatcatcaaacacttcttgtttttcccatagtgttgcagccttctctgagccacactgctgtatcactgctgaacaagatgattaggtatgtgattgtagattgcaggcatttgaggtagtgcctttatttggatagtgccatttaatttgtgatactatttcgtatgaagccacatgtttgtttatagagatgtatggagcagtccacaaaagatactctgtggcaaagctaataaaggctgtttccacagagctatctgaaggcatgtggaagcacaatagtgacaaacagaaaccacaatgggtcaatgttgagagaatcctgggattgggaggtgctttttaaaggccagaagggaaagaaaatcagtttggaaggatttactacacagcaggtcttggtggatatattcagttctgggaacacttggcagtaccagggtgcagttcatttaccagtgtacaaatgattgaacagaaaagcattcaggagtctcgaataaatcatttccatatcccacccgagctggtaaacgggcgatgaactgtagaacagcccagctgtccagagacagtggacaaacctgggagtccgtttagcatgaatgactgactccggggagggaggagggagggcgttcagctgggggctagggaagggggtcaaagtccaagctgcagagaggacaataaggctatgcgtgggacacaaagccgaaccgcagcagcagctgcctggctcccggcgcgccgctgaatcaagcttcgatttgagaagggacctggcagcagcgcgtgcactagctgcttccttctcccagaagagcctggaagggcgcacaggctggtcgccctcgggcgagggcagccggcggcaggcatccctccccctcgcctccctgcccagcagcgccaggcagtgtcccgacgagggcagggcggggcgcaggctgggggagggcgaggtggggctgagccgcgcggcggcggctgacgcagtgcggggcgaggagcccggagcgccctggcgggcgtggagtccccagcctggccgctgggaggccgcgtccccaccggagggggcagggcgcactcacccggccgccctgaggccgctggcggcctgttggcttctccacaggcgcgctcgccgttcaagcgcgctttgtccccgccccagatcctggggggtgagcggtggagaaggggcgggcgcccgcgagccgtgaatcacctcctcctcttgctgcctcagcgccgccgccacctttccattcagtcgcccaacatggctggagcgcggcggaggtgagccggccgcccgcccgcagacgccccagcctactgcgcccgagtcccgcggccccagtggcgcctcagctctgcggtgccgaggcccaacggctcgatcgctgcccgccgccagcatgttgggcgccccggacgagagctccgtgcgggtggc

SEQ ID NO: 9283 - DNA, 2300 bp, Homo sapien
ttaatgggatgatggattatgctactaatatggccagctatcaaaaaaacttgcatgagtttgacactcatgtgtcagtcagtctgctgaattgaatgcaaacaaatgaagagatatgtgatgattgtcagaattaatatgagtacataagaaagaagttttaaaattttaagaatatggttacttatgaaagtgaggatagttctttgtgataaactcagtaatgaagatcatttaatgctgagatgggttttatattctagcacagaggtttgcaaacttctataaagggccaaatagtacatattttagtctttgttgcatccaccactgtggcttgaaagaagccatagacagagagtaaatgaatgggtgtgactgttttccaataaaactttatttataaacacaaaaatgagaattttatataattttcacaggacaaaatattcttgttttgaagtattttcaaccactttaaaaatgtaaaaatcattcctagcttaagggtcatataaaattaagtggcaggctagatttggcccaccagttgtaatttgccaacttctgttctagcttgatgcatattttcctaagcttttaattgactggaaatgtgtatgtatgttgggggccagctgctggtgaacaaaactggctgtagctactgagcatactcagtgtcacttagaaatccccagaagtttcagaatatatatcacttttgtaagatttcagtagataccacaagcagaagagcaagcagaaagggagatttccgagaattttaatgagatggggggcggggacagtgaagagcaaaaaaaatggtttttccatatccaaaaatatactcagccctgacttaaaaaatgctcttggctgggcgtggtggcccacgtctataatccgagcactttgggaggctaaggcaggtggatcacttgaggccaggaggttgagaccagcctggcaaacatggcaaaacccatctctactaaaactacagaaattagccaagtatggtaggcgcaccctcgtaatcccagctactcgggctgctgaggcaccaacctgggaggcggaggctgcagtgagctgagatcgtgccactgcactccagcctgggtgacagagagagactctgtctcataaaaaaaaaaaaaaaaaaaaaaaaaaaagctttttacattttcaaaaatatgcagaattgtccttgactgttgaacaatttaaatcctccattatggatgtgaagaattttaagactcttagtttttatcaaataaccaaatggaaataggaagtagccagtagattatctctacagctaaacaaaacaaacaaagcagaaacctgcaaaagacaaagcattcttgaaaaatgaagtaaggtcctagagaagctatttccaccatccaacaccagctgaattcccaaatggttaaactttcactataagtgctaccccactccaagtaaaaactacctaacacatgggagtagtaaacatgaaacattgctctcatttatttaatagtcgtcaccttgtaaataaatatgagtacatcagatctccagttatggggctggaagatttttagcataaggacaagtaggatgcagaggaaaaagggagaatggctagaggcatagcaaataattattttctgtaacacggaagacttttatcctatttatttacaagggaaaccctcgattacaacttgtctattaggttctgagaccttttgtgaaatcagacccccaaaaaagccggggggatctgtgaaaaacagatccaagtgtatttgatatttggcattctccggtgtccctcccacttgtcactttcttttctgatccgtttcagattcattccatatccttttcatattcattttatgttgatcctcttgtccctcctccctcattttcgtggttccttctccctcctcgtctcattaaaactcttgcaaatctccctttctgcttgctcttctgtttgcggtagctgctgaaatcttaccgaagtgatgtatattctgaaacttctgcgggtttctaagtgacattgagcatgctcagtagctagggccggttttgttcgcttggaaatctccctttctgcttgctcttctgtttgcggtatctactgaaatcttaccgaagtgatgtatattctgaaacttctgtgggtttctaagtgacactgagcatgctcagtagctagagccggttttgttcgccagcagatggcctgattcgacctctccaaaaatagacattttaactctctg

SEQ ID NO: 9284 - DNA, 2300 bp, Homo sapien
cattggactctcttattatctatcagtcatgctagtcttactcatggaggcataaacagcactgaaaatgagattttaggtcaacatttcagctattacacataactacctaatacctagttcataaggaaatgtctttttctgtgaaggaaaacccagtaaatatcttgtctgaacatgtatctcataggttaatctttccttagcctaattcactgcctccctgtgactggaaggaaagaagtgactctagtaagggggaagagatggcccatccagctctcagttcttattaaaatttttatgtatttttctttttaattttaatgggtatatagtaggtgaatatgtttatggggtacatgaaatattttgatacaggcataagatgtataataatctttcaaggtaaatgaagtatccatcacttcaggcatttattatttctttgtgttataaacattccaattattctcttttggttagtttaaaatgtataataaatgttaactgtaatcatcctgttgtgctatcaaaactagatgttattcattctatctaaatatatttttctacccattaaccattcccacttccccatcccccactgccagcctctggtaaccatcactctagtctctatctccgttagttcaattgttttaatttttggctcccacaaatggagtgccagctcttagttctttacccaacaacttggtcaacctctccttatgtccctttactcacaataaagaaaaaaagagttaatcccttagcaaattatttcccctttcagttaatttagtcaatatgttttaaaatgttgaaagtaggaaaggctgatacacagggccattgcttcttccttgcctgtatggttttgttactgaaaaaacaactccatgtcaaagtctgatattctcggaaatgctgaattcacttggtctaattcaattttagatacaccttggtgaattttgtcataaaaaacaggatttttgtgattaaacaagatatctaccctgggacataatcctattctaagtactattttccaatgacttaacaaaaaatcgattattatatatcaaattgtgaaatcttccccaggttatgttctggaaaaaaacatggcaatttaaaaaaatgtaatttgtgcatgtatttggaagaagagatgcctagtttctaaccaaaataatataggacagtttgtaagataattgttttgtaaggatatacaaacttaatacagaaacaaatagcataattcaatttttgttttgagatttttttttcagtaaggattttaacatctttggacttttacatctaattaagttttgatcaagctcttttttttcctttctttctttttttttttttttttaagagacagagtctgctctgtcgcccaggctggagtctctcgactcactgcaacctctgccctcctgggttgaagcaattctcctgcctcagcctcctgaataactggggctacaggcgcgtcccaccacgtcccactaattttttgtatttttagtagaaacggagtttcaccgtgttagccaggatggtcttgatctgctgacctcgtgatctgcccaccttggcctcccaaagtgctgggattataggcgtgagccactgcgcccggcctgatttaagctctcttagcaactcaatgcacagaatggtaacttactacagcgctatgtttcttataaacacctgtttacggagtattaaaactgcacatgaaggatatttaaggaatttgggtatggggtaataaatgggaagggaaacatcatttttagggttagcgatccttaactgtgtccttgccttctttttctttctcaagtctggtctctgactcgaaaaagacgtcaaagacctgtcagaactagataaaattatgatggaggtgttttgaaacactaatcctgtggcccctgtcaaaaatttaggctttcatttatttaggcctgccttgcctcagcgattaaaacgatgtcagccaggtcggctgctttgccgcagcgtccccttgcggccctatcaggaccggaaggaacacgcagaagccgcagaggctgttgggaggttgggcctcaggcggtggaccagaaggagcttactcgggccctgacgttgtcaggaggccctgggggatcctgctgaagctgcgatttggcgcagagctgagatgtctgagctctagacacagggacctcagtgtcaaaagatttgggaagatgaattgggtcggggggtcccggtaagttgtg

SEQ ID NO: 9285 - DNA, 2300 bp, Homo sapien
tatttcttccagtctccaagatactctattcttttaatgtctggcttgttcctatcacagttatcaagctgagaatacagctgaggaagttcattctctaagtcaccagaggtataatatgtgcttaaactgtcaatttagtgccctaaaaatccattaaccaaaaacaaaaacgttttctccctttggtcatttcatataataaaaaaaattaatattttatagaggttttttccttgaattaggtgctttaacaattgatttccaagggaatattagtattgattttttcctcagaaaagcagatatgatttaatagggaaaattattattctattgatatttcttatctcataagaaatttcttatctaatattttacacaggtaaattgaagtgaaaaataagctactatatggtacaatcaaaatataataaggagaaaaagtagaccaataaagtgctctctaaaaatttattttttggacttaatcaaaataattgcctcaatccttctctttattgtatatgtagccttaactaactatatacttataaactcagctgggctgatgcacagtaactttattaaaggagaaactggactcttgttatttcctaaagcagaacatggcctgttctccctgatataagaaaacaatgttttcaactttataaccataaatgcacataataacagggaaaattagccacagttctcctcccctactcccctgagcccctactttaaaggactatttgttatttatatagtgttaaagataatattccatatctttgaagtataagacagagaggcacagtataagaattatttataactttttagaaacaattacttgaaaaggaaccttatacaattagggtattatttttagatttggtgaacatttatagtatattaaaaattaaatgtttaaattttgcaggtttttttatattaggcaccttttaagttcccagcatatttggctaccactatcaacttggaaacattccatttgtagtatcatcaaatatatattttgtaggacaatttatatatgatgtgatttgacctaccatattaaagcagacacagattacgtatcatgctttcaaccaaaattacagacttcctttgaaacatgctgcagatttgatagaggtatattatgtcttaggaaaatacaatgaagaaggtccaaatccctattgaggctggatgtctgatctgcactagacttaagaggatatatcatttcatctgcatataaacacatagggctgaatgtgatgtcaaaagggtttgccgttaataattttcttcaatgtaaacattcctaataattttgattgttgctccttagtcaatcatttcccaaaacatgattatttttaatatatgtaaaatatttaaataataaataataaaaggtaatgtgtccattttaaattttgttcccagccatacacagtagttccctgatacaaaatgctatgagaataccgactattttttcataatttaattttaccactgaacctgattttagtacataagagtctaaatattaagttattcactctaaaaggggaaatcagtaaaagcaaggaatttatgaaatttttgctgtaatttcagtatctgttatacaggggaagaatgatcaggaaaaatataagctgacaacttacccttttgctttttaacaacaaaataatattgaaaatatattagaataactcacagatccagaagttggtggaaatggaagaatgttttagaaaataccatccatatgtttatctaagaaagtctcagaatttagtgacactaatacagttcataaatactgtaatacagtggagagagttggaatgttattttggttttatttcatcagcacaattattaaaaacaacaaaattaatgagacgttttgttataatcagatttttttttaccatattgcaagttataaaatgtcaacttatactaagtacctaacaactgacttttattcacttgttgtgacaagtttttaattaccaaattaagaccttttcagtatctatgagtaaaagaaatagatgattatatcagaccaggagcagagaatttataatatgtgctttatagcaaaatgtattaaattgtggttaaaatttatagctcatatgtagctgctgccaataagaaggctcagaattgttctgtggattaatttttacatcctgttttctgtcacttttaccaatcttcttggcctcatgtacaataatgtaaagccaatttga

SEQ ID NO: 9286 - DNA, 2300 bp, Homo sapien
atcttagtaattcacatagcttatacactaggtacttaataaataaatattcagtgtacaagtgattatgttacctaacctggacagaagacacggaggtgctattagaatgcaggtttctgaatcccaggtcagtttttggttacattctgactctataacttaagtacctaaaatactttgtatagctatggaactttttttcattttaaataaaatttagacaacttattctgttttatactactctcctttctatcccttcatttaacacttgtgatttcattgttttattttattgaaaatgaaagcatcaaaatagcttctgttttaattttcccctgcctctatatggaagaattattttgcacaatataactattcttattcttaaattattgtgaagattctgaaacttagtagcatgacacatgtcaaattcttttggctttaaatatttgaattttctttcaatatttctgttttctgcctttttagatttggtatttatgttaatttcttagtgattacatgtaaggtttgacattgccatacaggtctttatgaaaatgtatatggtagaacttggaaactataaaacactgcacaaatggaatgaattgttttcataattgttatcatcactttacactctgactgcaaaacattcgcagttttcatgatgatgggagtaattccactgggaatttctctttttgcaacagctgtcagaattcagtcttaaaatggttggcagctttttagtgtgatcagtaaaacacatccttcatgctacatagttaatttataggtttggtttattaatttaaaaaaggaaaacactttttttcaagatgaatgagtccatgttggtattaaaattttagataagaaccatcatcattagtttaaaaaatagtagacagaagccattgatgaatcaatgagacttaaacgtattcaaaacagatttgatttttgaaatattatgaaggtattgataaatattcacaaactgtagatttttaactatggaaatattcagcctgatttaacatattgcttggatgaccactgtctgatgtgagtaaagctaacttgttttagaatggcttgaaaagctgggcaaagccatggttcagaatgtgtatttaagatttgaattctatcacatttcatcagtgactcaccagcagtattttgttttctttgttttcaggttaactttaaaataatcagctggtttagctattaatgtttccaccagaaaagaaatgtcttgtgataaacttgtcatccttaaatgtgccagacatatcttccattgtgcatcaacaaactggcattatggtcttttaaaagccagtctccagtgagttcacttagcacgaaatgagtctacagagcttaatcatgctagagacttagctcaccagagtaccctttttcgggaaacataaatgattctcatgggtcccatgtcagtttctcatctttttacacaatgctagatacattctgacactgtcttactcattgtgtcttttttgaggcgttccttcacttgtcccagatttttaccactatattacattctcttatggcagtcttttaaggacattaattcacagtgaatgatgacttctgattcattccatggacttgcagcttaatataacataaccttattatgtggccaattaaagtgatacagttttagtgaaactaccagctgccactgtccctagttgtgggatgtgcatcactttggaagctttcaaccttatctacttgctcaggtgccttttcttgattatacaaactccaaaataaatttatttgaacatagtctttatattgtgatcttttcaacagcttgcatgaattcccacgttaatttgatgttattactgtagttctccttatatttttttcaaattgaatacatctttttctatcaaaataaccctgtttctttgggtaactatcaatagcaattgttttattcattgctttgcaggtactacagtgcaaccattctgcagatgtctggtgttgaagatgatagacttgcaatatggctggcttcagttacagccttcacaaatttcattttcacacttgtgggagtctggcttgttgagaaggtgggccgcagaaagcttacctttggtagtttagcaggtaggtggctggataaagaattcaattataaactttatttcctaataacttcaagtttaaccttcaaaaatacaatacttacaccacttctaatattggtttctcagccaaacaac

SEQ ID NO: 9287 - DNA, 2300 bp, Homo sapien
gcctcagcctcccgagttgctgggattacagacgcgtgccgccatgcccggctaacttttgtatttttagtagagacagggtttcaccacgttggccaggctggtcttgaactcctgaccccgtaatccacccgcctcagcctcccaaagtgctgtgattacaggcgtgagccaccgcgcccggcctccgatgccttttttttcacgtcacatttcttttaaaatgtaacctgaccgcagatacataactgtcctaatacggaacagaatttttaaagtagtttcttgttctatgaccccaaagctgaatttcaagcaaggaatgctcaggaaccaagatgttcactgcaccagctgagacaaaaagtagtttattttcatctcagcaagagggaactgtcaaagaaccagatgcttctcatctgcggagcccttctcttcagaagccgtgggaattggctcaccaccagggggcgcagttttactataccgtagcatgccgcggaaaaggcgcgctctcacctgcaatattgtccgaggtctgaatattaaagagttcattgctgcagatctaaaggctctctctgtttaactgatgcctgggaatgacggtagagccttgctttaaagccagacgataacatttaaatagttaagccgtctggcttcattagtttatttttccttgttgctggcaaggaaagtactatattgtagagataatcgtgactgataatcaaaacgaaagcagttttgacaaattctaatataagtttttactgaaacaggaatgacaaaatccttttgtctgaaaggaaaaaagttatagctgcatgaaaaataggccccaggctaagaaagcttttgctcaaataagggaaataaaagagcagtggaattgtaggaatagaatcatatgatgcttgactttttgccctcagcctgaagaatgaaagcaaattagaggcacaaaacatctttagcagtcccagctgctaggaaggctgaggcaggagaatcgcttgaacctgggaggcggaggctgcagtgtgccgagatagcgccactgcactccagcctgggcgacagagcgagaatctgtctcaaaaacaaaacaaaacaaaacaaactatctttagcccctgatgcgcaactgtatattttaaaaacatttaaattaaagggggaaacaaaccccaaatgaaccaacaactgttaattcactcaacagtttaaaaaattggttgcaaataacgttatctttgctttgtttcaagtaaatgaggctgttaaaacagtgcctcatggagggcaacagtggggattctcaggagagaagctatcctaccttttggttagcatgttggggcggggaaatggagactgcctgccgaatcacaaatcagggtcttgagttttctttctatttctgggaattacccgttacatgagtggaatgcatatatgtgaattttcttttacaggtcggggatccatggaaggagggtttgggattcaccacagagatatgttctctgtcctcaaagaatcaaatgtaccattcctttaaaataagcataaattgaggagggactggcgatgagagtggaaactagctatagaaatgggagcatgcagccctgaattgctccagaacaaacacatttaatgccagggaagtagaccacgctgggtaatgtcacaatactataaaaggaagggtacttgctaggtcctattctaggatattttttccagccctctctctaggctgctggaaggacagtgaggctggtttaggtgctctctccctcctctccaaacacggcaaacattctgggtggcttcccgtctggaagcctgttgcctgatggcatcgccacattggcttgctccaccgctgcagctcggaaggcagggttaattccatacggttgccagagccctaaatgagggagcctaggtcagaggtcgcacccaccgggagggcggggtttaggggtccggggcgggctgagcctggccccgcccaaggagggggcgggacgtttcccgggccccgccccgccggcccggggttgcacgtgacccgcggtcccgcctcccgcccgctccgcagcgccagctcggcaggcgcggggcgtgagtgtggagtgagacccgccgggctccaactccgcagcgtcggagcgcggcgggcagcaactttctccccggagcggccgtggcggcggctgctgccgtggcagccggagcggaagccgggaggaagaaagcggcggcagcggcggttgctcccg

SEQ ID NO: 9288 - DNA, 2300 bp, Homo sapien
aataggcaatagatggatgaatgaattgtggaaattaggagacatcttttaatttagatttatttttctttggaagggaggtaggttttaatttcttgcaaggttgtaattcagtagaacaggaagggagaaactaatgcagaggaacagaaggaatgcatgagatggagaatgcctagaaatgtttgagacattgattaagtcatcagaaatggaaacaagtttagaaacaacttagaaaataatacactgtaggtctgataaatattgtaagattgggagttttttgttaaattatggaaaattttatatagatacaatagtagaacagaccacatgaacccatctcatattatcttcaacaattatcaattcaaaagttgttatcgttatctctatctccacacatttcatcttttcctccaccactggatgactttgaaagaaatcctaaccatttcaactataaatattttagcatgtctctgtaaaagttaaagactctataacaacaagacatagacccaatatccaggttgagtaggagtttgctatcttactaatctaatgtattaacaaagtctagagcattcttattaaagtggtagagcatgaagaaccttctacctggagttaggagatttgctgggttgaagtcctggctctcaacttcccacctgtgtgactccagcaaagctcttcacttctcaattccaaatctcaatttcctcactagtgaaagaaggatacatagtagtagttgtatccatttcagaattgtcatcaggattgaagtaacagatgtgaaaacaaaactaaaattgtgaagtagtaacttccagtccaatcctcttctttgtaagtgatcttgaggacagacacatcacctgaaggatagatcatctttgcctagccttgtctacaatgttcttgctaggtttcttttcctaaaaacacattacttaggtacttaacagaacaaacaaacaaacaatcaaaagacaaaaccaaaaaactttggggttatagacacccatactcataagtatttctgaataccaagagaagagtatttaggtttgcttctctcaacttttcacctttcatttcatgtaccctgtcctttgtctcagctctaatagctctgagagctgattacttttcgggtgtcccaagtatcaggatcctgcctagtgcaactcaaatttccaaaagttaatttagtggccttttggtgaccagagcttcagataactcacagggaaacaatgtttatttcctctcccactaacagtcacaaaaaatcataaaaaagagtagcgggggcagttttgatggctaacccctctttccatcctttgggggaaaattgctcatctccctataggtggaactctaaagacaatgtattcctaaaaggggccatctgggcggtgtcctcttttcccagcgccctgatttctattcttagatctggagataggcggctttcatttttcctgctcccagttcccagaccttccgtggggccgcaggatccccggctggcgggtcgcggagggtggccggccgggctgcgcactgcgcgcctccgctgcggggctccgggcctgtggactcagcggagtccgctgagtcagtttcttcccgcgcgactcccggccgcgccgccgctgcggtggaatctggtcccaggaggcggcgtccgcccggggtccggtctaggcgtgcgtgggggccacggtcacggtcatcccagccaggcccggctccagcagccccacggccgccgccagagttctgcgcggcccgtcgcctcggcggagcctctggcaggcccctgagctcgtttttggggcctgagtgggggaggaggaagccgagcaggagggctccggagagggagggcaacgcggggcggggagctgcctccttcctcataaacaggcgggcgtgggcgccgatggggcccgcggggagcgctggctgcgggcggtgagctgagctcgcccccggggagctgtggccggcgcccctgccggttccctgagcagcggacgttcatgctgggagggcggcgggttggaagcaggtgccaccatggctagtggcagctgtcaggggtgcgaagaggacgaggaaactctgaagaagttgatagtcaggctgaacaatgtccaggaaggaaaacagatagaaacgctggtccaaatcctggaggatctgctggtgttcacgtactccgagcgcggtaatcacttgaaaataaactgtgcttttatttttgcaaactttctccc

SEQ ID NO: 9289 - DNA, 2300 bp, Homo sapien
agagtgtttcagtaaaatgatttaatattgggtcttccaaaagatggatttaagagtttcaactttaaaagacagaaaaattaagttattttacacaatgaatattgtcgtgccgtgtgtcacagacatgacatgagagggaatcagagaacatacagttaatacaacgcaaactagtatcattacttttgctcaatcacttccattgtctaagtaagataattaaaggacagcataaaataaaatttcaaaactttactcaatcatattaagctattttaattaaagtaaatgttttaatgccattgaatattcatcaccattcaaaattattgatgtaaatagtgttatatgttaaaggtaatttaacttccatggatgagaattcagctaatgtttcacttaacttttaggtaattttttcaatatcctggtattaaacgaagtccatgagtttgtggtgaaagctgtgcagcagtacccagagaatgcagcattgcagatctcagcgctcagctgtttggccctcctcagtaagtaacttcactaaaaaggggattcttacagaggcatttgacatcaaatatgaacattgtaacaagagaatcatatgtacagatggaagcattcaatgccttttctgtcctgtgtagctcattttccagtagaggatactttcaaggaaactaacagttgtgacaaatatacacatctcaatgtagagttttgctttacatcattcttgatttagctttgtcattaagcagctaatctgttttaaaaaaatttttatttgtgcctgggcatggtggctcacgcctgtaatctcagaactttgggaggccgaggcgggtggatcacaaggtcaggagttcgagaccagcctggccaacatggtgaaaccccatctctactaaaaatataaaaattagtctggcatggtggcgggcacctataatcccagctgctcgggaggccgaggcaggagtatcgcttggaactggagggtaggagttgaagtgagctgagattgtgccactgcactccagcctgggcaacaagaatgaaactccatctcaaaaaaaataatttatttgtgttttaagttctggtgtacacgtgcaggatgtgcaggtttttcacataggtagacgtgtgccatggtggtttgctatacctattaacccatcacctaggtattaagcccagcatgcattagctatttttcctaatgctctcccttctccagtcccatcccctaacaggccccagtgtgtattgtccctctccctgtgttcatgtgttctcattgttcagctcccatttataagtgagaacacgcagtgtgtggttttctcttcatgtgttagttatctgaggataatggtttccagctccatccgtgtccctgcaaaggacatgagataattcctttttatggctgcatagtattccatggtatatatgtaccacattttctttatctagtctatcattgatgggcatttgggttgattccatgtctttgctcttgtgaatagtgctgtgatgaactaatcttttcaaataatcctcctctcgtctattaggttttttttttttttggtaccttcttcctcattttattatttatctggataggatggtagcattatgagacgtataatatattaaaaattatctttataattgaccaaggcttctcctaaagcacacctcattctgttggtaatatttcaaaatatggacttagagttggtcaaactgttaagtagataatatatataatgtttttatatatttttcaatttttttcaagctgagactattttcttaaatcaagatttagaggaaaagaatgagaatcaagagaatgatgatgagggggaagaagataaattgttttggctggaagcctgttacaaagcattaacgtggcatagaaagaacaagcacgtgcaggtaggactctcataaatattagagttattcaaaattatgttttccagtcatttatattttgacagatttcttttttctcccctaatccaggaggccgcatgctgggcactaaataatctccttatgtaccaaaacagtttacatgagaagattggagatgaagatggccagttagtagttttgattttatatgatagaaaatttcagttatattttaaatcaatacctataaaataccttaaccgtaacttttattgttagaaatatttttgatataggcatttagttttagatgttgctgcaaaatagtagtaggtatgtagtattttgatctcatc

SEQ ID NO: 9290 - DNA, 2300 bp, Homo sapien
cataaataaatgtaattttatattgtggtgccttctgtggaaaagtttcaggatgctctgtggtacctcaggggaatctgattcagactgtggagtcaggaaagcatttctgtgcctgtgacatttaagttgggtctggaaagaggagcatccaaaaggaccttgaagcttgtgtatggtcagtgtgtcatctcagctgaatctcacaatgatcctaatggtcatacctaggacaggtatgacctctgcccaattgaggaaattgaagccgtgagattttttgtgtgatgcttacaggtgcatacaattaattatcttgttgtgaaagtttgaatggaccccagttcaaaatctgtttgctttgcactacacaatcttaatagtttgagaagtggtcttacatttgagaagatgccccatggaggtgacatctgagcaggaccactaaccattaaaaaataatcccatgtaaatggtgaaaccctgtctctactaaaaatacaaaaattagctgggtgtggtggcgtgtgactataatcccagctactcgggaggctgaggcagaagaatcgcttgaaccagggagtcagaggttgcagtgagtggagatcaggccacagcactccagcctggcgacagagcaagactccgtcaatcaatcaatcaaacaatcaataaatcccatgtaaaataaagttttagttctgtggccttatgagtgttttccatacagcatatgaaactcaagactctgaagtcttaagtggagaatcatttcgattcatttattttgcgaataggtgaggtataatagctatctttctgcttctcaggaagacagcttctaggagtgtcctggaacattttgacccttgaagattgtctagataaagaataacccatatttttaaccttgaaaatgctaataactaattcctcaatccgttttcctagaaacggtagatttgtagatctctcaagtgtcttagtgttcatctgatctagctacactcttttacagataagaaaagagactgtgtgattttctgtttcccaaattgtgtttcacagaattttatttcttggaggtacctcatactgcatttccttcttaacaattcataaagtaggccaggcacggtggctcatgcctgtaatcccagcactttgggaggccggggcgggcagatcacaaggtcaggagatggagaccatcctggctaacatggtgaaaccccatctctactaaaaatacagaaaattagctggacatgatggcacctgcctgtaatcccagctactcaggaggctgaggcaggagaatctcttgaacctgggaggcggagattgcattgagctgagatcacgctactgcactccagcctgggcaacagagcgagactctgtctcaaataacaataataataataaaataataaaaaataaaaaaatcataaaatataccagagtattgagaactcagatattttactttattttactgaatgtttcccaatctcttaagattatatgatcgaagaatacttttattaaataacacccattattattccatagaacactctttatgagctagtaccataaagaatttttgtccttataatatactgtattttagtaaagtgttcatagttgttttgctatagttatttaagagtaattctagttaatctatatggtatataataacatcacacataatttgaaatgaatattctaggaatttttactttgtacaaatgttgggtagacaaatttatatttaaatagctgtttagcttccaggttaaaaggttctggtaagtatagcatattattttattgtttagtggaagtattaaggctattaccttatttttaaaagtggatttttaaaaattgtcagtgtgagaatggaaatcaaattaagtgacacactattggtagctgttcttatttttgaatttaatggaaatctggttaaaatgattaaaatgtttatctcattttttttcttttagctgctatgcctttcttgcctccttctatgacaatcctaaaattatctcagaacaaattttcctgtattccagaagcaattttaaatcttccacagtaagtttattgttattttaattttaaaagcacattagctggaacagaacctttagaaacatgatttcgatttagtcatatagaggtaattgatttctaaacctactcaacttgatgtttttgtatgtatgaatgattttcactagataaaagacccaactcattacttaaaatggaaactttta

SEQ ID NO: 9291 - DNA, 2300 bp, Homo sapien
tatcatatggctaagttgggcttcctcgtggcacggtgatcacagaataattagacatctttcatggtggctggttaccaagagaaatgaagcagattttttctgtcctcttaaaggctaggccaaggactggcaaaaatattaattctgctacattctagtaaccagagcaaccacaaacctagctcagattaaaggggaaggaaaagagactctatatgaatagcacctatgtatagggatggaaatgatgtgtccatctttggaaacttccactataaatagtggtagcacgctatagatccactaggaaaatcaagcacaaactctttaaaaaataagtgtatcttagtaaaatagattagaataactagataataatggctaacatacatgaggttaatatgtgcttttcaaagattagctcatgtaattctcacagcaacctttccaaatggtactttattagcccctatgatacagatgaagaaattgattgacagagaggttgaataatttatccaacggtacacattcaggaagaggtagagttagaatttcaaaccaagtagtttgactccagggcctatgagtttatacattcatagggctgatattcaaatgagagaagagaagtaataaataaacatataatatgttgagtggtacagagtgctacaaagaaaatatgaagtgcagttggagatgaattgtcaaaaaaggtcttagcacttaaaaaacactaaaacagcaaacaattctctttaccacctaaactgtaagagcgatctggaattgctataaagtacacaacatgggagaagtcttaaacaacagtttttattatttataggcccattgcacactgtcattaaataccaatatgttcaatcaaccatgcattcattgattcaataaatactgtacatacaaaatagaaatacagaaatgggtaagacaagtccttgggcctaaggactttataacctggtatttcactcaactacatgatagcataaataatgtttgcttctgtttaagtattccttaaacattatagatctcccaaagaaaattaaatacaaacctctttttaaagtgaatttgacaaagcaaaataaattggaatatatagataaatatgctaaaatttgtcatatgtactttgcgtactttacatgtgttatttcattctcagggcaatctaagacagtcacttttattatctcattttatagagaagaaagctgtgcagtaaagaaatcaaatacctttcccaaggttacagagctagtagtagagcctggatttgaatctgggttctgactgatttttaactgccatgacaaggatcaaagctcaaagtgtgatctctgtgttagaaacatcggggttgctctttaaaaaagccgattctcaggcctcaacccagacctactgacccagacactgcaagtagaatccatcaaaatgcagtagttactttgagaatcatgaaactctgctacacagtctgtcttcctattcatggaagtcctctcctagtatataaatgtgaagtaatatttctatttcaaacctgtattgataactgtctggaagataattttcctgggaatatattattgatgagactgcaaaacagatgtgaggtattggattgatctttccattgtagctagggaaatactgatgttcattgtttcagtgaagttcaatgatttcctatccgaattaactcccttaatttaacaattttttttttttttttgagagtgaatgcccctctgggcttctaggccacatggttgctagagaaattaggtactgtgttgcacttgaaaacactaaaatctttctgactactttcactgagcaaagagacataaaatgctttaaatttgcaacatttcagaaaataaattttagtgattatttatgactcgaatctttcagattttgacagtgaaagtggaaggttgtccaaaacaccctaagggcattatttcgcgtagagatgtggaaaaatttctttcaaaaaaaaggaaatttccaaagaactacatgtcacagtattttaagctcctagaaaaattccagattgctttgccaataggagaagaatatttgctggttccaagcaggtaaagaaaaccttaaaaaattaattgctacatggaaattcactatctattcttttaattgtcaaactaactgtagtctataatagatgtattaaataaataaatatattttgcttctagtgtaaacctcctactgacatgtatcatttattttgg

SEQ ID NO: 9292 - DNA, 2300 bp, Homo sapien
gggaaaatggcaaatattttactttctgtttatgtttggatgatgtggatttttgttttctataatttgactggcttaactgcaaagatatcccttgctttaaaatttgaagacactgcaactaaattttatttcagcattttatattttataactctaggtataaaaggctaacacttaattttctgagcattcatgaaacaaagttttgcaagaacattcaaaagttacagatataatatttccttcagaaatttagatatagtacaaaattctacaaagagccacatagaattgaaactaaaagtaagaccaaagtaaacattggacataatctttattttattatcacaagaaattaatataaagtaaccaaaagtaagtaaagtaccaaagcatgttatatattcaattcagaatggttagggaagaatatgaaataattgcaatagtctagcttgtttagttttcaaaatagtgtttttacattaagaactaatataaggttgtattacacgtagaaattttaagaagaaaacaaatagtgatgactttctatttttttttctctgtaggttttcttatgcagctttcagtgattccaacatcataacagtggtggtagacactgctctctatattgctaagcaaaatagccctgttgtggaagtgtgggataagaaaactgaaaaactctgtggactaatagactgcgtgcactttttaaggtaaattctgtggtttttaattttattcccaaaagaattatctttgcacttcatgtgtcacagaggaaggatttttcttcctttctgcctctgaatagagaatttttttaaaatgcagaaaaaaatttgtaatgcttctcagcaccatcttttcagatcaagaaaattttgtcttcagaacataaaagaataggcacataatgtgcatagttttctcatggtattacaaagaatgttctcgaatgaaaatactacattattgaaaatgagcatattggagtctctgctagctttgacatagttctgtcacagtgtcaaatatactatttataattaaattatgggccccaggattatctgctctaaagaaaaagagtcacaaaataatagacaaatatggggggaaatgcaatggactgaccgaggcgctaaggagtggggatcaagaccccagaatgagagcatagtgcttagtctgatgcagcctgtgagtgacaaatccatagcaagcacattctttctgtgctggtgctgagaaacaggaccattttcaagcttatttgctagccactttatatttttattttgttttgattttaccatatagatctatgatactcttgagaacattttagattacacactatatctgtaaaaggatacttcaaagtttcctgtcttagattcatctgacagtttttctatggattgtgagaagggctcacagtttatgttcagaagggccaacaggtctccttgataaagggttccttacttcctgaagtaccaaaacgattaggattcttttatttctggacacttcatttttgtcatgaattagactattcactggttctgggaaaaaattcagtggtttgtatcgatatcttttacatgtgaatgactataattttatgttcctttgtaacattgagacttcatgtaaaacttttgactctaacttttttttttctttatcctgggcacatgtatgctatttttactgaattagatagctttggtatttataaaaattgtatccctcttattcataatttcctgaaaatgaagggctattgttatctttgataatttatgcttcaagtaaagaagtgtggctctttggcatctgtatttagcaaaatttgctttgtataattttaatgatgcataatggtggtggtgtcatgttttaataatttaaaatgttgtttatgttatcatatgtaaatagcatttatctcttaattggtggtaaaattattaatgtatactttatggttctagggaggtaatggtaaaagaaaacaaggaatcaaaacacaaaatgtcttattctgggagagtgaaaaccctctgccttcagaagaacactgctctttggataggaactggaggaggccatattttactcctggatctttcaactcgtcgacttatacgtgtaatttacaacttttgtaattcggtcagagtcatgatgacagcacagctaggcaagtttctttcctttagatatttttcatattctctaagtcttataaaatatgcctttattttacgtttacattt

SEQ ID NO: 9293 - DNA, 2300 bp, Homo sapien
tttccttctcctcttcttctcctaatctcttttcatgtggagccaccactggagcaccaggaagtaggacaggtaaacttggggaaagcctttcataggaccttcaacattggcataacaataatcattatgatgaaggcgggatattgcttactgcattaaccttggccttgtaaagaaacacaataaatctgaaacatggttgtccttatgtcagttataagtccaggaagtgtgttttcttgcttcaaagtcacaaatagacctactgttggccacatttttctagggtcacaaaagagttcccatgtagatccctctctcttctttcctacctaggcacagctggagtgccctctgctacaacagtctcccctgggagctccaactcaggtaaagcaccaggctgggaggaaccactacttggaaagggctcctcagtgaggcatctgcctgggtgaccctaccatgcttttctcagatgcttctaatctttgccctcactgctgttctttgtccctgttttgcagaggccacaacttctgtaggagaaagtggaaaaacaggagctgaaacaatcacaggttagctctgttaaggaactaagtttactttgttgtaatttcccatgtcttgatagaaatatggcaaaagttttaaaattttctatatttggcatattaggcaaaaatttagcagatgttcaatatttaatatcaataaatatagttcagatacttcaacgtttttcccttatgtcttttgccttgggtcttggaacccttcatccgggcatcataaggcctattccctgacagttatataggtgactttggcccaaatctatctttctggactgaaattctaaaaataaaattcagtggcagaggactttctctgtaaactttctgagggaattataggttctatgggcaatggatggatcaactcttaaaaatgcaaactccagagaaataaattttctgttttattaaagaaaaaatttgttttttttttctttaggagcctatgcccatatcatgaggagcaacaaactgaccgactgacctcaatcttttcctttttcaggtactactgagggcatctctggcagaactctggaggctaaaagtgcccacacaggtcaggaattctgaacatggccctttgggaaatacaggttatggggccatagaatgtccagggcagtcttcatacttctaattcctttctctctcagaggccacaactttcccaggaggcagcagaaccacccaagcaggaccacaccgggggtgagcttgtcaggcttaggcctgaggctctcatcatgtctctatctggtagctacagagaacaaatagtgaaggcatttgaagtagggcctgcattttattctgggcaatatggtgtcctgtcaacctggtcagttattctgctcctgaatttcatgaccttggatagtcaggcaggtactattctagcttatggagatattattttttctcataaaagatatttaaaaatatttcatatatttttgccttccaggacttcctattcccctacccacattgctttttcactcacagcttgatacttttttctcatttttctcatacacttacacatgatgttgatttcctctctcctctcactagaaagcttcatgaagacaactgattattaaaatgccccaagttgtatcacacagtcctgcttataagtataaaacaatgattttttcatcctgtaggcccctctgtcacaccagggggatatattcctaggagtgaaacaggtcaggttgatttaaaccctatttttctcttgcctcatagtgaaagggaatcccagaagcaacacatccatcgcatgttggcctggaaaatgaagtgctaggaagttgttcattttccattcgctatagaaatagagtgtccacaggagagggcttccagtgctttagggctacattgatgcttccaagcttaactggagacaaaaatgctctattcctttatttcctttctttttttttttttttttttttttttttttttttgcattttagttaccactggagaattgtctagaacgaactttatatctggaagttctaacacagatagcttaacaagaaatacctcttattttaatgtcagatgtcatgatttttttaaggcttctctgataaaatatcttcttccagtattctaaattcccagcctttttcattctcctctttcttccatcagaggccaccacttccacagaagggactggtacttctggaactg

SEQ ID NO: 9294 - DNA, 2300 bp, Homo sapien
tttgtagattctggatattagccctttgtcagatgggtagattgtaaaatttttctcccattctgtaggttgcctgttcactctgatggtagtttcttttgctgtgcagaagctctttagtttaattagatcctatttgtcaattttggcttctgttgcctttgcttttggtgttttagtcatgaagtccttgtccatgcctatgtcctgaatggtattgcctaggttttcttctagggtttttatggttttaggtctaacatttaagtctgtaatccatgttgaatcaatttttgtataaggtgtaaggaagggatccagtttcagctttccacatatggctagccagttttccagcaccatttattaaatagggaattctttccccatttcttgtttttgtcaggtttgtcaaagatcagatgattgtagatgtgtggtattatttctgagggctctgttctgttcccttggtctatgtctctgttttggtaccagtaccatgctattttggttactgtagccttgtagtatagtttgaagtcaggtagcaagatgccttcagctttgttcttttggcttaggattgacttggtgatgcgggctctttttgggttccatatgaattttaaagtagttttttccagttctgtgaagaaagtcattggtagcttgatggggatggcattgaatctataaattaccttgggcagtatggccattttcacgatattgattcttcctatctatgagcatgaaatgttcttccatttgtttgtgacttcttttattttgttgagcagtggtttgtagttctccttgaagaggtccttcacatcccttgtaagttggatttctaggtattttattctctttgaagcaattgtgaatggaagttcactcatgatttggctctctatttgtctgttactggtgtctacccttgtgacatagtgaaagagaaacccactagcaacacattcatctctggttggcctggaaaatgaagtactaggaagttgttcattttctgttctttatagaaatagaatgttctcaggaaagggcttcaatgctttagggttgccatgttgatccttccaagcttaaatggggagacaatgctctattattccatttctgtttttttccatttcagatatcatgggagaatcttctagaacgaccattctatctggaagttctaacacaggtagcctaacaagaaggaaatgtgtcttacttaatgtcaaatgtcatgctatgtcttttagggctgctatgataaagtcccacctcagtatcctctcccagtattccaaattcacagacttcaccactctttcttccctcagaggccacaaattccattgaagagactggtacttctggaactggattcaaaactggtgagaagaaacagcccctgatttagcatcataagtattaggtctcttaaactttgcttgagagagtttgtgttttatttagggatgctgcaagtgattcaagatagttttgctggtggagatacaatttttttaatctaataattccggaatggatacttacagatttatgtctgaggacggaatggaatatttccatttgtattacaactgtcactagcatttgaggtggaattcagaaagttttccatgggagtgtgtgaaatacaaaagagcaccatggacccaggacgcatgcatttatatgtgtgtgcatgcttacacattttcttgctttttattttctcctacatctgatggtttcagcacatttaaaacatttcccccctcctttctatctcacagcaggcatcactgcagcaccaggaaagcaagcaggtgagcattggggaaatccatctagtttcccttttatcagactccagaagtgcctgaagctgagggcactgtctctctatctgctctagttgtaaagtattgacagcaggcaaatgcatctagttcaccaactgccatatcctaaggggaaatgacttcttttatagaaaataaatatagtatatcccttttagattcaggtcttcatttgacttactcattcaccatggtcacctcaatccctttgtgtttcaggcacctctggggtggcacctggcacaacagttgcccctggaagtttcagcacaggtgagtccacaatttggcacagagccatttcttggatgctttctacaatcatatgtcttcccttttgctgcttctatgcaaaagcagaccattccctttctaaatcccggaatgttttcaattttgttttgttttgttttcact

SEQ ID NO: 9295 - DNA, 2300 bp, Homo sapien
gtgtccaatacattattctgctttagttctgtagcacctaacacagggtatggcattgaaaaagtactcagtaattcatgaatgatttggccaatccaatggaataactggtgtgagtacctgggacagaggtgcatgactaataggagtattgtgtaagaaatgacacaggggttctgaaattttgccacggcatatttagtcatttccattcagtgttaagatggttgtcaccacacaaataatatctatttgttcactgtaaattttctccagggtcccttcccaccttcaaatgcattattttattttattttattattttattttattttattttattttattttattttattttattttattttattttattttattttattttttgaggcggagtctcgctctgtcgcccaggctggagtgcggtggcgcaatctccgctcactgcaaactccgcctcctgggttcacgccattctcctgcctcagctttctgagtagctgggactgcaggcgcccaacaccatgcccggctaattttttgtattttttgtatttttttttttttttttttttttgagtagagacgaggtttcaccgtgttagccaggatggtctcgatctcctgaccttgtgatccgcctgcctcgcctgccaaagtgctgggattacaggcatgagccacctcgcccggcccccaccttcaaatgcattaatcggattccttcagtattatgaagaaaacattatgaagagccttacctgatgatagtaataacaaccgtaaccactaagtagagtctatatttattaatagcaatgtcatcttctctaacagttgtccagtgtcccaagcctgtcataagctctttgaagctctgtgagaatgagagttgtgtcttatgctcagcacttaagatggctacttaattcagatagaagaagaatgtggctatttgcaggcagaaggcaacttgattcctcacatggtactatatactaagacaccctacactcccagttttacacgtggtagttctagcacgttccttcatttaaggagtctcttgaattccaaaatttccagattccacctgaataaatggcagagatggcaactggacacaaagttattttaccctgttcccttcacataaaaggcaggcttgggatcacttaggtttgggggcataaacatcctctcagtgtctgagtactaaagaaatgataaactactatcaatagaaaagtaacagatcacttaattatcaatcagtctaatggtgattattttaagacttttgccacaaactgaactgccccaaagcaaatctctcatgcagtttggccttaatttcttttaccctttttttttttttgagaggttattatgcagtgctttcccgtttaaaacactgtttctaccagggaatattagggggtcttctgcattacagactaagcaattccgtcttttctcaagaaaaactgccatgttacatctggacaaaaatggaaactttaaaaaaaaacctcacatcgttttattttcctttctgtgtgtgtattttttcccacataagtatcttattatttcctaatcgaagctcattcttctctatgaggcgctggcttggtattttcgcctgacaaatctcccggagcagatggtcccttcagggaagcttcaggaaagtgctgggtgtctagttatgcctggaccctccctccctcttggggccccaaatgacaagtcatcaaaccagtttctctccagcaagggtccttgatccggtagcagcaggtttgggtttcaggcactgcagagaccctttgcagttgggtttagcagctacccaagtctgcagcctgcgctggtcctgggggtgagagtgatatccctgttgtccaatcagagaagcgggtttccctgtggtccccgccccactttccctgctgccccaataaccgccctaaaaggccgggcttctgctgtcaagtagccagggtgggctccgccgaggcgaggaggggcgccggtggggagatgcgctcccaggtgtttgcagcggaagtgggaaacctgtagggtatggtccagctgtgccgcaccgaggcgagcaggagcagggaacaggtaggaagctggacttttccttctttgcagataaaataaagaatgcgcatttccatgctgttgcttcccttcccccagccccgcccagccctcgtcacccccaaatctcctgtggtccctgcagctctcgccgtgcggcgcgggaaggactggggcgga

SEQ ID NO: 9296 - DNA, 2300 bp, Homo sapien
ttcttacatttgtaattatcgtaggttttgtcaataatttagatttcctaaattattgtactctatataaccttgtacctaataaatttcaaaatattcaaatttctatttataaataaaatgatctttttatatgaaattgattctatatatgattaaattgataaaacttctgtgatttttcaaaaagtctgaggcctttaaatcttctatttaaggaataaataatattactcatagaagagagaaatattataaaacaaagtgtatgtagtttacttgaagtttattagcttggtgacaatacctgcaaatatgaaaatagaagctacccggggcagaacaaaacattgtggcacatggaatacataatagacaaaggaattgtatggccaatttctcagacagccatttggaatgttttagcatctttatcagtcaagtgcaactgtcttctctatggctcagcagggattatacttcacatgcacttcaacatctctgaagtctgcacctattgtcatcagcacccctactaccttcaagggctgatatcaactgctattgatttgttgatgaaaatgaccatgatgacaccaccaagggtgaacacctccctacagcataattatcaattggcaaactttggtttaactctgacagttatcctgtactctaaccctgagtaatgaacttgaaggtttcactttgattttacaaatgatcaggtggaatgacatagaaatatgaattgtgtgtgtgtgtgcatgtatgtgagagagtgtataaaaagaggctttgggaagacatgactttagtcatctcagtgaccttaataacatcatgttcagtccacttttggtggaaaaataaggcttaattgatttttatatctaagacactttgaaaaatagacaagcattttatacatatatgtatttgctggtttacatgaatctcccatcctagtatttttgcaaatactgttacgacattttaaaatgctacctttgttttcccttgatgaatattagcaaaattaaatgtacattttgttttaaagcctgtttttttttttcaggcaatgaaaacaatgctgtgttcttagaagcttaaattctaagagcaagagctctcagaaccactgacacacccagagtaaaggtgcttatgttccaaaataattaatattgatgaacacttgtacccatattgatgatttttaagagaaactccttccacatttttgaaatgaaaaattaattatttgtaaattaaacttttctaaaaaaggttattcaaatgagtcctggtaaaaatctccatattttatagccacatattttctctttctttcatttatttatttattttcttaattttcatttagccttgttgatgttccagaaatgatagcgaaaagccaattccttatatctcacttataatgtaaaatatcagcctaaacttgcagaaagtatatcttttgaataaaagacagcagatgctgtagcatttctgccaaagaaagagtccagtataaacattctgcagtatgcaaatgtcatctcctctatgtgaatattttccccgagtggatgttgcagggttggaggcttctgcctatgatttaggttgtaattttatttgtggaaataaaccaatcgtggagctccaattgtcttggtggtgaggtgatcaatagcccattactggatagaacagcgactacaggaagagcattgaagattttaatgcatgaattatgcatgcagcgctcattctttagtctccgaacagaatgacagggtttgtgaagtcgcctcagatagtttcttgcattaagtgactgcagtgaaatgcttaatattttcaggcatagaagcagcattgactcgggccagccgaatttggaagatgtaaatctcccagctcacagcacggaatgctttatttgaaagtattgctatgtagacagccggcttttctgtcatctaacctgctctccccaggttggctgaaggatgggagcggctgtgcctgcctgtgaggtcacagcatgaagtccttttaacttgctttctgctgcaggagagaggcgtattgtggtataactgttgctgtatttattcaaatggacaatttgcaatagatattatacccaggacgacagataagtcaacacataaggtaagtccaaggttttttttataggttaggtaattgtaaactagaatatgctgagttaggataatggtgatgcgatattaataaggttgactcagaccttagtattgcaa

SEQ ID NO: 9297 - DNA, 2300 bp, Homo sapien
ttagccaggcatggtggcacacacctgtaatcccagctactcaggaagctcaggcagaagaatcgcttgaacctgggaggcagaggttccactgagccaaaatggcaccactgcactccactctgggcaacagagcaagactctgtctcaaaaaagtaaaataaaataaaataaaatacagagtatgaacatctgagaatcaataattcttccacaactcagcaatttagaatccttcaaagaaatagtcaatgtttgctttgaggatgtgaactctagcatgagaatacttcatgggaagtgatatagaggcttagagaagttaaaactttcaaaagcatcagacatttatgttttacagttgcacctgagaagaaggagattgcttatgtttgtggccaccatgaatttttataaaggccacttcaaatacctttttgaaaacattctttccatagaggaatcaagtcctaaaattaatatctcctacaagtggtttctaatttgctagaagtcctggagaacttttttcacacacactgttcccaattatgatgccactttcatgtaggtctctcagcttggctttcatccaggctgttaggtgaaattaggcccagaaaatcggattattacatcccaagggaaacaactgataagcagcagatgattgttcatctccttgctacttgctggtgttgaggtgttgctagttgcaaagccaatttgttaacaattagtgctcattagaatcatttcctgttatcgattctaaacatgtgacaaagcacttttaggaaactggaccccaaaacgtagctattcgtcagtgataagcaattaaaaatctcaagatccagtgtaattcctaaccagagtcgtcagtttccaagtaattatttttgctttggaacccacctgctatcctgtccggtttaaagatgtgctggaacaaggacatacttcttaattagcagagggtgtggataagtcagtgtgggaacaaaaggaattttcttttattatctgctttagctgtttgtagtatatctttaagggacaaaaactgccagcttgcaatacaacacatgtatttgcaagagtgtgaaatgaaatgcattacttctgttatctaaacatctaagcttagtttttaagtctctgttcacctttgatcattatgaactctaaatatagaatcataaatggagtcattgtgcattacattcaagtttaactattgccagtatcagctttgtaaaatattatatatgactttaataaaattagcataaatactataagcatttgaaatttttcttagaaaaggcattgtgttgatctactttttgaatacaaatctacatgcgttatatgctacaaatatatactcaatagatgggccttcattatctaattaaaatattaattatctgtacaagtatcatctgctaatacttgctaaatattctttagaattaagagaatatcccttatttcctccttagtaagtaatggtctttacatatgaactattcagttatttttgtagtatcagaattaaaactgaatgatgcccctgccttctcttccttttccatgtcacccccccaaatttcctttgcttctgtgtttattttataaatgtaaataattatccctactcattttcccctaggtttaataatgctaaaaatatttctccttcttgttgcagagcatggatatgtaaactaagtatatttctgtttctgaatttcttattcccatattaaaagcttatatcaatggagaaattaagtgtatgttttttttcaaatgccctatatgcaacccctctatccttaataaacagagatggtattgacacaagtgaattttgtttaaccacactacatttgcttcttaattagtgaatattcatctgtcatcagcagcagctatgacacccctccctgctaacatgttctgtcataaataatcaatgaggcactattaatattcatgagctggaatctgtgtagtcatgtgcactgatgcagagacgggggagtgttgccatgaactgactggaaactctgtgtgtgtatccgtgagtgcaagatacttagggaaagcgaagaagagcatgctgctacacaccactctggcttacgcttccagctaacagcggtttgtctgtgtttctggactgaagtgactgatgaaaaacagtagtcaagtctggagggtgattccctttcagttcacttgcctttcagttctggggaaattagaagatttgctctctctctctgctt

SEQ ID NO: 9298 - DNA, 2300 bp, Homo sapien
tatgattgtgccactgcactccagtgcagtgacacaatgagtgacagaatgagaccctgtctctaaatataaataaattaaaattaaatatgcttatgataaaaaattacatacttatatgtgaaaaacatatgtgtacatatgtttatatataaatgcagaagttagacaaactagatactaattgctgctctatgctgttctgagttttcttggccataatcttgaaaacgttacctaaatatactgagcttcagctttctcaactacaaggtgagtacaacagtgcttatcttattgttttgatagacctgcttagaatgtggaagagataatgtaattaatgcatttagaaaacaacacaactctgtaagtgtaaaatattactctttatccctctgccaaaaaatttactgaccggcttctgcgatggaaaaatctccagataatattcaacttatgtacttcttttaaatatgcaattaggataattcctctgattagggtgaggaagtataaggaaacacctgtggcattatctcttgtaatatgtacagagataggaaggtagaagtttaatattagtttgattacagttctaaagatgaggctttagattgtgagtggtttttaaatgggatacagttcatgaatcacccttcacttccttctagtaagtctctatttactatttaaatatgtcagaattggagctgcacttttcagggaagggaaagaagccacaggatctgaacatatgtacttggaaggaatgttttccttttacctcttacatgtaattatagtgtcacttattcttgattgatgatttaagactcaattattaggtggcacccataataagaaagtaatatctaacatatggataggatggatcaaccttatgctacacttgaaacagtttgcttaaaaaaaaaaagctttgatgcaacaagcctaaataaagtttgaagccatcacatgaaatctgatagatgaaattacccgcagtgaactgtaagtcatcactcaagtttagcccattaaaatgctgataagctcctaatacagccttaaatatctatacattctaaaatagtttatagttaatatactttaccccacatgtaaagtagtactgagtaattaaatgcatggatcagatgtgcgtgtgtgtgtatgtgtgtgtgtgtgtgtgtttcttgagcaatataggttgtaaatgtctttatatataaattaatgtgcccatgagacataattctctttaataagtatggtcttgggccggacgcggtggctcacgcctgtaatcctagcactttgggaggccaaggcgggcggatcacaaggtcaggagatcaagaccatccgggctaacacggtgaaaccccatctctactaaaaatacaaaaaaaaaaaaaaaaaaaaaaaaaaaaattagccaggcgtggtggcaggcatctgtagtcacagctactcgggagtctgaggcaggagaatggcatgaacccgagaggcggagcttgcagtgagcggagatggcgccactgcactccagcctgagcgacagagccagactctgtctcaaaaaaaaaaaaaaaaaaagaaaaaaaaaaggacggacttacactacagctatcagctttgctaagacaaaaagtaaatttcctgggtccagagagtcctagcattaccatcacctcatgtcaactgaagatcatgtgacagttgggatacagaaatgagtgaacaaatgtgaaaaaaaaaaagaatgaagggaaaaaggaaagaagaaatagagaaagggtggaaaactggtcttcagattaagttctgctctagtcctcacaattttattcatgttcattctaaaatagctcatttacatttttagaatcaatgagttttgttggagagaaatattatgtatactgtcacaaatcaacagagaattttgaaacagctttttcaaaatatattttaaagccatatttttaagttcttgagggaatgtttcatacccagttgaagatgtatgtcctcttcattacaggttgacccaaatagcattgctgccaaagacggccggattcgagaaggggatcggattttgcaagtaggtggtatagtaatttcctttagttccccacgatctgtccaaagttactattttactttgtttcttgtaaactgttgagaaaagaatttgtctttgcttttggatactaacatctacaaaaccaaaaaaaaaaagtgctgtcatttaaaactaatttaggatggtgcgatatattaag

SEQ ID NO: 9299 - DNA, 2300 bp, Homo sapien
cagatttaagtaaattggtgctttatttttttatagtgataaacttttttgctgagtttctcttcctttaaaatagatgcatgaaaagaactaatgtaaactgtgccaatgcctttttcaactgaaaggaatcagaactatacataggtgattatgatttaaccatgtctgatttccagctggtagtggctcccagcattgaacttgaagctttatgtagcttcttcctactctgctaagaatatagtaatctgtaaacagatgtgacacagatgtagaatgttgctattaaaaacaattctaactccaccacccctcaaaaaagtgagatagacatacagactccacccagccccctcccccaacacctttttttttgagacagagtcttgctctattgcctagtctggagtgtactggcgcagtcttggctcactgcaacctctgcctctcaggctaaagcggttctcctgccccagcctcccgagtagcttggattacaggcatgcgccaccacacctggctaatttttgtatttttagtagagacagcgttttgccgtattggtcaggctggtctcgaagccctgacctcaggtgatctgcccgcctcagcctcccaaagtgctaggattacaggcgtgagccaccatgcctggccacagattcccttttagttgaggtctttgaccaagtgaaccttccctactcaggccctgcagtcagccatcagatttttttgcccatcctgatattaaatcagctgatagtgagataagggaggaatgaggtgatttcagcctagtagctgctcattaaggtgatggctttagttgcaggaagaagtagcagctttgaaaagtagcagaactaggatcaagctcctattatgtcttaactaaaaaggtttagattcacctatttattgaatcttactaataaaccaggataggcggtaaatttaaatttgtaggagtcagaacctaaagttcatgggtaaggcagaaatgaaaaattatccttgattgggcacagtggctcgtgcctgtaatcccagcacttggggaggccgagatgggtgaatcatttgaggtcaggagtttaagaccagcttggccaagatggtgaaaccccatctctactaaaaatatgaaaaattagccgggtgtggtgatgcatgcctgtaatcccagttactcaggaggctgaggcaggagaatgcctagaacccaggaggtagaggttgcagtgagttgagatcacactactgcactccagcctgggtgacagagtgagactctgtctcaaaaaaaaaaaaaaaaaaaagaaaaataataataattatccttaaaattccccagggaaggcacatgttgaagatttatctcttagaaagtgcaacatagccagtctttctggctttaccctaaagtcaagcctttacccttgctaggtgcacatttgctttgattcgttgggacacaacctagaaataagagtatggactctgaatctggattgcctgggttccagtttggctctaccacttactagttgaaaccgaaatgatgtaaagatgccagtgttacaggccaaggggaataagttcagaaaatctttatttgtattggtttatttctgtatttatctcaggaaattaggattcaagatataaatttacctaagttaatgttattatccattatgaaaaacatttcctccctgatctttgaagatttcatattattctctcaatttttataattgagtattttgttttggtttgttttcatatcttctctgaaagttaatatgaaggttagcatagtatctttatatatatgctattgttaaaaatgacagatttaggaaagattaccttaaaataaaataatataaattagctaatctcttaggtgtatcttacacaattagaggtgcttttatgtttctttttaaaatagaattatagttaatcattcaaatatctctccttgtagttaatcctgaaagaagttgactcactattgtatgtcgacactgatatcctttttttacgaccagttgatgatatttggtctttactaaagaaatttaattccacacaaattgctgcaatggcaccagaacatgaggaacctcgaataggatggtataatcgctttgctaggcatccatattatggaaaaactggagtaaactctggagttatgttgatgaacatgactcgaatgagaaggaagtatttcaaggtaagtcactaatacaggtagttgttaacatttctctaaaaaccttcta

SEQ ID NO: 9300 - DNA, 2300 bp, Homo sapien
atgagtggctatttttcctgatttgctcttttcataaaattgttgcagaaatgaaaactgcttgccttctctttttgccattccattattttaaccatctgtgggtcaaggagttattcttaattattactacgtttagtttctttgttgaaatagagaagagttatagttagtatcttttaaattaaacattttttgagtactagctcttactctagtttcttggtaccatatctttcagctttctctcaaaaggtattttcattcttatcaatgcttttcctatcattctggatacttcgttaagtttatcttcatttctctaagaagtgtaaggtgtagtggaagtattaatttagtatacttgtggtttctatttgcctgttttccctttgagagcagtacactccttttatttctgaatactctgcatcagagccccttgtctggcatgtagaatatgttcaataaatgtttattgaatgcataaatgtatgttctcattctctttacacatcttgatagcatgctaatgttcattttttatcaggtaaagcaagaaggggaggaagttgaaccttaaatttgtttagtgactttatcatggtcacagaaccactacttttttggtatagggagccaaggatccaaatggagactgctactattttgcgcagcatttccccaccttgtatctcatggccaaacttttcaacgccccagatgcaatttcagcagttaaacgcatgatttttccccatgaatgtgtgttcgtgtgtgtgtgtatttttaagtatcccttccctcactttttggcactggtgctgctttctgcctccaatctctcctctctctgtttcagcctccacactacagccagaatctgctctctaaaatgcaattgtgatcatgttacttccctatttaaaaacccttcaatggttcactaatgtcttgcagattaaattcaaactccttggtgtgctaaacaaagcactcaaatatctggccccttctacgcgcttatcgctcatcataccctctcttgcattcacttagctggtggtatcaaacttctcaacagttccctacacaagagcctgtttattgatccttcagcctggaattacttcccttacccgactcaagactctagcgccacctttgctatgaagtctctcttgaccatactcacagatagaactgattgttcctttgtgtgtatgcccacacccttacaggcctggatcttaagtctgttatcactgcgttgcgcttatttacaagtatccgctgtcccacccacgctccacttaggcctctttatacccctaggtactcacacagagcttggcacaagtgatgctttataaatggtcaatgaatgaacgtagtggaaacacagaagaagagggagaagaactggggaagaaagaagctctgtggagagaatactaattgttttgcacatgaaaataatgagttgtgagggaggtcaaaaaggtcaaagggaagagccctgccttacaggaactcactgtctgctgggaggcaagaggtaaggtccgcataccaaacacacgaagcaatgagcttatcggggtgaaaatggctcgtgcacattatagtatcacagaaacttagaggctgggggaggatggagaggaaactggcctagtcaagtgtcttctaagtgttaggcggttttcgagcgttaaacagtttaatctttacaaccaccccatgatgaggatagtagctccattttagggacgaagaaacatgctcagagaatttaggttgcccaatgtcacaaactaccatgtggaaggaccataattagaatttaggtcaactgcctccagagccctgaggctttcgctccccctctctcggcggtcgagacccacagggctcccattcacctgcgcgtcggcctgcgctagctatagccctcaggcgcgccgcgttccgcgcactcacaccaccctctgcgcgccagccctgcgtccctcccacgcgaactgcgccggcgcgtccagccctcccgcccgggggaggggcggggttgcgtcgctgccgctgacccttgagcgcgcggcggcagaggcggtgtccaggcttccgggcgggtagtccttcggctccggagccgcgactgcgctcgcctaggtggtgggcggggagggaaggaagggagcgggcgcaaggcggcggcggcggctgcgggtgaggaacttgttgcgcccgcggctgcgcggtgcccctccctccgctccagttcgtcggggcgggcgcgg

SEQ ID NO: 9301 - DNA, 2300 bp, Homo sapien
tctgttgtaatcccttaaatttagcatacgtttgaaagtttgctttttgaatatgaaaaatgtacgaaatattttatcaattgtgggaatatacaaaaagcatatgatgatttacaaaaaacaagcatgtcaaaaccagcgagcttcactgagaaatttttcagataagttactgtcaaccattcctgtctctaaattttaaacttaataaaattctgtaaagtgttttttaaaaaatcaagatctcattttttagaaatctaacgtctactgaatatttgtatatgtcaatattacatgtgccttcttttttaaagcaacagtaagattagtatgcttattgttatagtttagtttctaatggactttgtaatatcaaaatacatatcttctctaaatattaagtaataaatcacaggattatatttaattcaaagggtaccttcgtataagaatcaaggagctcgataactaagtgctgacagattaagaatgccactgactgaatttcctggatgattttctttattcacttaattcaaagtcattttttaaaagacagagttattatactgcaagcttacaataaataaagtctgaaaataggcagagatcttttcatctcatttgtctaagagactgccatttaatcaaactaaagatataaaggtactttcagtaaaaatctgttcctgtgactgggctcatctccaactacttatttataaaatattagagtactggaataaaaacactaaataaaaccttgatctgacccttccagaagtacatgtagaaaaataagttttaatatattgtgtattctgcaatcagatacttttctttctttaggaacgaaattaaattacatcctttgctcctaaagagattttatgggttttccttgatccccacacactaacacaacaatgcagccaacatttttatacccagaatggggagaggggcattacacccagcgatacgaattaaatcgcagtagctaatgcctcccttaaataatttattctctcttggcagcaaaaaacgttacagcctcttcaattacccctcaccgcaaaccatcgcctgggttgcgatcaatgtgacccagttcctatcgccacagccacctccgtctgcctcctcccgccgggtccgccagtgtcatgggagggggcggcagccgcaagggcgtcctctggtcgccaccccgccggccggcggcgcgaggggcaggcccgggactcaccgggtggaggtgcccttccgcacatcgcacatcatgcacttgaaggcctcggcgctgttccggaaggtgcagacgctacagtcccagtaaccctcatccgaggacggcttcggctgccgcttcggcctgcaggacacaacccggacacgacgcggcgcggggtcaccagcaggccgcgcccggtgcccgggccccgcggccgcccccgccccgccccccgccccaattctgcgacccccgccccgcgggccctcggcgcgccgcgctccggctgagggggaagggagtcaggaagaggcagggcgcgagcgcggccgcagtcgccgccgccacagccgctctgacacccgggcggccgctccggtcgccgccgccatcgcggctccattgtggggcggccggcgccggccccctcaagcggcagcactcgcacaccagcggcgctgcccccgtgctcgccccggtgcccgggcggctagcgaggcggccacccgaagccctgcacgagggccctgccgcccgcacagtccgggccccggggcccgggcgctgttacctggtggggctcttcttgtctcccatggcttggctatcaccgcacgccgagagtcgccgccgcgaccgctctgtttgtcaataaggaggataataagccgggcggaagcgggcgggggaggagggagggagggggcggggaaggccgcaccgccgcgctcgggagccgccgccggatcccacgcagcctccagctgtcggggaaactcctgcctgggcgcacgtgaccctcgccggccaaccagcagccgcgccggagacttcaaacgcggccagcgcggcccagcacccgcggcgagttagccggcgggcggtgcgggggtggccgcggtggccgcggctgcctcgggcgccggcgccgcctctccgcgctgttcccccgttgcccccttggtacccccggctgccggggactgcctcgcgctccagagcccctctgaggaggaaaacgtctgtcccaccgactggcaggggatgctccgtcatcccgtgc

SEQ ID NO: 9302 - DNA, 2300 bp, Homo sapien
cctggcctgctcatcaaagaaaaaccatttaacctgggccctaattgccttgtctttaaaaagaagggctagactacggatttacaatggctcgacttacgatttttctactttacgatggatttatcggtgtaccaaatgcattttcaatttacaatattttctatttaaggtggatttatcgggaagtatcccctttctaaatcgaagagcatctgcagtcgatgaggccatgtgcatagtactttgagtcctttaaaatatgcatctatgcgcagggatttacaaagtgcctggcacatagtgctcaaaaaaatgttatttatttatttacttagaggcggagtctcgctctgtcgcccaagctcgagtgcagtggcacgatctcggctcacagcaacctctcactctcggattccagcgattctcctacctcagcctcccgagtagctgagattacaggcgcccgccaccacagctggctaatttttgtattttttaatagagatggggtttcgccacgttggccaggctggtcttgtgaactcctgacctcaggtgatccgcccgcctcggcctcccaaagtgctgggattacatgcgtgagcgaccgcaaccggccaaaaaatgttattattaatcgcacaacaatctcatatagatgcaattcagaatatgaaaacgttgagaattacagaaattaagcaatacttccaaggtctatcagctaagaaacaggagaagcaggctgagaatcctgggcttctgactgtattatttcctatgtagtttagctataaaattattttacatgaattcggacttgatgtaaacctagaaagatggacagaaacagcacagttaaagagggatatactttatgcagaagtaacccatgtgcatgaaggaagggttctggtaagggaatgaatttcatctgcactctttgtcaggaggcagctttccttatgggagagggaggcagaggtagggaaaatgtgtgaagcctttgaatgccaggctaaggagtgtgggcaagtcgttagtggttctttatcagagtggtggcatagtattaacagcattttattattaatctggttgtggattactgaatacattggggaggtagaagtggagcttcggagaccagttagatggctgttgctggagtctggagtatgaggacctttagtatgttgacgtagagacctgggaaggtgttcttttgttagcagacagcgttgaggggacatgcaaactccttatatttaaaaaggacttatgagtatataggggtttctttcaaaagcagctactgcagaggcctgagaggccaaaagggcgcgtttggaattaaaacagagttagactcttggctttgtcattttctaattatatagcctagaggaagtcacctaatctctcttgagtcttgatttcaattcctctaagttagggttgacaatccctacttgttagagcatctgtgtgcataaaccagacagtgctttaaggcatgtagcaatggcgctgcgtgttggttcccgccttccccccggtatactgcaggcgggggctgggtagctaaggacagcggaggccaggaaagtcgttctacctggagatcccgggctggcacttctgtccagacctggacaggcctccgaacgccggccggccctaccttggaccaggcttcgcacgggatgacggagcatcccctgccagtcggtgggacagacgttttcctcctcagaggggctctggagcgcgaggcagtccccggcagccgggggtaccaagggggcaacgggggaacagcgcggagaggcggcgccggcgcccgaggcagccgcggccaccgcggccacccccgcaccgcccgccggctaactcgccgcgggtgctgggccgcgctggccgcgtttgaagtctccggcgcggctgctggttggccggcgagggtcacgtgcgcccaggcaggagtttccccgacagctggaggctgcgtgggatccggcggcggctcccgagcgcggcggtgcggccttccccgccccctccctccctcctcccccgcccgcttccgcccggcttattatcctccttattgacaaacagagcggtcgcggcggcgactctcggcgtgcggtgatagccaagccatgggagacaagaagagccccaccaggtaacagcgcccgggccccggggcccggactgtgcgggcggcagggccctcgtgcagggcttcgggtggccgcctcgctagccgcccgggcaccggggcgagcacg

SEQ ID NO: 9303 - DNA, 2300 bp, Homo sapien
aaaaaggcaagttggatacatacactgtgctcttacttggagccaatccaccactcatttctaaaagtgaaaacaaacttatcagcaatcagtctaaaccaggattctttttttgttgtttgagacggagtttccctcttgttgcccaggctggggtgcaatggcgtgatctcggctcactgcaacctctgcttcccaggttcaagcaattatcctgcctcagcctcccgagtagctgggattataggcatccactaccatgcctggctaattttgtatttttagtagagacagtgtttcaccatgttggtcaggctggtcttgaactcctgacctcaaatgatccacctgcctcagcctcccaaagtgctgggattacaggcatgaatcaccacacctggcctaaaccaagtattattaattccaaataaaaccaatacatcagaccagtctgggtattatttggaaaaaaacaaaaaacaaaaaccaataaagtattaacaatcaccgatttaattatgccagatgtgtacaccttccttacattttaggaagttaggaacaatgactccagcaggctgaattaaggaattcctttttcccagtcaccacttaaaaaaaattcttttttggttcttcttctttcaagtattctttataccaacactttcagtgccagattgtatgggtagggagacgggttttgaacagatgaaggaaaaaccctgaggctactcctaacttccactcagaccatgagcaaaaaaaatgctctattgaatatgtactgtatatgtacattacctgcaccttgctcacccaggtcagaaagagcatggggactcagacagaaccttagccactgatttttgctaatacacagtcatgctatgcttaatgaaggaggtatgttctgagtgttacgtgatttcacagtgcagacatcacagggtgtactgagacaaacctagatggtctagcctattgctcctaggctacaacctgtacagcatgttaatgtagtgaataatgtagacagttgaaacacaatggtaaatatttacatagctaaacacagaaaacgtacactaaaaatatggtacaatgtattacactcttaggagaccactgtggtatatgtggtttgttgttaatcaaaaagttgttatgctgtgcatgcctgtactatggctgggtaccttttttgcttgtcttaatattttttttctctggagtggtgtgttaagaggaaaattttcttttccccttttagtatgatgttaaggagtaaatttaagctttatgtatcgacaatataaacttctttcgaaacgctaattttgcttattgccaaattatgaaatgatacattatataaataggcttggtgcctcgaagagacagacctgtaggtatgtgtgtatatgtatataaagtttacaaatgtaatcagtaattttcacatcttatcttacaaagtcagcaaattaccgtgaaaatatcaggctcaaccaaattcaaatttctgatttaaaaagagcgtgcggtgtgtatttgagatgggaagatcaaccatcacaaatggaaaaatactgactctatggcatgccaattcgtgaaggaatgagaaaactgcctcatgtttggtgttatgggggaattatttagaaaacttcaggaactcaacatagatacgtcgctttttaagtttctcatttgaaactatgcgttacacgttctgctgagagccgcgaaggcaggcagaggttaaggtcctggaataaaaagggtggcgggagagaggggcagagcgttttggcagccgagtctggggagggggccccgcaggagagaaggccgcagctgaggaggcgtttaccttcaggtgggttgggcctgggagaccagaagagtgcgagccctcggctcagctggggctcaaccccgactcttcgtagccgctcgcagcggccttggcatcacgagtcctgggaggggtcaggcgcggagagcagataatagcagccacggtgcttcttcccgactgtttgagatccgggccccgaaggcgggcccagaggcgagcgcttcgctaacgtcattgcgcgcgccggaagtacctacctgggataacggcggcgagcggacggctgcatttacggggtctcccggagggccagagtcggtgagcgctttttacctttcccagagatggatgcagagcgtgtgcgggctgctaaacgggggggagtgggcgggagttttctgtgtcgggtcctggattctcctgcctttgaatt

SEQ ID NO: 9304 - DNA, 2300 bp, Homo sapien
tactaccacggagctgtttattttccaaacgggatatctttttccattctctcattcaacatccaacggtccatcaaggcccaactcaaaacctattattctccacaaagcccattatataaaccctacaagacttaaaacagattccaaactagtgactgataggccatatgagacttgtgtttgacccacttttttttttttaataaaattctattccactgacaacatttaaaaactgggagaggatgctttttaaaaaatggtatttccaactttttttgaaaaaattagatgttctggcaaaactgggatcatattctcacatagccacaatcagctgtagctgagtggcaggtgaccccttctaagggtgaagtattcattaacgttaactgcctgatctctgcagcataccttcagcacctgcaatcattcaagaaataactgactgtcttatgtgccaagaactgtattagctactggagttacaaagataaacgagacaaacacagtccctcaccgacagtctcgcttagtagggatggcaaagaagcaattaagatacatgtgataaatgccgtgagggaagtgcaggacagctaagagtacatagcaaaaatacctaactctatggaagttagggtatacccctcaagtaaagtgacagctaaactcagatctttaatagaagttatccagaaaaagataggaggaaacagggagctcaaatgtcccagagagagaaaagagcctttgtgaagatactgagggaagaaagtattctgaggaattgaaatccgttcaacatggctacagccatgcccaacctttaaatgcagggtcagagaaagggctcaactgaaatggctggcaggaaaatctacgtgttatcaatagttaaggttaggagatgaaggagaatttcactaaagaagttgaatatgtaaaatagtttaagcaggaaatagaggtttcagaaagcacagatggggtgttgaggggttaaatggggaagaaacgaagaagcagtgatagcctaagtcgaaagaaagcacaaagcagcatggaaatgagactatagcacagaagaccacagaagcttacatcttgggcggtaaccaaggataacagagatgtaaagcatggtaagtttggctggccacaagtatgcctagagaattagtgccagcggtctcctgtcggccacggaggcattcaggcctctcaaaattcagctgcgccctggatggattgtacttccgtctctatagaagacatcggcttcactctggattgattgtgcaggctccaggagaggctgtgggttccaggctgctggaacgcaggctcccagggagtggttagaggcctggtctgtatgtgctggtaggcagaagtataaattaccttgcattacgttctgatttttctgtaggaatggtgggcatgttatggcctcttagagaaaaagcagtgcgtagccattatagatttacaggaagagaaaaggtgccaagaagatcaacacttgtccatacccatactaaagatgagtcattctgtgaatccaactctccccaagttgacctcgtctccccaactagactgagatcttcaccagaaaacaaaacaaaacaaaacataaaaggtctgtttattttgtagttcccaaagtgcctaatagctgggtaccgtgaacaccttcagtaaaattaccgacttcctgactcctctcgggtcactgaagttacctagctcagtcgtcttcttgcatattaaggcgctacagagaggcgaacccctatcttagactcaatacttccctttattccaaactccactgcgtctctccaccctcaaccgcatgggcagaattgtcacacaattcaaaggcaggagaatccaggacccgacacagaaaactcccgcccactcccccccgtttagcagcccgcacacgctctgcatccatctctgggaaaggtaaaaagcgctcaccgactctggccctccgggagaccccgtaaatgcagccgtccgctcgccgccgttatcccaggtaggtacttccggcgcgcgcaatgacgttagcgaagcgctcgcctctgggcccgccttcggggcccggatctcaaacagtcgggaagaagcaccgtggctgctattatctgctctccgcgcctgacccctcccaggactcgtgatgccaaggccgctgcgagcggctacgaagagtcggggttgagccccagctgagccgagggctcgcactcttctggtctcccaggcccaaccca

SEQ ID NO: 9305 - DNA, 2300 bp, Homo sapien
tttgtgttctttcttttgccatttgtatcattgttttctttatcctttgctgcttgctttctgctcccattgttgcaacagggacatatgaatatatgtgggtatatgataaacctcctgcaccacccttcagtgttcctttgcttttgcacatgaaattggttgataacgacttaaattagcctttgggcagctaaaatcaggaaaggtccaagactatacttcgggatgatatgtttgtaaaggaaacactaagcaaaagatcaacagctgcttgtgacaggtttttttcccctctgtgtctagctgataagtgctaaagaattgagcctgtaattatgcctttaataagcataatgtgctatgctgattggtccagtgccttgtctcctttgaagggattgcttatctgaataggattgggaggtcattgcatcttaggtatagaaaagtgaggttcatctttttatctgattttcgagtgcctacccttttcttgaaggacttgagctaagtaggccacagatatttggaaatgaataagctatagcacttgttcttctgggagcttttggtgtaatgggatacactgacactatcacactatgatgtgaaatttgccacatgcaatggaaatacaataaggaatgacttaagtatatcatgttcttggccatttgggatacagtagtggtgcttttgagttttaaggtctacaagaacttttaaagttgcttagggtgaaagcctcttgtagtaccacaagttaaaagactctagggctgtatcgttctaaagctgttggagcttaaaaactggaatactcagcctagggcaggagtcctcaacctctgcacaattgacatgtaaggccagttaattctttgttgttggggtgtcccccatagcaggacatttgccagcatccctgtcttctactaaatatatgccagtagccctctcccacttgtgacagtcaaaaatatctgcacatactaccaaatgtctgtggaggggaggtgcaaaattgtcctcagttaagaaccactgggctagagaaagtgttttgggtctgtaggacattagaaaggtgttattcaccactttcctaggtggttggaagtctttgagcctccaggaccttatttatctatcttggctgtggcaggaagagcttaagaggctttttgactgaagctggctttgcctcagtttcaaagtcgttttatctctgcttttgctcttgactgctttgctgttaatccactgtccagtctcgaccagcttctgtgtgactccaaattttatgccactttctcttctcatgttattaattttgttagtttttctagcaacaaagggcagaggattatatatttggcacatatagacaatttaatgaaatgtttttctgtaacagctcactgttattaatttttaagagtatatttaactaaacctatcttttagggagttgttgaacctgctaaagtactattgtttaaatgtattttctggctcaagtttctataaaaaataatatacatacagcactatgtgagtaaagtgactaaaggtaaagattagtgactttatctcatacaggtttatttttaaccatttaacaaatatttgggcattcattaatgccaggcactgattagtgctctgaattatagctttctaactttatgtttaaaactgtctaaacatttcaggaatatctgctaaagttcctatgtagatcctcttgagctaccccttgattaactagttctcctcggtatctatataataactacctttgtatttttattgtgatatatcaaaaattagcatttaggagcatggaagaagtagcattcatggttttaaaatatgttttgcctttcttgaagtctctgtggctccatgtttacttactagcagtgctgtggcctagactggcttctatgatatcctttggttccaggttatttcagattgttgatggtgcttagcctctgagaggtagttttagatattaacctatttaatgtaataatgtaatgaaaagttttagtactaaaataagtgtatgacccccacattaattccattacaaaattactttatcaaaaacaaattagctagaaaaaaaattacatcttatgttttcttatatagataaagagaggcctgtccagtctttgaaaacatcaagagatacttcaccctcaagtggttcagcagtttcttcatcaaaggtttgttatatttctaaaatcagtttaaagaagaattacaaattgagatggact

SEQ ID NO: 9306 - DNA, 2300 bp, Homo sapien
agaatttgatgaattatataaacagcaaacctctttctagtagtagaacactggcctttaaagggagagaaattacaactgagccagtaaattagttgagcaattaaaagccggccatatagaaccatcaaacagcccttggaatttgcccattttcgtcattcccaaaaggtctggcaaatggagacttttgcatggcttacaagctatcaatgctaatttgcaatctatggggccccttcaacaggctcccttcccccgcagcagtttctcaagattggcctatagttgttactgacttaaaagactgcttttatactattccccttgcagaacaggacagagaaaaatttgcatttacaataccagctatcaacaatgaaaggctagctcacctattttattagaaagtactttctcaagcaatgctgaacagtcctaccatgtgtcagtattatgtaaatcaggctttgctccccaggagaaaagaatatcctagttgcaagattattcattttatggatgatattttactagcagctccaatggagccagtacttttgagtttatatgcctctgtcataaggaatacacagttaagaggtttaatcatagcacctgaaaaagtacagatgtcctcaccttagaaatatctttacatactaacttcctggtcaataagacctcaaaaggttaaattaaatactagcaactaacataccttaaataattatcaaaaattgctaggcgatattaactatctttgccccaccttgggcataactactgataaattacagaacctgttttctatcctaaaaggcagtatagccctagactctcctaggtatttaacccccacagcaaaaagagaaattgaggaaatcaagctatttctcagaggcaactagatcacatagacccacaatactcagtccaattgtttgttcttcctattaaacatttcccctacaggattaataggacagatggccccagggctgcacttcctagaataggttttttgctcacataccaggactaaaacactatctccctatatccagctagttagtaaagtcatctatacagacagcggatgatgccatcagttgctaggttatgaccctgatgtcataagaattcccttgagtaaaaaacaatttgaagcagtcttgcccctatctctagaccttcagatagcactctctgattatgcaggccatataaaacatgcccttcctgctgacaaactacttcagttcttatctagtacttctgtagttattcctacaaaggtagtttcctcccccatacctaacgctgtaatgctttttaccgatggctctcgtaaaaatggaaaagcggctatctggtggaaaccacataactccctcactccatcgagatttactagtactcagagagctgaggttggagccctaatattggccctagaaactttttctgttcagcccatcaatattgttagtgactctgcttactctgtttatttattgcagaaccttgaaacagccctcattaagtctactctcgagccggccctgtgtgccttttttctttgacttcagtaattgctaaatcaatgtacacattctatttttatcacacatatttgagcccacagctcactgcctgacccactggcttatggcaatgatcaagcagacctgcaggttatgatgtcactgcttaaccaagccacccaatcacatcaatttttccaccaaaattagagaaacttaactaaacaatgtcaacttacccagagactagctaaacaaattatcctgcaatgcccagattgccagctcacaggcacgtcccctccttcaacaggtgttaaccctagaggactagaacctaatcagttatggcaaacagatgttacacatgtccctgaatttggaaaactaagatatatacatgtatccgttgacacctattctcacctaattagcgcacatgctcttcctggaaagtccaccccatctgtcattaaacatcttttaacttttatgtttatggggcagcccacaaaaattaaaacttaataatggtccggcttatgccagctcactcaacaattttgtcacacttggagcgtccaacattccacaggcatcccgtacaacccccaaggacaggccgtagtagaacgtgcccacttcacccttaaaaatatgctcagaaaacaatggagaatatgagtaaagaccctgcaacactactagcacaagccttacttacccttaatttctgaaatttagatgataaat

SEQ ID NO: 9307 - DNA, 2300 bp, Homo sapien
cctatcttttgagaatgtacttgaaaagtgagggcagtaccttcaccttatacctgcatttcttcaggctaagtatcacctgtttactatttattatccatcctttataagcaacatattgcaacagtcttttctaaaaggatgcccacttgtggcagcacaggttctgaaaatttcttcaaaatcaagaaatctgctaatacattgagaggttgtgatggaacaaacactctcatttacattacattaatgtaaatcaggagaatttcttttggaggaaaattggcaatatccatcagtcttaaatacgtaacctttgtcccagtaactacgctgctcccgatttatgtgcacatgtgccagtgtagcataatgtatgaggaaagtcaactccatcattaggagtaggctattaagcagtcactgaaagaatgggtagacctatatgcactaacgtgaaatgtccacatacaaagggaaaaaagcatgtcacagcacatataggtcactaccacttttaaaagacacatttatacgaatgtgctttgaatgtctgaaggagacactaaaactgggtaagagtggttacttctggggagaggacctgggggactgggatgaagaatggaaaggagatgctgtctctgacttttgccctatttgaatttttttgtcatgtgtatgcacttccttttcattgctgatggttttttaaaggcaccagaccagggaatgtaagttactgagtgaagaactctctcaccattggtgcttttctgaagggaatctgtgtagcccagatacaaacccttgtgtgggacggctgtccacctactactcgctggtttacccattggacttgtgtctgtcctccctaaggccaaattttccccactccagtctatatggaaaaaataagcctctgtgtctgaagccctatttctggcctacaagtggggcgtgtggacacacgagacaaatggaggtctgttaatggtagggcaactgcaaaataaatcatgcctgaacacaggcacaaaatggaagttatctggatacatttgcaaagatttatattcagaaaggtagttttgttatttattaagtgtttattaaatgcctccctaaaggtcctggatgccactagaacctttagttaggactgagatgtatatgcaagagtggcacatatcaaaatatctgctcattggttcagatccaacgtaagttttccttgaaccagaacctcatattaacttacagtactcaatggcacagcatcctctaatttaaagattttaaaacaaaaacataaccagaagacccagttttcaaaattgctgttaaaggccaacaaattagtgggagggaaggaataaaaaggaataacctctcttaaaataacaaatctacaaagtcctctgccacaaaagcagatctttgtcatttcccatgagataatcatcaccttgctgaaaatgagaaaggcaccccccgcaggcagggggaaaaaacccactcgctgaaacagcttctacttgtttttaccatatattccaggggttatgtgtgtggaggggttgtttttacatttatacagtttacattgcttgacccataagtaacacttgtaagattaatagggccatagttttaaagagtacttacatagccccaccatgcatacagagccttttttaatattggaaaaaaaaatcaaaaaaagttgaattttccatcactaggcaatgtaaatttgaccatctacatttataaaccctgactaaaatataagcaatcagttcatccataaattctggttccctggcaaatctagcactgcagcgtaacaaacggcttacaattcagggatataaaaatatcagctttaaaatctgaactgtacagtatatacattaatatttgcaccgttaaattaggaatacacttaagtctatgaaatactaagttataaatagcaatgttttttgtttttttttttcaatctgtagctggcgctgatacaatacaatgtttacctggccaaagagggttcgaggggacaagctggcctcacaataagatgcacagtgttagctaggtcatcgtgacaggcatgcctcacaccaagacggactatcaagacctgagccgacctgacttacataaatgacaaacactagtgctttacaaaggtggctggagttctccatcttctaaaatcaacatccaatccccttcagtcagcatcttcagtattcccttgaggactggaaaaccaaagcagctacgtccatctg

SEQ ID NO: 9308 - DNA, 2300 bp, Homo sapien
ccagctactcagaaggcagaggtgggaggatcgctcaagcccaggagtttgaggctgcagtgagctatgattgtgccactgtgctccagcctgggctacaagtgagaccctgtctcaaaaaaataaagagtccttaatctagagatggccaccaagtcaaataaagcattatcaacacaaatgctgttcactcaattccagcatctgtgtagctataactgtgttgagtccacagacatttttatgagttttctttctactaaaacaccaaattatttcactaaattatttccgtgttaatgtgttctttgccagattatgccaagaaaatgttattggggagcaaaaatatgaccaaatgaattacctccggtgtagaattctgtttttttaaagtcaaagcaagcatttattatttagtttgttttctcagcactgtcaatttatgctctagtttgtagctaaatcaagtgttagatttaagcttgtgactctaagaaacaaggttagctatctgatttttttaagagccagtgtctgtccattgcccggaaaacatgcagttacttggcctttaaaatagttcctaatgattttctttcattctctggtttcacatttctttttgaagataatttttgctgatgagtgcacagaagctgagggtcgccattggcacatgaaacacttctgctgccttgagtgtgaaacggtcctgggaggacagaggtatatcatgaaggacggccgccccttctgctgtggctgttttgagtctctctatgcggagtactgtgaaacctgtggggaacatattggtaagtccacagccagcccgtctgccctgtcacctagccattagtctgtcttggattatccagtcttattttttctttttctgttttttaaagttgagatataatttacatacaatgaaatgtacagatcttaaatgttccagctgatgagctttgacaaatgaacagagagttgattcttgttacttgcagtagttgtgttctgtgacgttactgcaaacactggattagtgaacactgaaccattgctcatgggggaatacagggttaggttcctgtgagcctctggtcacagcagtttcatcaacccatcaatacataaccttgtttcacgtgtgtttttgcttaaagccactgccttattgaatgtacattgttgatgcattaatattgaactcacagccagtggtaccgtactcaagattaggagcttacgtaatacatgtcttttctctgtaaggcacatcacagccttcttgcccttagcaacatgacagcatttcagcattatcagcattacacttgggggccattttaaacagtaaactcaccaacaaagagcacaaaaatgcagaaaacgcggcagtagatagaccagaaataggacacttgtctacagtatgagagctgaaacaaaaagctgagcatctcctggatcagtgcatgttggttcagttcgtatttttaccactctgcacatctgcgaatgaccatgaaactgttgcgaatattagtttgggagttgtgaataaatttttatgagtaggcacactcacaaatacagaatccacaaagaatgaggattaattatatctgtgtcacccacacagctcccccatacccataatctttatttattttcttcgtttcttccttataccttgtttcaggcattaaaccataacctgttatttattctatccttttcaaaacaggtgtggaccatgcacagatgacctatgacgggcagcactggcacgccacggaagcctgcttttcttgtgcccagtgtaaagcctctttgttgggatgtcccttccttcccaaacagggtcagatttactgctcaaaaacgtgcagtcttggtgaagacgtccatgcctctgattcttccgactctgcatttcagtcagctcgatcaagagactcccgaagaagtgtccgaatgggcaagagcagccggtcagcagatcagtgtagacagtctctcctcttatcgcctgctctgaactacaagtttcctggcctctcaggcaatgctgatgacaccctttctcgaaaattggatgatctgagtctctccagacaaggaacaagttttgccagtgaagaattttggaaaggcagagtagagcaggaaactccagaagaccctgaagaatgggctgatcatgaagattatatgacgcagctcctcctcaagtttggtgataaaagcctctttcagccacagcccaatgagatggatattcgagccagtga

SEQ ID NO: 9309 - DNA, 2300 bp, Homo sapien
ctattccaaaaagggtctgcctggcttaatgtattcacctgctgatactccctttatcataatcatatgatatttcagagtttgatttaaatcaataattgattgcgcatttctcctataggtaggtagctgaaatcttccctgaggaagcccaaacagagtgaagtaggaaaaaggaaatctgacctaggtattcatggttaattttacagatccacagaggaaaatggtaacctttgaagtcttcccacaaatccctaaactaggcctaaggccagaagagttctatatcagaacgttttgggaatcgtcttcaaaaccggaatccatttggccaataaagagtctatttgaattacaaattgtgttgtccgaatcagtgtttccaaactagtctaccagcagagccacaacttttctgtttctgccactttaagagagtaacaaaaaaaaaaaaaaaaaaaaaaaaaaaaaacttctcagctgccttactttgtagctgagataacagaatttggccacagagtgatttacttgactgatctatttatggcaacttgtttatgtatttttaaatcacagttacaatgagctattgttcacgtgtatactgtagaaccacataggttgcaaatcaatcccaaggaatcctgatggtacaggattattttttagcttaaaaaaaaaaagataccaaaggaactggtgaccactttaaattgcttttatttactgatattttacaaattgatgaagctcttaaatattgcattttccccttcattctcttggtatttctatcaccttgtgataaggaggctatagtggaaactaaaatttgtagttcagaagagattagacctctactgatgagtactaatctatcattttttttctgggcttgctttgaggatatgttttgcttctcttgaccctttctgtagacaactgaagccaaactccactttctctcagtgtacctacaaatagctcagaaacaagattagcttcagtatgggacacttccttgtgtttgaataatgatattcacttaacctatttgtaaaaactctcagtagtgtacttgagttagtacatcgcgtgacctggctccttttctttgctgttatttactgataaaaataaatctcctgcgctaagcagtaggaatcactccgaaatgcagggaaagtcctaagagaattcatatgctaatgagcccttctaagtgagaacttgcttaaatgtgccatttgctgacatcattgttatgggcagagtggagatgatttctttaagaggtggcctttcatattctcccagcgtttcgtggcccgcgcgtgcacctgcgggagggggaagtttacataagcgtcctagggtatttgcatcttagcggcttcactcactgggctcgggagaatggagcgggcgggcggcggtaggtgctcgagccgctaggctggccaagggggtgggtaacttttcgaggaattgtgcgcgcgggacctcgtggagatcggccaggggcacggtcagcagtgacagttcctggaaagcgggcggcggcgggagcaggctgggcaggcgccgcccgcgggcgggagcggggagctgggtccggctgggatcgaagggcgggatcggcaggaaacgaaatggttactttttttttttttttttttttttttttttttttttttactgcgggctctgattacttttgaagatcgccggccccaggcgggctcccggcgctgagcggagacgagtttttctccccgcagaggaggatcctggaaggacgcggagctggggcttgggggatgcagtggcctggacgaggtgactccaacccgggggagcagagtccgtcacgccggcagggaccgagggtctctgcggagctggaggaccttttgtgggatgcctcacggctgctgaggggctgcagcgggtgaggatcgccgcgctgcgccgccagggagctcggcggggaccggccgggggggaaagtgcgtcacggcggggcgggggcgacccctcgcccgccaggcggggccagcaccgggacgcgacccgggggcgcggtccgctgcaatgtagtggggacccggtgcttgctgccccaccctgctggggtctcctccggaaatgagtgggtgcgggtgactcgtagggcacccagccctctgttccttcgggagtcctccgctcccgctccgggccgccagcctccttcagacgcagagcgggcgggcggctagtgcgcgccgagggctcaggggccggcgccgcga

SEQ ID NO: 9310 - DNA, 2300 bp, Homo sapien
aaggatgctggttgggggccttgctctccattctgcataagttcacccttgacaataacaacccctttcagaccagactaaagtctgtttcattgagattgaacctttgtaggaagcttgcaactgtctccacactgcttcatcactaaaaacgcttacaatgggtaataaaccatgacagtacctgttgaaaatataacaaaacgtatttacaagtaactgcgttagaggaagcacatttacaatggctgacatttaatagtgataagtgctgctatagtttgtagttggaagtattttgttgcctaatgtagctgtcctttaaaagctattccaaaaagggtctgcctggcttaatgtattcacctgctgatactccctttatcataatcatatgatatttcagagtttgatttaaatcaataattgattgcgcatttctcctataggtaggtagctgaaatcttccctgaggaagcccaaacagagtgaagtaggaaaaaggaaatctgacctaggtattcatggttaattttacagatccacagaggaaaatggtaacctttgaagtcttcccacaaatccctaaactaggcctaaggccagaagagttctatatcagaacgttttgggaatcgtcttcaaaaccggaatccatttggccaataaagagtctatttgaattacaaattgtgttgtccgaatcagtgtttccaaactagtctaccagcagagccacaacttttctgtttctgccactttaagagagtaacaaaaaaaaaaaaaaaaaaaaaaaaaaaaaacttctcagctgccttactttgtagctgagataacagaatttggccacagagtgatttacttgactgatctatttatggcaacttgtttatgtatttttaaatcacagttacaatgagctattgttcacgtgtatactgtagaaccacataggttgcaaatcaatcccaaggaatcctgatggtacaggattattttttagcttaaaaaaaaaaagataccaaaggaactggtgaccactttaaattgcttttatttactgatattttacaaattgatgaagctcttaaatattgcattttccccttcattctcttggtatttctatcaccttgtgataaggaggctatagtggaaactaaaatttgtagttcagaagagattagacctctactgatgagtactaatctatcattttttttctgggcttgctttgaggatatgttttgcttctcttgaccctttctgtagacaactgaagccaaactccactttctctcagtgtacctacaaatagctcagaaacaagattagcttcagtatgggacacttccttgtgtttgaataatgatattcacttaacctatttgtaaaaactctcagtagtgtacttgagttagtacatcgcgtgacctggctccttttctttgctgttatttactgataaaaataaatctcctgcgctaagcagtaggaatcactccgaaatgcagggaaagtcctaagagaattcatatgctaatgagcccttctaagtgagaacttgcttaaatgtgccatttgctgacatcattgttatgggcagagtggagatgatttctttaagaggtggcctttcatattctcccagcgtttcgtggcccgcgcgtgcacctgcgggagggggaagtttacataagcgtcctagggtatttgcatcttagcggcttcactcactgggctcgggagaatggagcgggcgggcggcggtaggtgctcgagccgctaggctggccaagggggtgggtaacttttcgaggaattgtgcgcgcgggacctcgtggagatcggccaggggcacggtcagcagtgacagttcctggaaagcgggcggcggcgggagcaggctgggcaggcgccgcccgcgggcgggagcggggagctgggtccggctgggatcgaagggcgggatcggcaggaaacgaaatggttactttttttttttttttttttttttttttttttttttttactgcgggctctgattacttttgaagatcgccggccccaggcgggctcccggcgctgagcggagacgagtttttctccccgcagaggaggatcctggaaggacgcggagctggggcttgggggatgcagtggcctggacgaggtgactccaacccgggggagcagagtccgtcacgccggcagggaccgagggtctctgcggagctggaggaccttttgtgggatgcctcacggctgctgaggggctgcagcgggtgaggatcgccgcg

SEQ ID NO: 9311 - DNA, 2300 bp, Homo sapien
ctttgtgaagtcactgtacagcaataagatttatttcacctatggaggtagtgaaattttctttggcagttctggaggttagatagaacctaaaagttgatagcttaatagaagcatttgtaaccccagcaagataaacagacacaacttcaaaggccaattccaataaaatgctgaggggcaagaaaacctggtttgttctttcccagattctcgtcacctgaggtcaggagttcgagaccagcctggccaacatggggaaactgtctctactaaaaatacaaaaattacctgggcgcggtggcaggtgcctgtaatcccagctactcgggaggttgaggaaggagaatcgcttcaacacgggggcggggcggaggttgcagtgagcggagatcgcgccactgcactccagcctgtgtgacaagagcgaaactccgtctcaaaaaaaaaaaaaaaaaaaaaaaaaaaaaaaaacaacgctagcaagtggaattatttcaaaagcaacagccttgtttcctgagtgatctgagctcaggaactctgcctgggcatctagacaggagaaagtatctacagcgtggggagatctgagtcagaattatagagcacagtgctgaagccatacattttcctggatttagacagtttcctcctccatttgcctttatttccttgcattctcttttcatcggctccatttttgctgagtattcctttgctttattcccaacgaaaatcgaaaagacttgatgttctgagaaattctgagactggcagttttgatttttcttaaaaggataaaaattgcatcagtcaacacctccctccacactccccccacacacatcctcatcttcctggaagatgatacagtatcctagagcgttgtggagaggatggagaggtcaaggaagccctggctttgcagaggcacctgtcaagttcgggttaacagctgccgcctgtgtctgccctctgcagtccagggaaatagtacccacacggtgagactccaccgatccggaactggagagggtggggggttctaaggtttagtgtgacacaaatgtcagggcagaactttcaaacaggctgagccccagttcaacgtgggtgagtgcgcctgagagcccagctctgggaattgagcagactgaaaatgtggagagtagtttggccagtgaaaaattgtcaccgtgttcggatcaatgctttgaacccgcttttaagtgcgccacgttcacttgggtcaggctctggacattgcggtgggctgaggttttcgcgggcacgatcccccacactgagttttcatggagacgaccagggccgtcgaggcggggaagggaacggactagaggctgaactttggcttcttgctctgaaagatcactcctccggttccggggcagagactcagaccagcctgtgggattacacgagacaggatcgagtccaaacgggtccccagctcggcaaggcgcgccggaaggaatctaagtgtttaattaactgcccccttcacacaccccccgaaggagaaggaactcaaataggcacccctacccaaatcgtttgatcagaggaaattgggtttgtctctcccccaccccccaccccgtcccttcactcttcctgtgtttcagtccatcgggattgttggttaaaaaaaaaaaaaaaaaaaggcttataatcgggggcggggcagaggctccgagcgagccgcacttgcgactctggaccgcggttggtgaacttttttctccctgcgcataatccgcctgctgctctgccccactggctgcgcgtggagccggtcccaggcctgctcgcagccctgcccccgggcgcggcccgagccgggcccgacctcgctttcagggccgagccggggtacgcgtgggcgcgcgcccagcggcctcgatcccgcggcggcgtccgcgctccgcgttttcgctcgcgccgggccccgcggccgagggcggggtgcgcggcggcgccgcagcgcgcggctccggagcccgagcgcactccgcctgcagcccagctgccagcgccgtctcccgcggccgccgccgcccgacagcgcgcccggaacatgccagcctcgcgcagcctgcgctgacttccccgagacgcgccgcggtcggcacggagactttctgggctctggatggttcgtgcgctgctcaccctcgcccacccctgacgccgcggaccgcagctcctcagccccgcagccccgcagcccagcagccccgcagcggcgccgaggacagtgcagccgagttgcgtct

SEQ ID NO: 9312 - DNA, 2300 bp, Homo sapien
tcttagatggaaaattgagctaaatctccctttcagagggagaatctttgataagttacatatagtgaatctacacagtaccataggtatatttgtaaagaggtaatctataaaccatttgaacttgttattgttcattctttcaggtactgatgtgtaagagcactaacaggaccatttgaacaagtttactgaaaaagtaaaatcccctctatcatgggtcacataggctctgatgactagcctggagaatggcctcatgtatgacttcgtttctattggaaagaatgagttcagtagggattcaacacatttttacaaatgttttcttttcccgaccacatgtggtaagcagaataatgcattcccccaccaaaaatattcatgtcataatccccgaatcctgtgactgtgttgccttacttggcaaaagggacttcacaagtgtgattaaggatacagggcttgagatgtggagattatcttggattatttaggtaaactcaaactaatcaagagaatgccaaaagcagaaaacattttctagttgaagcccatcagaggagatatgtctatgaaagaatggtcagagagatgcaacttcgcagccttcaaagacgaaggaagggggccatgagccaagaaatgcaggcagcctctacaaactgaaaaaggtgaggaaagtgatttacccctaatgcctccagaaaggaatgcagcacttgattttacccaataaacacctttattttaacccagtgaaatttgcattggactcttaacctataagataatacattatcttaccataagataatacattcatgttttttaaactatgaagtttgtaataatttgttacagcagaaatataaaactaagataacactaaggtaatgtctgcttattttaagaactttggaaattttagaaaacatttaaaatagaaacaaaagtcacccttaattctactcccctataatatccattattaactttttgaggtacatccttccagtcttctttttcttacaaaattaaaagcacctttaatctatatttaaaaacataaatgtatactttttccccatcaaaagtagaatcattcttcatgttatttttatgatctgcttttcttcagtagtgtgtgaatatttccccacaacattatatattttccgtagcagtgttatgttagttacataatattccatcttacaattttaagatcaaaattatgtgaacaattcttttagaaatagactaggttgtacacataaacttgtaattatagattgcatatatgtgtatttttaagttgtacaattttatattataatgcagctatgttgtactcacttaaaacctggaacagtatgtattatcacaattattttttcatcactttgtcttttcaatcccattcgaagaccttcccatttagaagttacagatgtgtcatcattacttataatcagtcctgcattggccagcaactgtcaggatagaaaagttcaaatggtttatagattacctccttataaatactcctgctgtaccgtgtagggtagctatacctaacttatcaaagaatctcccgattctttgataaatgttgtcttcgattctttgataaatattgtcttcaaataactgaatatttgaatcttcttatctcctgattctttgataagggaagggagattaagttcaattttccatctgctaagggagtccactcaactctatctctggcacagggcaatccagactgtctaaatctttccaatgactaggagcactaaaacataaggcagcttaataacattagggcatgtcttattagtagaaaacataaccttctgttaaactcaggtctggcccccctctgatttctacccactgatctagctgacccttggaagaaatatgcaataaacttacaccttcaaatattcaattatttgaagacaacatttataatctttaagagtgtggctctgctgaaggaatgttgggattttgaggtcatagtagaattgtagttaagtgtggtctctcttaaagacatgtcatatgaacattctgttgccagtcctcagtaatatcaggcaattcacctagaattcagaaagcaacaaatagaacaattcctctctcttgggacttcattttcttggatctgaatttttaagtcctgaagattctgaaatattccaaaggattaggagtttaaaattctctcttcctcatggaggaaaaccaggagatatacaaagaggtatcctgctagaggatcc

SEQ ID NO: 9313 - DNA, 2300 bp, Homo sapien
aagttagccatagataattgtgcgctttcggtgaggtttcctggaatgccaaacaaatgttttctggaaaggttattattccattgaaaagtataacttaagcaagcaaaaaagtatttgattaatatgggggttttcttagtgtaaaattttaggtattacacatcctcttgaaaattaaaaataaatagcacagtactttacaattcacacacttacaaacatttttcaaacttgatcctgattaaaagactgaaatagaaatgtttattatttctattatgcagtttaggaaactgagcatgaggtttgtccaagattacatagacattaatcacaacaacttaaacttaaatccattgtttttatcccacattgatttctttttactacgcatgattttgggtgacatgtaattttatatttaaaaagtaatgttactaatacatactatataattgtcttctctatttgtatatatatagtatataaataaatatacacacatatacatattctataggtatatattaatgtctgtcactgggaaaaagagagaacaagaaggggacatgaacagagaaggaaataggagtattattctgaaaagcagatacccacgtatgtgttaacagggatagagggcttttctatagaagatctagacgtttgtatagagaatggcatagtcattgcatggccttctagaatgttgaccctagagttttttttttgttttttttttttggagacggagtctccctcaatctcccatgctggagtgcagtggcgctatctcagctcactgcaagctccgcctcccgggttcacgccattctcctgcctcagcctccggagtagctgggactacaggcgcccgccagtacgcccggctaatttttttgtatttttactagagacggggtttcactgtgttagccaggatgatctcgatctcctgacctcgtgatccgcccgtctcggcctcccgaccctagagttttaaagctttgtaccttttttctaagataagcataaatggaatgatgcagcagtctggctgctccttctttccctaccattgatgaccaggatgattgaactaatctgtctgctggggtcatgacttctttctgctttcccactgcttgttctgaagctacatacatcatgaaagaagatgaccatctgagatagaaaagtatagagtgaatttattttaatatctttggctgatgtgctgaagttacctaacttattgttaaaatcccacattacagtaaaataaagtttatttcctcaacataaatttacttttgcattctttaatttcaaaaaaggatttgaactttaaaagttaaacaaggccaggtgcggttgctcacgcctgtaatcctagcacttgagaggccgaagcgggcagattgcctgaggtcaggagttcgagaccagcctggccaacatggcaaaaccccgtctctactaaaaatacaaaaattagccaggcgtggtggcgcatgcctgtaatctcagctactcgggaggctgaggcaggagaattgtttgaatccaagaggcgaggcgaaggttacagtgagccaatattgtgccactgtactccagcctgggagatacagcaagactccgtctcaaaaaaaaaaaaaaaaaaaaaagttaaacaagtgttttctgtattgttgattggtgttactatttcatgagttatgctttattcttttacagcattatctgacgctgaagggaattttcttttcaatggaaattttcttctaagtacgtcaaaaaaagaaatcaatgtgcaaggaacaagaactgttattgaatacagtggatcaaataacgcagttgaaagaattaatagtactaatcgacaagagaaagaacttattttgcaggtaaattctcagtcatcagtaataacacttggatttaattatattagtaaactactggttaagtgcttaacattatcaaatataaaatgatgtcaagaatatatttttatgtattaattgtatgttcttttatattcttattgaggtgttgtgtgtgggtaatttatacaaccctgatgtacattattccttcaatatccctttggaagagaggagtgacatgttcacatgggacccctatggaccatgggaaggctgtaccaaaatgtgtcaaggtacgctggcattcaataagggagaaaagactgactgtgcattctggcatcattttgggtacttttgagtcttggctgcctatggaatcctccccactgtccatacaca

SEQ ID NO: 9314 - DNA, 2300 bp, Homo sapien
agcgagactccatctcaaaaaaaaaaaaaaaaaaaaaagaaaaggtaaaaggaaaaagaaaaaaaaatccctcgccccattcttagagcaagctgaaaatcaaatgcttgattgtaaatactgccctgagttacaaacattcagtgatggaaatgaaatatcaaattttccctgtagtcagcaatgagatcgccaattaaacaggtgcagttctattttccggtatttgtaggagagaaggtatggctcctaatgtgaagacacattcagagctgcaatgtaattaaaatgactcaattataatgtactgaaggtaaccactaaatagacaggtgtgagtaaagtccatttttgttttgttgagaataatactatgtttagcttaggaaaaaaatcctaatactatgtttagcttaggaaaaaaatcccaccagaagtctataattctttggtgaatgaaatgtcaccatttcattcattgtgagaaaagagtacaaaagaatgggaatgattatggaagaattactatcaccaagctgggtgatttcctgggagatgtaagattaaaccctctttcattgaacaagattgttccacatttgtggtgaacaacagatgaccaagtgtatgatataaaagtgaagaggcatgccatcagaggtcaattcaaagagtgcagcatttccattgttgagagctcagaggaggtagagcagtcaggaactaaattaaaagtgttttccattgtgtgtgtgaagatttactcatatactcctttcctttttttcttatattctttctctcccctggttggatttcaagacaatctgactactcccaccccctttgctttcatactggatatagagaaaagtaattatgtaacctgcaaatcaaacaggtggatttgagaaatgagaaatcgtactaaaataattgctttcggctaccactgtggtgtattcaatttaacagacacctggagacaactggattcagagccacagtaattgtagaggaggataattgtgaatatacgggattatttgtatattataaacaaagtgtatatgaatactgtggaactaacggcaaaaactctcgcaggcagggcagatccaagttttgtggctcttgacgtttatataattttggagggctcttgatacaaaattaagtacaaatatgaatattaaaagaagaaaaataaaccacagtaagttactaaaactttggagactcagatccttttctgaatttatttcggcaattgtcagaagtgctcgtgtgcaaactcggcttcctcgccccacctatggcactcaactcccggcaactcccagcacacacaggggcccatgcaagtgaggcccggtcactgagcttcattggtagcatcctctgcctacaagaacttccgttgtagcttattttattttgtttgagaagcctaaaagtaccgtaaaacataaaaaacagaaacgttctatctgatgcttgtcatttcatctaagagctcaaaaccctaggcacctttcacgtacgcgggtgcttgcatctcgctcggtttcataggtccggaattggtgcccagccgggccttggggctactcagcaagtcgcgcgcccactggggcagcagaagggtaccgcagtccccttgcggctgagtggagaagggagggggctgcgcggggaaaagcgagcaggggccgcgcctcccgctgattggccgggaacagcccataggggcgggctctccgcggcgctcgccggtccggggtggctatattggcaccattcctgctaggtcgagttgcttccccgcgccgagctgaacctgagcagagagtttctgagggcagcgcgggcgcaggaaggggggtgaggctgcagtgcgatgaagcagcggctcagcgagcggagacaggcggtgtggctggaccagccggcccagggcccgcgctgctgttccctaggctgctgaggcgcggagagcggcgggcgagagggaggagagggatcggagcgcgagggaagccggcttggctgccggcggctctggtgggcctccccgatcggggtccccagggtggaaccatgtgggtggccaagtggctgactgggctgctctaccatctctcgctcttcatcaccaggtcttgggaagttgacttccaccccaggcaaggtaaagtcaccgcgagacgccttcagcggctaagtgggggcgcggggcccgagtgggacatgcaggtcgcggggacgagcggctcagcccgttggggaacgctggccct

SEQ ID NO: 9315 - DNA, 2300 bp, Homo sapien
ttgaattagttttaattgccaaggttgtttgacgctgagctagcagtagtgcctgggagtcggttaggtgaaacaaattgaggtcttttactaatattaaaattaaaacaccttgattttttttttgtgagctgtaaaaaactgaaagtcatgtaacttttgatttaactaacattttctgagtatctattatgtcagtatctcacactttaatccatattcccaccctgtgtggaggtattatcttcccttatttgcagattggaaacatacctgagtagtttactaacctaatcaaggtcaaacaaaatagcgtgtggttgagcttgattatgcttcttaaatcagtactgttttcatctacctaacatttgccttctgagaacaagtttttggatattaacttccatttaggccaggcacggtggctcacgcctgtaatcccaacactttggggaggccaagacgagtggatcacgaggtcaggagttcaagaccagcctggccaagatgctgaaaccctgtctctactaaaaataaaaaaattagctgggctacttgggaggctgaggctggagaatcgcttgaacccgggaggtggaggttgcagtgagccgagattgcccagcctaggtgacagagcgaggctccacctcaaaaaaaaaaaaaaactaaactaaaaattaaaatataacttccatttctaccaacttgatataacttgccattgatttaataggcatattggggcatgtcttgggagagacaagataccttttgattctgagaccaaaatataaagtaaaggggatcccttcaggaaatccccaaatcattttggagttttcccaaagtattttgggatttgtatcataataatatgtaaaatcattatagatcataggaggtgttttagatggtacctggcacaaatatcattgaaaaagcatagtgagaaacttgttctttttcaatatactttcagtcctcacatcaatcattctgtttaaggaaggagaaagctgattgatactatttacatatatcaacattggctgatttacctttttagccaactatgcaggcctcaggctcagaaacatcagcagtcaacaatataatatgtagctagaatgtaataggattgcattgttttattgaatttatcttcccttttatttatggtaatcaattctggcttcctgtttatgtgatggtattatgtttcctttaaaactaaatttaattttaaagaggtagaatcaatttaaaggtattaaataaataatagtatagacatagcagtaattatgataccaatacatgaaggattagagtatgggaaatatactggtacagttgagaatccctgaaatcagagatgggctctaccactgctttaatatgcgactttagtaacccactgattctgttgtagaattcttggacttgaagtactgttagttatcatttttcagtccaggatagtattgcatcaaacaaaattatgaaatatatacaaatttgagacattatgagcagaggcattgatgaccacatgctatatcttaaaattttactgatagttgattttagcaagtcttatgaaacactaagaacaatgtctggtgcctagcaaattctcagtaaatttcagctagtattattacagttagtattactttactatgctccctgataaaatttttataataaaatggttaatgactttccattgaggtctgatctgacttagttttagcataaagtaattacaattcatatttttagaggtttttttttttgtagtagtagaaacaactatttctaaatctggggattcagtagttcattcaaattaggatctttaagagctgtctaggtcaatgttccttaacgttttctacctgggagtaatctttaagagaacaaaaagaaaatgaaactctatataatttaatgcaaagtcttttacattaatgtaagggtaggaaaagaggttggaggaagatatggggaggtaggaaaatgggacttttttcctccatttacttttgatgtttgaatttcaaacatgagtatatttgtgtattattttgcggttaaaaacactgaagattgcataaagatcaaagagggaaatttaagggaattaatgggttatgattgcatttgttcagaatggttttggtggctcatgacaacattttgagagagagagattttaatggcaccaatggcagctaggataactagtttaaagtttagggcctgtgttaatagattttgctttctagttt

SEQ ID NO: 9316 - DNA, 2300 bp, Homo sapien
catctctactaaaaaaatacaagaattagccgggcgtggtggcgcgcccctgtggtcccagctactcgggaggctgaagtaggagaatcgctcgaactcgggaggcggaggttgcagtgagccgagatcatgccactgcactccagcctggacgacagagtgagacttcgtctcaaaaaaaaagagaatcacttgcaggttcctgtagattattggtcaggaaaaacttctctgaggaaatgaatcctaaaagatgcagctatatgattggggagggaacaatttaaacaacaggaacagttagcacaaaactattgaagaaggccagagtagctggagtatagtgggtaatggggtaaaggtacaaatgagtttggagaataagcagggtccctaatcttagatgtccttggaagccagggtgagtaatttggattttattgcaaatgtgactagagggttttaaactggattgtgatatgatttaatttaccttttaagaccattctggctggtttgtgggctagttatagaagcaggagttagggaccttcacaatatctaaaagtttttggaatggaagtattaaagttggtgtgataaaggacattgggagtcataagaatcagatgcttaaggttaatgcagtttttggagatgagaaagtcaaagttatgaccgtgacagtggatgaccaagatgaagtagaggtgtgaggttgaggttgagattgaggacttgagggtccaagacattgaatggatgatccatatagatgatcataaaaatcatgttggataagaaggtagtgagccagagatcagtgaatgaagcagagttgtctggggatccgagagaggatgacagcagatggtaaagcccaatggcaggctcttcaaaagaattggggtttttggaggtagtagaggaagaaatggcttgcaacgaacagtgacaaacatagaccaatatttacagcctccaggtcctaaggtagatgggtgggaaagaaaaaatagcctttacttgagaggactgaagaagaagcagcctgaagaaatagccagatttcaattagggcaagaaagtgagggaactgtacaggaaattaagtaattaaggaaagtaagtatatcttatatattccttaggaaattaggatatggagaatttgtagtgatttctatatggcatgatggaaaggattgagaaggtgtgatttgctaaattggttcagattagtagaatacattataggtatgagatgatggtccagatgatgataagttacttggagaatgtgggggaaacacagaactcactagtatggggcccctgggcaatttatctttcctgcagctccatatggtatggtagccatgggtttgtgtgaaaagtgagagatcagagtactattctcttgcatagtgtttccaggaagctctgtaagggtttcttctgtctgatgccaatgatatagttagaactttcctctggctcaaccttgaaagcttctatttgtcctaatgggggcattagagaaggcccaggactgacttaatcctaccttgaaatataatcaaatcacaaatttgtatttagaacttcatttacccatcagttttcctattgtctttttgtcacctctcctgtcactaaccactaataatataagaaaacttagccacatgttctctggaattagctggaaattttaggctccaggaatggaatttggacaaatctttgttttatagtcctgtgttctcacctcttcttgtgagcctacaaatgatatttttaagataaaattgactcattttaatcctggataataggtacaaatctggagtgagtgaagatacaagttaacaaatctttagctataccagaaatagtttgcctattaattcagcttggtataggagagtcaaagtacacaggaagtacatatagttataaattaagttaatgataccatttaagaagactcagaattaaaagagagacagaattaactaaatcctgcaaacctattcctatttggtcatccataacttctctttctgttaactaaccacctctttgttttgttttctaggcactgttatagaagaatggaagaagatacagattatagaatcaggtttagttctttgtgtttctttaatgatcacgttggatttcatggcactataaaaagctcaccaagtgactttattgttattgaaattgatgaacagggacagttagttaataagaccatcgatgagcctattttcaagattagtgaaatacaa

SEQ ID NO: 9317 - DNA, 2300 bp, Homo sapien
gaatggtcttaaaaggtaaattaaatcatatcacaatccagtttaaaaccctctagtcacatttgcaataaaatccaaattactcaccctggcttccaaggacatctaagattagggaccctgcttattctccaaactcatttgtacctttaccccattacccactatactccagctactctggccttcttcaatagttttgtgctaactgttcctgttgtttaaattgttccctccccaatcatatagctgcatcttttaggattcatttcctcagagaagtttttcctgaccaataatctacaggaacctgcaagtgattctctttttttttgagacgaagtctcactctgtcgtccaggctggagtgcagtggcatgatctcggctcactgcaacctccgcctcccgagttcgagcgattctcctacttcagcctcccgagtagctgggaccacaggggcgcgccaccacgcccggctaattcttgtatttttttagtagagatggggtttcaccatattggccagggtggtcttgaactcctgacctcgtgatccacccgcctcggcctcccaaagtgctggggttacaggcgtgagccaccgtgcccagcaagtgattctctttcacaaaaccctatttaattttctgcatagcagttctaggtaaagtttttctttattatttattgtatatctcctccaaagagaatgttagttccacgtgaggagtaaccttgtctgccttatttactactgatgatcacacattttgaacagtgtcaagcacatggtaggtctgcaataaatactattgttaaataaatgaaataactagtacaaaataagagctgtaggaatgaagtggaagataattagaagaggcataatgcaagaagtggccatctaagtcctccatagttcaagagatagaaatgaggcagagacctcacaagtaatgtacaaacaaaacatgcaatgtgtgcaagaaaaacaagcagtccagatacagagcagtggggatgggaatgcagggagactacagtgctggaaaatgtagctgagttagtaccagattatggaagatgttgaatgccctgacaaggacttagaatctattgggtggtcaatggatggctactgttagtgtttgagtagaaaagtgacacaattccaaaacatgcttttggaattgtaagatgattctgatggaaatgagcaagatgtatccgatggagtaacagttagaggagttcaaaaacaaaacagcatggtcaagaacatagctgtagggattggccctgaaagaataatgatcttttctttctcccagaaaaaaggaggaagacagacattctaagcaagtgaaacaggtagggaaacttggggagaatgtaattccagcatcctggtagaagagtggaactgacctggaggacagcaaaggagcccacgtggcgttaagcctgaaggtgcagtattcccattcaacagagactgctgctgacagtgggcgggggagtagtttgcttggcccgtggttgaggaattcgttggcggaggagggatcctgagaaggtactagaaatactgaacccagtcctgcagaagctacttaacttcacagaaaactagggcgtcgttgccctccagcacgtccaaaggtgtccccgacaaggccagcagctctacctgtttcttctccctcctcttactctgcctgtccaaaggcacgacactagtccacgtcacctttctttgggcgcaaagggtatggatcctcaatgccaacctcgtcaccccccccccccacacacacacacacacacacacatacaagcccaccatcgcgcaagaaactcgaccccgtctacctcggttcagtggaaggcattcatttgcacaacgctgtgcgcatgcccggaagccttaagtgtttcagcctccgacaggggcgtaattaaaggggcaggcgcccacgtaaagacgcgccctacgcaatacgtggagtttctcactttgtggagccgcctggaggcgccaagatgaagcccatcggggaagtggggcggggccaacccggcaggccccgccccttcgcggcgcttcctagttcggctggttcttctgtcgccggcttcagcagcccgcgcccgggcaggtaaggcattccccgccttaatgcctcggtcaaacgtcgtccgaggtccgcttccaggcctcggcacctctgccccagggttgctggggtcggctgcggaacggaaatctctttatcatccgtgagaaaagttagaga

SEQ ID NO: 9318 - DNA, 2300 bp, Homo sapien
aaacaaaacaaaaccaaaacctgaattcatggagtttatattctaatggaggaaggaaggcaataagcaaataaataaactctatagtatgttagatggtgccaagtgaaatgaaagaacaaaacgaaatagagaaaaggttgtaattataaatatggtagtcacaggaagcctcaataagaaggtgccatttgattaaaggtcaaaaagaaggagaaagccagccactggactatctgtgggaaaagtttgtggacaaaacgaaatgtaaatgcaaaggttggaactgggcccactgggcaacagcaaggacatggtgagactgcagaggagggaacaggcaagtagcagatgaggtcagaaaggtaaaggggccaggtcttcaagggccttagagtttttgtattgactttgtttatcctctgggtgagatgtagatgctggaagttttgagaaaagagacatgctctgtactcatgtcttagaaggatactggggctgctgggaataaaggatgttggagtaaggacagagaagcaagaaagaagcatttaggagagcctaccaataagccaggtgggacgtgctgcaggctgggaccagggtcgtagcagagcaagtgcagaagtcctaggattctgaggtggagccaatagaaagctatgggctgatgtggagagtgagaagacagcataaccaagtttaccgatatttactgagatagagaaggctgaggaaggagcaagtttggcctggaatatcagaagctcagtttggagaggtagaaagcaaacttcaaatgaacgctctgcaggaaaacagaagaaatttgaacttcccgatagccctcttcaaggaccactccaagaaagggaaaaggcagattttagtatcctctgcttaccaggggccttgggcagttacgtttttgaagcactaatagcgccgtttgttcccattctaaatgctcaaagtgctttctcgctttctcagggtttgcttttttttttttttttttcttttgagacggagtctccctctgttgcccaggctggagtgtagtggcacgatctcggctcactgcaacctctgcctcctgggttcaagcgattctcctgcctcagcccccggagtagctggcattacgggcgcccgccactatgccagctaaattttgtatcttagtagagacaggggtttcaccatgttggccaggctggtctcgaactcctgacctcaagcgatccgcccgcctgggcctcccaaagtgctgggattacaagcatgagccaccgcacctggacagggtttgcttttatccctttgtctccctctggcttccaagctgacaggtacacttttttcccccatctgcgaatgtactcatctgatcccataagccgcctccactttctaattccctggaagcttggaggccggagaaacaagcgaattacaatcgtgtggaggctcagcgagctgctggcgccacaggcatctgtcaggtgctggcctgacttcctggttctggggaaaagagacttcatttcgcagtcgggttcacggaatccagggcctgagaggtgagaaacttgaggtccgactgcgccccagaacagctgggtgacgtccctccaagcctcaggctcttcctcagggccgacgaacttcttgattaccggggacctacccaagtctttcttctggagtaagctctgtcaaaggaacccacttcctctctaacttttctcacggatgataaagagatttccgttccgcagccgaccccagcaaccctggggcagaggtgccgaggcctggaagcggacctcggacgacgtttgaccgaggcattaaggcggggaatgccttacctgcccgggcgcgggctgctgaagccggcgacagaagaaccagccgaactaggaagcgccgcgaaggggcggggcctgccgggttggccccgccccacttccccgatgggcttcatcttggcgcctccaggcggctccacaaagtgagaaactccacgtattgcgtagggcgcgtctttacgtgggcgcctgcccctttaattacgcccctgtcggaggctgaaacacttaaggcttccgggcatgcgcacagcgttgtgcaaatgaatgccttccactgaaccgaggtagacggggtcgagtttcttgcgcgatggtgggcttgtatgtgtgtgtgtgtgtgtgtgtgtggggggggggggtgacgaggttggcattgaggatccataccctttgcgcccaaagaaaggtgacgtggactagtgt

SEQ ID NO: 9319 - DNA, 2300 bp, Homo sapien
cccaagatccatctcccctcctgtgataattgcctttcactcatgggcagtgtatattgggtaaaccagccaccttggccaagaatgatttgacacaagccaagcagggtcattcacgtgctttctcttaggaactttaaacttggacttagaagagctatgtaatctctgcatgcagctacaaccctgtcaatttggaaagtgtagggtagccatattcagccattttgactgcacaagcagagagatcttatttggagaaaaagaagagaaaagcagaggtgacaaccaagttgtcaagatctataagatcctccaatatccttataataaaccctcttatctgcatacattgttttcaaatggtttgtttcttacagacacttgtcttagccttgaaacctgctgacttcccaactctgtggttcaatttccaaacctcttaaagttaaaaaacaaaacctgctatttttttcagctcgtcacacaggatgttggtactcaaaataagtctattatatattatttgtaaactgtaaactaccatacaaatctaaggtattattctcatgacagctctggcaaatgttcactaaatggagacacaatagatgaagaaaagtgggaaaatatttgtggctagagcagagcaaggtacccaagacgcttgcagcttttaagtcaaactattgtactggcagtaaataagcactttctggtggctgtcagggtggtcccaacctaactagacattcctcttcttcaggactgagaatacagtggcctttcccaagcacgaatatggaaggattatattttgctcaactatacttttgagcaacgccaacttccttaagcaatttccccgaagcactaggacatgaatcagtcaaaatactgcaagtcaactctgcaattttctctctgctcagcaatgtagtcaaaaactggtaaatcagggtgaaccattgtgtcaggaagaatttgattagaatgaaactcctccctacatttcttaaatccatacaagtcataaaactcagatttagtttattcctgaatatgagaatatgtctgaaaaacagagctcagataacaggcaatagaacataaccttgtttgctgtgattcttgtaaagaaaaacaattgcaggcctgttcatcactcatgaaaaatacatcgtatagtactggaacagtgattaacttgcacttatattattgacctgaataaattatttcttcattagcagattataattttgtgtatgtgtcacttcaaggccctaaaaataagaactagcttcccacctagtagcagtagagaagcagtaccaaaaaaaaaccaaaccccccacaaaactaacattacctttcaggaaggaactacatgtttgtaaaagcaggaaaggaaaagatttttaagtaatatctgctgctaccttacaaatctgtccaagtgaattttgaataattactggattaaataataaactgccaacctaaagcagagcaggatttgcaatggtataatcgaccacagagggatactcaaatcagctaatctcttagtggctgtctctttccggagtgaagagaaagatacactgagtctctaaatgtgtccagctgaaaagaaaagttaacagtctgagattaacttaatttaaaatcgtggaaaaatttgatgagaggcagtctatattaattctttcaaaacaatggagcaaggagaaggcttttctacactaaacggtatcgattataggaagagtaaaccaagaaaaataatgtgcacatcttttttaagctggaaaatgcctatttggtaaaatgatcacttccgtttttgagcacccctttgctgaggcagcgaatggcggcgtcggcggggttgtcagagagcagacgtcggagcactgagcagtctagattctgcggcatgtcccccccggaagaagcgggagaggcggcggcaagagcagaagcaggaccccaagcagagaactaggatagcgaggccgggggctggaccgcagcccggcggccaggaagggcggcggggcggcggggacgctcgggcactcagtcaacctcacggggcggggcggccgcgggtcgcgggcggatgacgcgccggggccggcggaggagcagccacttcctggggccgccggccggggccgctggctgcactcagcgccggagccgggagctagcggccgccgccatgtcccaccagaccggcatccaaggtaacagcgcccggcgcgactcgcagggaaggggcttccgggaga

SEQ ID NO: 9320 - DNA, 2300 bp, Homo sapien
ctctggaggctgaggtgggaggatcacttgagcccagcaggtcaaggctgcagtaggctataattgtgccactgcactccagcctggggtacagagtgagactctgtctcaaagaaaatagtagtaataaaagaaataaattacagacctcagtattctgtataatttgtgaagctttactatttttcagttttaactgactgaagagtccttgctttaaatggagatacaaggaaaatatagcatatggaacctttgttaaacagttacccacgtgtaacagtttaaaaattctttagagaataatattaattacagttataaaagcacagtggaatataatgactaatatgtggaattaatccactatctatgagccattactataacttactatgttaggtactaaggatacaatcatgagtaagatttaatctctgcccttgaagagttcatagcgtagtgggagaaaaaagaagttgcaaaaaagaacaacaaaagtgtaatagtaaaatgtaccaagtgctagcataggcaacaactctttctggcaaaacttgttaaagcattacaaaagagaaccttactagttaagagttctgtaaaatgatcacaaatgattgactactatatatccagtggtgtggggatgtgggggttctatttcttaagaagacagaagacaagctgctgaatgacatttcggttctgatgaactgaagctcattttagtagacacccatgtagttcaattgattatgcagtggattgagttcactctcatatatatgagaggcatatttatatatatccatatatacgtggtcatttttggaagctagaaaaatgtcaaattagtgggaagtatggcagtgaattcccaattatgcctatgcagataaactaccctatggcacttgggcatggctctctccatcccatcttaaaatccgcggacatctcagttctccctcttgccatccacccattcctgaatcaggctaccagtacaggggagggcctagctctgccttcataagtttgctaatatgggcatatagaaatcctattttccatttgattatatacactagtgataacttccattaccacaaaatattagcatgctggatagcagctgttaacacgttttcagcaaccggtaaactgaggtagcagttgctattaggtgtggaaggaaacagaggccacacatacatgatggaaaggaggttacattcaggaagagaggaattggtcagatgtagtcaaagggtcttcctgccctatgccgcagaggtatcatttaggtatcatagaatgacaggctccggagagcctcagactgcaaaaactttaaaaattgtacatgagtatgtgtgctgatgtacatatgtgtgtatgcatgtgtatacgtgtgcttatgtgtgtatacatatgtatgcatgagtgtatttgtgcatctctatgtgtgtatgaatgtgtgtatgtgtgcatatgtgtgtgtgtgtgtgtgataccaggcaggttggaaagtaagtggaagacttctcatactcctcatgggctctgcctctccccacccccacatccccacaccaccaacagacaaaaacagaaatcatgttttgcgacctgagattgctttcgaaagtttgtagctcttcgaggacattccagtgggaccctcattggttccctgcaggatggtggattttctgtcagccgccccccaacccccaccaggttcctgagtccgtccctcgcctgcagctgccgctctgcagaggcgggccggcccgggcaggctcggcccgtggcgcacgcggcccgcgggctggagtcagcccgtggtgcgggcgagagggcaggggcggggagaagccatgcctccagctgcagaggttgcacacagctggcatgatcgcggtcacctgcgcggcgccggtgcccttgcgctcgcgttgcccggcccgcggccgcggactttgcggcgggagcgcggcgcggtgaagcaccggcgcggagggcgcccggcgtaggcggcggcgggtgtgggccgagccggtatttatagctccgtgacagcagcagcggcagcgacgccgccggcccgtctcgccgcgcttcccagcgaggccgccggcgcgccgagggctgtgctcgaccgcgaatcccgtgtgcagtcgccccgcgccccgcgcgacccttcgggtgagtacgtgggcccgggcgttgggcgagcctccccagccgttcggtccagccgcagcggagccctcccggccctgccgcccgtg

SEQ ID NO: 9321 - DNA, 2300 bp, Homo sapien
aattggaagaagaaaaagaacccacactgtttaaagagaaggcagcttcagagaaatgagaacacattcgaagagtattgtaaagcgatataacaaagaatacaagaaaacagaatataataagaaattcaagaaatgaaatgattgacagcatgaaatgcttaaagagagaaaattaagaattgaaatatatctgttaaatttaacatgtagatgattattgacttcagcaagaatattttcagtgattgagaagagaaaaatactaacgtgcagtcagttgggtcatataaagaaaggagataaagaccataactgtagccatttattttaatgtgaagcttggctggaaagggacagaaagatacaccaataactaggcaacataggcttaagcaatgagaaagacacgatcgtgtttctagtagatgaaactgatccagaaggcactttatcatgtatgagggctagctttgtaaagacctgatttctctatttaactctaagtttcttgagtgcagagacaccagcccaggcatagtacacatagtagctgttccataaatgctacttaatcaaagagtaaatgaatgagttgatcaatcagaaagaatatgaaaattataatgactataatgaatgcagacaggcttgaaaattgtagaaacagcctgatgtcacagaataaaactacggtgggaacatgcacatctggcttttcattcaaataacagcaaaaataacaagttatatgacttcagtaaaaaaaaaaaatcccatactatttgagtcttagattctttatctgtaaataagaaagtcagagttgatcaggaatggcatagcgggttttttaaattgtactttaagttctagggtacatgtgtataacgtgcaggtttggtacatatgtatacatgtgccatgtttgtgtgctgcacccattaagtcgacatttacatcaggtatatctcctaatgctatccctcccccttctccccacccgacaacaggccccagtgtgtgatgttccccttcctgtgtccaagtgttctcattgttcaattcccacctatgagggttttaactcatcctcaactctgatgggttggtcatagcttcctgaaacacagtgcagagaattctgcagctctgtctttattcaatagagtagaggattttaaaggattggcaatgtctgccatgtatgcagaaggaggaacagatgacgcatatgctacatatttgccaatcctgaaatagttcatgtatacagctcttaaagataaaaaattatatatgatttacggtctttttctgaaaattcattcataattaagtttttaaagatattctacagtaaattggatttaagattaaagagatattttattcatagcctgtatctgattttctttaaaaacaccaaactagaatgtctagaatagagtccacatacaggaaatgtggaagtagtagcatttttataggaaacagtaatgtttgttctattagctaaacgcacagaagaataatgtgttctcccaccctcaccccttatacttctactaatacttatgtggtgacttttgagcatccctgatgctcagagagattcttttctctcagaagtttgtcttgatggaggttggtggtaagtatgattggcctcactgactagatggagaaaacaaagcacagagagaataaattactttttcagaggctactgaacaaactagaaatggatgtggaaatctttctttggccaagcagatggaaggcttgatttaggcatttcctcagccatcccagagctatacagaaaaaggttctcttgagatctgggttcagtactcctgagttttaccatttgtccaatactaagctaaaatacagtcctaaatgcagaggtgagcaccttaattttactgtatatctagttataaaatcgttttatttccatagccattcactcatttttggttgccattatgaacaggcacaagatggatataaaggagtaaaaagttgtcatttttctttaaaataaaaatttaaacttatttaaatttggtacggaggaggagccaagatggccgaataggaacagctccggtctacagctcccagcgtgagcgacgcagaagacgggtgattactgcatttccatctgaggtaccgggttcatctcactagggagtgccagacagtgggcgcaggccagtgtgtgtgcgcaccgtgcgcgagccgaagcagggcgaggcattgcctcacctgggaagcgcaaggggtcaggg

SEQ ID NO: 9322 - DNA, 2300 bp, Homo sapien
gtagcaggtattgttattttgtttccatttttaaaattcccttaaggacctcttttaagcctggtctaatggagatacattctcttagcgtttttttattgttgggggtgtctggaaaacattgtatttttactttgcttataaagcttagtttgatgggatatggaattcttggttgaaatttctttcccttaaggatgctgaaaataggcccccaatctcttctggcttgtaatatttcagctgagacatatgcttttaaattgatgggattccatttgtgcatggtctgaactttttctctagctgcctttaagattttttctttagcattgtccttgggcagtttaatgactatatgccttgatgatgttctttttgtatggtatctcacaggtgttctctggatttcttgttcctgggtgtctacctctttaaaaatactagggacactctttgtactattgcttcaaatatgttttccagattgtttactttttctcctcctctctcaggaatgccagtaatttataaatttgtttgctttacataatcccatatttttcagactttgttcattaaaattttttttctttattttagtctgacttgattaattcaaaagactagtcttctagctctgtaattctttttctgtttggtgtagtatattgataaaaccttcaattgtattttgaaattctttaattgaatttttcaatcctggaagctctgactgattttctttaaagatgtttatctccttcttcatttcctggatttcttcagaaatttctttttctttttctttttttttttttttttggctttcatccttgtcttgaatcttgttgagcctccttgcaatccaagctttgcattcttaatccgtcatttctgagtgtctgttttagtcagggaccattgctggagatctagtgtgatcctttggtggagtcacaatattcagatttttcatggtatgagaaaagttgcactggttctttctcatctggagacactggcacttctaatttttgtaattattaatattttcatgtgaataggattttcccctttctttccctattatatatatatatatgtttttttttttaatttttctttgtttttctccctagtgggtgtaactgtaaagaatgttggctagggtcttttggctttgcttcatttttttgtttttgtttttgtttttgagacaaagtttcacacttgttgcccaggctggagtgcaaatggcgcaatctcagcttactgaaacctctgcctccagggttcaagcaatcctcctgcctcagcctcccaagtaggtgggattacaggtgcctgccactacacctgactaattttttgtatttttagtagagacaggatttcaccatgttggccaggctagtctcgaactcctgacctcaggtgatccaccagcctggccttggctttgcttctatagccctatgcacttctgtcagctggttttatgttggactgtgtggttctacctacaggccagtagatggcacttatgggtaaaagtcagctctggccaacgtgaacgggtatatatttcaaccttgtttactgggaggtctctgatgctgcaggcaatgggctgaactgtttagtgcacagtggtcttagctccctactcaccaccacatgagggaaccaagagagtagggcctggactgggcaggctcacctacagccactcaatggcaggtactagcaccagcacctaatgcgtggccacctagcgcccagaggtatgtctaggcatggagcttggtaacctgcttggccctaagttctctgcatggggaggggtgacggcccgaactcctaatccagtagagtggatgcacctggagatcttcctgggcatgtagcatagggggccgtactgcaccacagtctctccacagaaagtgtggggcaactcaggccactgacccaggcaagggggtacttcagatgcctggagatatgcctaagcatggagtggagagggtcctgttacatcacaatctatgcacaggaggggtgggagactcaggctgctggtccatgataggaagtgctctgattgtctggagatctgcctgcatgcgtggaacagaagaggccctgctacactctaatctatgtacgttaaggtgagatggctcaggctactagtccaggagagtaggtgctctgaatacctggagttctgcctggatgtgtagcagagagggccctgctacaccctaatctatccacaggaaaggtagggtggc

SEQ ID NO: 9323 - DNA, 2300 bp, Homo sapien
atatgtattccactatatgataatatctataactatatatctatagataaaatgtatattatactcctgccttgcagggggctcagactacccagtaggcattttggtaactgtagctgttagtatccagttggagaattcagtacccacatgtttgcatggaaggttaagaaacccaattgatctttgtacagattaataccataatggttttttaaactcttaacttttccaaaatgaaagtggaatgccattcctcaaaatttacctaaaaattttagggctatgttcaaaaaatattatgtaccattgatcttgaacatacatgtgcctgctgaaaaatggatctcaaaggacaccacttttatggtcccggacatatgtggtgaagggcaggtagagcctgcatgagtgtggtcaacagtgggatggctcttctctctcgcctgggctccatctcctccctctgcttatttacgtatttatttatttctctctctctctctctctctaaccatctcctctatgtaggtagatatttcggcgtgaacagacgccctggctcagttccccttgccttctgctgtatgctggtcccagagagcccgagtccgggtctccacgctttatttggcagggggcgcgcgggttccggagctgtccagcacctcctggccaagttctctgcgctctccgcgcccgggaagctctccgcgccggggaagctctccagcgccccgcccccggcagggaacctctccaccaggacacccggggcttcccaggctcgccatccgtccccaccagtctctacctactttgcccagctccacctcggcagtgcagcgtgttttggtggccttcctccgcacgccctggagggggagtgccctgcaccccggggctgctccggagcccagtgcacgagtgcacatgggcttccctcctttgcttaaagggcaggcgagcgctactcgctccagccttgcctcctgcagctgggtggtcttttttctctcctgtctttcaagacacgcgcccgaaatcgaggggtgagagcaaagaccgcccatcaacttagcaccttggatttagagctttcaatcccgaaaggaggttggcattgcccgggtcatcgagagagggagggagaagagctgaggctgcaacggctcctgggctccctagaccgggtttggcatccaggagaccgtgcgggagaccgacgctgagcgccggcctcgccctcggcggcccctccctcctccttaccccgcctcccccggcccgcccctccctccccggaggagcagtctctccgcgcgtctcccggagctttctccattgtctctgcctttacaacaggttcgggcggcggggaagacgggggggtgcggggccgccccagcccgggctttcttggggccgccccccttctaccgggtgtgcgagtctttggctgcttttattcggctcgggagctaattccccgacggagccgcgccggggcgagtccgacccctccctccgggccccctccgggccgcgctgccgcctcggccctgcgtgtgggaatgatgtgcgcattggagggtctaagttcttcacgcgcctggggaggcctcccttttctttcttaggcaaccaaagcgtattaatcctactgatcagtaaatccgaggcagcagcaggagagacaaacgttattttcccgcttgattccaagaacctcttcgatttttatttttatttttaaagagggagacgatggactgagctgatccgcaccatggagtctcgggtcttactgagaacattctgtttgatcttcggtctcggagcaggtgagtggccgcagagctggggctggggaaagggatggctcccgcctcggggcagcatgggctggctggggaagcctcgcttttcccggacccaaagtaggtctggagtgggaagcttggagtaagggggcgggtttggatatggattttttttttttctgtgcttgccttggagaccgcgaggcggatcacgcccctagtccagggtcggagggctgagggggaactttgcagagagaagggtttaaaggaggtcatggaaacgggactgggtgctccgctatttaaagcttggctgctgatctcaggtaaggctctcggcggaggaggaggcagtcgcctctcatcttcagttcccaatattgtcgcgaaaacgcggttctttgctgccctggaggaagagacttgcattttgatggagcttttcctttttctctctcccacctcatacccctc

SEQ ID NO: 9324 - DNA, 2300 bp, Homo sapien
gttgaaaactcctgcccaggttgagaaactctgccctagctaatacaatggctcacctttactatgggtttccaaaccttataccttagttttagagaaacaactcttcacacctccccatactcatattttaatgatttccatactatttaattaggtcaaataattacagtagcaggttcaactagaattattttgggtaccaaataccactgttctggagggagcctcagtgtgtatggtactggagataagcccattaaccaccagctttcagcatatggatgagagtcagagaaactcgagagtatccctactttcatgagttggttgaacacaggttggttaggaggacttttatgtggaaatatatatgtgcatatgtatatttatgttttattcttttctctaatgatagcattttaaatgctacgttatttaaaatttatttcgtgtagcttctgtagatacttattacaattgaatattttagatgcacagctgtagaaaggtctttaattctctgatgattaatttcttttcattgattaattaaattgtattatttatttggcatagtttttcaaatttgggaaattgcatatgacaatcctttatcacttgtaagtactgaaatatttctcaaactttacaaagttacaaatagaattaaatgggaaattcgataagagagaattaaaaattaatttaaaagagctcccgaattctgaatcttttgtcttaaaaattctaagggcagatctaaaaatacctctttccctatagtataatatagtatatgtattccactatatgataatatctataactatatatctatagataaaatgtatattatactcctgccttgcagggggctcagactacccagtaggcattttggtaactgtagctgttagtatccagttggagaattcagtacccacatgtttgcatggaaggttaagaaacccaattgatctttgtacagattaataccataatggttttttaaactcttaacttttccaaaatgaaagtggaatgccattcctcaaaatttacctaaaaattttagggctatgttcaaaaaatattatgtaccattgatcttgaacatacatgtgcctgctgaaaaatggatctcaaaggacaccacttttatggtcccggacatatgtggtgaagggcaggtagagcctgcatgagtgtggtcaacagtgggatggctcttctctctcgcctgggctccatctcctccctctgcttatttacgtatttatttatttctctctctctctctctctctaaccatctcctctatgtaggtagatatttcggcgtgaacagacgccctggctcagttccccttgccttctgctgtatgctggtcccagagagcccgagtccgggtctccacgctttatttggcagggggcgcgcgggttccggagctgtccagcacctcctggccaagttctctgcgctctccgcgcccgggaagctctccgcgccggggaagctctccagcgccccgcccccggcagggaacctctccaccaggacacccggggcttcccaggctcgccatccgtccccaccagtctctacctactttgcccagctccacctcggcagtgcagcgtgttttggtggccttcctccgcacgccctggagggggagtgccctgcaccccggggctgctccggagcccagtgcacgagtgcacatgggcttccctcctttgcttaaagggcaggcgagcgctactcgctccagccttgcctcctgcagctgggtggtcttttttctctcctgtctttcaagacacgcgcccgaaatcgaggggtgagagcaaagaccgcccatcaacttagcaccttggatttagagctttcaatcccgaaaggaggttggcattgcccgggtcatcgagagagggagggagaagagctgaggctgcaacggctcctgggctccctagaccgggtttggcatccaggagaccgtgcgggagaccgacgctgagcgccggcctcgccctcggcggcccctccctcctccttaccccgcctcccccggcccgcccctccctccccggaggagcagtctctccgcgcgtctcccggagctttctccattgtctctgcctttacaacaggttcgggcggcggggaagacgggggggtgcggggccgccccagcccgggctttcttggggccgccccccttctaccgggtgtgcgagtctttggctgcttttattcggctcgggagctaattccccgacggagccgcg

SEQ ID NO: 9325 - DNA, 2300 bp, Homo sapien
tctttttccttgccatttccaatttctagatgcctcccatattccttgtctcatagcccttctatattttcccatcttcatagtcagcaacaggaagtcgagttcttctcatattgcattaatctgacctcctcttatgcctccttcttccacatttaagggccctcgtgattatattgggcatacccagataatctgaaataatcttcctattttaaggttacctgattaacaatcttaattccatctgcaaccttaaatcccctttgccatgtgaggtaacatacacaggttccactgattaggaactggaaaagactgtttcttaaggggaaggggattggaatattattatgcctacaacaatgattgcaagcaaaattttaacattgtctaaaaggagtttgagtgtatgtagatataatacataagacaactacaacctaaagagttgaggataaagggatttgatgtggtagtaaagcttctgtattcgaactgaagtggtaatgtatggactctaggtagaaggtgaaaagttaagtatgtatattgtattccctagaataccaattttaaaagcttcacaaagagatatagtcaaaagaacacatagataaaatggaatactgaaaatactggcattcagtggatagagaccaagaattcaactaacatcctacaaggcacaggacagccccaataaagaattatccagccccaaaatgttagtagttataatgttgaaaactcctgcccaggttgagaaactctgccctagctaatacaatggctcacctttactatgggtttccaaaccttataccttagttttagagaaacaactcttcacacctccccatactcatattttaatgatttccatactatttaattaggtcaaataattacagtagcaggttcaactagaattattttgggtaccaaataccactgttctggagggagcctcagtgtgtatggtactggagataagcccattaaccaccagctttcagcatatggatgagagtcagagaaactcgagagtatccctactttcatgagttggttgaacacaggttggttaggaggacttttatgtggaaatatatatgtgcatatgtatatttatgttttattcttttctctaatgatagcattttaaatgctacgttatttaaaatttatttcgtgtagcttctgtagatacttattacaattgaatattttagatgcacagctgtagaaaggtctttaattctctgatgattaatttcttttcattgattaattaaattgtattatttatttggcatagtttttcaaatttgggaaattgcatatgacaatcctttatcacttgtaagtactgaaatatttctcaaactttacaaagttacaaatagaattaaatgggaaattcgataagagagaattaaaaattaatttaaaagagctcccgaattctgaatcttttgtcttaaaaattctaagggcagatctaaaaatacctctttccctatagtataatatagtatatgtattccactatatgataatatctataactatatatctatagataaaatgtatattatactcctgccttgcagggggctcagactacccagtaggcattttggtaactgtagctgttagtatccagttggagaattcagtacccacatgtttgcatggaaggttaagaaacccaattgatctttgtacagattaataccataatggttttttaaactcttaacttttccaaaatgaaagtggaatgccattcctcaaaatttacctaaaaattttagggctatgttcaaaaaatattatgtaccattgatcttgaacatacatgtgcctgctgaaaaatggatctcaaaggacaccacttttatggtcccggacatatgtggtgaagggcaggtagagcctgcatgagtgtggtcaacagtgggatggctcttctctctcgcctgggctccatctcctccctctgcttatttacgtatttatttatttctctctctctctctctctctaaccatctcctctatgtaggtagatatttcggcgtgaacagacgccctggctcagttccccttgccttctgctgtatgctggtcccagagagcccgagtccgggtctccacgctttatttggcagggggcgcgcgggttccggagctgtccagcacctcctggccaagttctctgcgctctccgcgcccgggaagctctccgcgccggggaagctctccagcgccccgcccccggcagggaacctctcc

SEQ ID NO: 9326 - DNA, 2300 bp, Homo sapien
aacagatatttacagaacattctacccaacaaccgcagaatatacattctatttatcagtgcatagaactttctccaaaatagccacaataaattaaagaaaattgaaattatatcaagcactctctcagatcacagtggaataaaactgaaaaccaactccaaagggaaccttcaaaaccatgcaaatacacggaaattaaataacctgctcctgaatgatcattgggtcaaaaatgaaatcaagatggaaattaaaaaattcttcgaactgaatgacaatacagactgtctttagaaagttttctctcacgtttttccttccaaattagaagtccttcctcagatgttacttgtttttctcctcccagtaggctgtgaattcccatgaggcaaggaccagatctttcttctatgtattcccaaaaccaccacaagtgttcaataaatatgaaatgctcagtaaaggtctgctgactaactcaacaagtgaatgaacatcggtagtataaatcagtcttgcaaataactttcctcccatttagcggcacgtcataaaattgtccaccagcttagaaaaaaaaaacaaacttcattaatttagttacctacgctcatctttgatgaagctgggcatttaaattcaccataaggtgaacttaaaaagaatatttatcttactaacctggcaactctggctagcttttaactaaattgaggccagagaccaaattattcttaggataaagaggaaaaatataatgtgactccaaacttcacaggcatccttaaaaaatctcattcagaataaattcatctaaatttggacaggagagtagcaatggtaagtgttaattggcagagagttcacagttttaacactccactgttacagagtttcctaaaggagcagccttcccaaagtcatcttgtggttaaaaagcaagctttatttacacacacacacacacacacacacatacacatacacacacaaccatgcttttcatctgtccagttcccacttagcaaactgttaataaattttaaaatacttaaattttcagaagaaaaaaaaagaccagctgtaatcctaagtaacgcagtgttttcatccccgtctccctgcagagacgtacacaactaccaatgtctaggaggacctggtggtggttttttccctctaggttttggacgcaaccatctgtcatctggcatttaaccaactccgactatgagctccttctctagatcaaaacgtattagatcctctcttctagagtgaaggagctgtatgcagctctccccacaatccttaaaaacaaatcttattaaaaggtgaccggaaatgagtcactggaaacagaaatttcttaaaaggtctccgagaaaaacacatctccttctcccttataacataagggcctcgtttaatacgcaaacaacccactctttcagaggtaacttttcaagggcggcacagctacaacagtctcggtgataccttccactgaccctgataacagcccctccagccactagcgactccgtttacttcccctggaagcccatcagttgctcaagtgacaaccaacaccggagagccagggttcgcccaacaggagtacgcggagacaccccagacgacagcgcgtcccccccacccccaccccgccctccgggcgctccaggccagcgtccaccagaccccacgcctgggggactgcttgggctctagcgagagtgccacggctctgcacggcagcggggaggtggcgagcgcgcccgattcacgtcgcctccacgcccacctcctcccactacgagtcccctccccttgccacagcactacccttattgttggccgcgtctgtcactttgtggggctggtgacatgaatggatgggctggacacaccttccgtccgtccagaaaaaaacaaaaaacaaaaaaaaaacccgtccagatctgcatagagagggggaaagactcccccctgcgctcccagagcctacgctgtcggccagagaaactcacagcttccccctcccacactcactcctcccatcccttaaaaaaacgcccaacgcaaataaataatatcgttccaagtccgccgccgtcccgggtggcctttcctccctgcctggctccgcgcgctccagccctgcgggaggcggcggcgagaagctgcggctctgggtgcggtgcggggcgcccgggcgacaggcgggcgcaaggcgggcgcgcagcagaccggttggcgccgcactatgctccccagcgcggtcgcagcccacg

SEQ ID NO: 9327 - DNA, 2300 bp, Homo sapien
ctggctaacacggtgaaaccccgtccctactaaaaatacaaaaaattagctgggcgtggtggtgggcgcctgtagtcccagctactccggaggctgaggcaggagaatggcgtgaccctgggaggtggagcttgcagtgagccgagatctagccactgcactacagcctgggtgacagagcgcgactctgtcttaaaaaaaaaaagagagaacatttggttaaagaactatggcagggagttgatgagactttgaattttgaattggtgggggaaaaagtgatctgaaaaaaaaatggattgggacatgtctctggaggtggtttatgaagaggctatgagcactgattctgaaacaagctgttgaggtttcaatcctggctccactatttattccctgtgtgattttggacaagttgctcaagttgcctcacacctgaagaaaaatgataacactttctagggttgttatgagggttgaatgactggatgcttataaaacatgtaaaacttttcctagcacataaaaagtactacacaaaaatttgttaaaagaaaattgtaaaaattgatcatgtaaccaaaacacttttgaagtttctacttttagtgagtttcacaagctcaggggagagtgttcagtgaaaggaaacaatctcttctcatctttcttctcccatcatttttttctcctatcttcagagtactgtattgttgtctctttatactaaaaacaattctgtttattcaaaaaaagtacctcaagaagcaagtatagtgtttcccaggtattttcttaaaagtaatttcatcatgtcttttcatgtatatattcatgtctattttcccacttaagattggtcccaatgttttctttctttcagagagaacattaaaaatgttaggaaactgaggtgcaaggattgctggaggccaggagttcgaaaccagcctgggcaacatagtgagacacccatctctacaaaaaaatttaagaataagccccacatggtggtgtgctccgcttgtagttctagttactgaactcccacctcggcaacagagcgagaccgtcttaaaaaaagtatgtggaagaaaaaacatgcacagtagatttagtgttattgtgataaccctagcacttcagtggaaaaaatataaacaatttcaatgagtagacaataacacatataaccaagatttcaaatataccttctagcccttttgagaagtcaaaattgaacaacctgaatgtaccagcttttttgaaaaaagttttgtagacacgcgatccccaaaacctgccgttcaaacaactccaagggtctttaaagtactaaatccctttgtatttgtcctatcggtccctttggtttccaggaaagcattaaaaataaaaataaaaactctctgccttaattttatttcacgactttcttttctcttattatagctttccacattgctttagaagagtttacatctaactctagtggtcttcggcttcttctccctctttgacacagaggactagtttcaattgtacaaataggctggacgcttcagcgattatcttccgaccactccctgtgtgctcgcgcgggcggagtagggggcgcttctccactctccgcgacctcaatgtatgcggaaatcctcctgcctttgtgcacacgtttatttagaaaattctctccacccccactcccgtccgtcccgccccttcttcttttgcttattctctgagttttgcctctcctcccaccccgactccaccgtaatcttaacctacccgtacagattccactttcccacttcggagctagagtaatttaagatccccccattattagctccacgtcgcctttaaaagccattcaaacgagttcgccttccagggttctgcagttgtgctgcagcagcatttccctcctctccagtatcagacgttaaaacaaagcaagccacagtgtgtgtccacagacgaccttggaacgaaaagctgccctgtttgggatcaatgctcagggaacccagtccactcccgcactcacgtgttcccgccttgccctccagctagttcccccgcgcgcaggatcgcactactccctctgcagtctcgcctgccgacttccttctgcgcgcctcgtaaaaccggggaagttcaatcattccgcagcgagccgcggcggccgcactgggcatgctcagtctccgggctccgctcggcaggcgagaggcgtcctccggctctgggctccggtcggtgggtgcctcggctcggctttccccggcgctggc

SEQ ID NO: 9328 - DNA, 2300 bp, Homo sapien
tgtttgactggacaaaactagcatgaatgacatgtcattaaaaataaaaagagcttactgccacacgcttaagatgaatttatacgatgcctcaataggtaaacacagactagaccaaattactttctaaactgagatctactgctggcacagtaaaacaaagctcagagcctcttgcttacttcagtttccatttgagcttctgcccttatttacttacaatactcattataaacagtgcagctcaccataaaagacaataatactttcctgggaaacagactgtgtcaattttattgtaactttttaaatttcactcctatatttttatgtaatcatcaggtactacttaatcttgctaaacagtagtaacagccagagtgacccagtggtaagagcattaatcttcactggttttacaagtcagaaaacctgggtttgaaagtgtgagaagctgggcagaccaacctgtgcgcttcagttttctctcctataaaaactactactatttgctctctccttaaagatgaataactagtaaattgttcttaaatgaatgaatgaaatgtgaaactaaatcatggagtgtaatctcctctattcgatttgtccctggacaaccaagaagttaccaaatttttttgatcgaaatattccgtgcccaaaatgtaacagaaataaaaaccacacccaactcctaaaattaagttacttttaaagttattagataacaacagggctttagaacatcagcaggatgttctgctttaaaattgatttggcatccaggagactaagccgagtcgccacaacagactggcttggtaatttaattagagtcttctggagggacacattatatcatcatcccccgacagtgttctctttagggacctgattttctctctagtcctctcattcctttccccttcctcacctcctctcatcccttttgtttgccctttttttctttttttgctcttaaaacagctctccctccgttcgtcttgtcacttccatgcatttttaactctaactagaaatgggtcaccccaggtttgctccccaagccccagggcccctcaggacgagtgaaaaaggccctgcggtcctccctgcctgggggaattcctcctccgatcacagctccggtgggctccgcagatgggaaagggtttccagcgcgcgcctagcggccacaaatcacttcccggggccgccccgccaggcctcaaacctcccagagccgtcggtcggcttttactttaacgaggattcagatgggtcacaccctgtcctccaaatgcgggcctgctccccggaccccgcccagggggctcgccccagtgccgaggctcctgggcaaccctagcactctgcgagtcggggaagtgaccccaaagttgcttctgagtggagacttccgcacgcagaggcgtccccgcagctgccaggcttttcaggggcagcatcccccgcccgtcaggagcctgtcctcggggccaccacgcgccccgcgcctcagccccgcaggggccgcaccggggcctcagtctgcaagcagccggggacagcgggcttcctcccctgcccggagcggccgagcgtctcggccaacctcccccgcggagagcacagcgcccccgcgcagtccccgaacttcttcccgcgtcggctcgggctctcgggtggggacgcggggacccctcgctcaccgatatccccatcgtcgtcgtcctcctcctcctccatttgtagcaaaacattcctgctcatctttttcatgtctccctcagaaggcggctccgaacttggcgcgaagttgggggctcccgggttccagaacggcgcggctctcccaggggccggatcggggaccgcggggcgtgtgtcgcttgggctcaggggccgctgagcccagccagcgccggggaaagccgagccgaggcacccaccgaccggagcccagagccggaggacgcctctcgcctgccgagcggagcccggagactgagcatgcccagtgcggccgccgcggctcgctgcggaatgattgaacttccccggttttacgaggcgcgcagaaggaagtcggcaggcgagactgcagagggagtagtgcgatcctgcgcgcgggggaactagctggagggcaaggcgggaacacgtgagtgcgggagtggactgggttccctgagcattgatcccaaacagggcagcttttcgttccaaggtcgtctgtggacacacactgtggcttgctttgttttaacgtctgatactggagaggagggaaatgc

SEQ ID NO: 9329 - DNA, 2300 bp, Homo sapien
tttcaaaagtaagcaggaacccactgtttaaaaggctctaaattccagctactagagggcacatttccatatacatacataaagcatctctatgatataatcagggaccccatccagttagaaagtttttttttggggggagggggaggtctcttgcaaattaggccattataacgcccaatggtatacccaggaactcgtgtcaaaataattctaaggctgggtacagtggctcatgcctgtaatcccagagctttgggaagcaaaggcagcagaatggctagaggccaggagttcaagactgcagcgaactatgatcttgccactacactctagcctaggtgacagagcaagaccctgtctctaaaaataattctcccagtctgaattataaaggtaatattaatagagggatttcacagaaatcttccgtacccaagtgggtttcaaactattatacaactactgacagtgacaatcaagtactaggagaaatattagttaatagcgtaaatacagacgtgcattgcaaaattaaaggcagaggttaaaattatcttcatttcaccagtctcctctcccacagttggaaataataattattttgtaaaaggctttggaccactatcagcctactcctggtaatctttaaaaaggcttattcttttgtaaaggcataaacttaacattggcatagttaagtattttctgatataaaatcactacaacccacattaaatttgtacttccaaaaaaacaaccaactaggtggatatggtggtgcctaaagtcccagctacttgggaggcttaagtgggaggatcgcttgagccccgtaggtcgaggctgtaataagccatgaccacatcactgcactctagcctaaacgacagagcgagaccctatctcaaaaaaaaaaaaaaaaaaaaaagagaaagaaagaaacagaaatcacattcatagatactgggtgttagaacatcagcatatcttttcattcactgagaagaaaaaaatattgccaagacctgtttaaatggtacctgctgcttgacgtaaaatatgttgagatgacccctacagtagagaccccagggccccacaggaatagtgggaaatgccctactaatattaacactaaagtattagtattagtagtttctagagggtggggaggagtagagatatttaactttttcttaagtctatctacactgtttgactggacaaaactagcatgaatgacatgtcattaaaaataaaaagagcttactgccacacgcttaagatgaatttatacgatgcctcaataggtaaacacagactagaccaaattactttctaaactgagatctactgctggcacagtaaaacaaagctcagagcctcttgcttacttcagtttccatttgagcttctgcccttatttacttacaatactcattataaacagtgcagctcaccataaaagacaataatactttcctgggaaacagactgtgtcaattttattgtaactttttaaatttcactcctatatttttatgtaatcatcaggtactacttaatcttgctaaacagtagtaacagccagagtgacccagtggtaagagcattaatcttcactggttttacaagtcagaaaacctgggtttgaaagtgtgagaagctgggcagaccaacctgtgcgcttcagttttctctcctataaaaactactactatttgctctctccttaaagatgaataactagtaaattgttcttaaatgaatgaatgaaatgtgaaactaaatcatggagtgtaatctcctctattcgatttgtccctggacaaccaagaagttaccaaatttttttgatcgaaatattccgtgcccaaaatgtaacagaaataaaaaccacacccaactcctaaaattaagttacttttaaagttattagataacaacagggctttagaacatcagcaggatgttctgctttaaaattgatttggcatccaggagactaagccgagtcgccacaacagactggcttggtaatttaattagagtcttctggagggacacattatatcatcatcccccgacagtgttctctttagggacctgattttctctctagtcctctcattcctttccccttcctcacctcctctcatcccttttgtttgccctttttttctttttttgctcttaaaacagctctccctccgttcgtcttgtcacttccatgcatttttaactctaactagaaatgggtcaccccaggtttgctccccaagccccagggcccctca

SEQ ID NO: 9330 - DNA, 2300 bp, Homo sapien
agtagtgttccaagatgttattggaacatatttctacaattaatactgtttgccatttatagaatatcagctgtctaaaccaggcttttaaaataccaaattggcaaaattaaataatattactcttcagctatctatttttaatggtaaatctaagtttttaaaagtctgtttattaaatgctaaaagttgcagaaatgaaaaagcagatccacaatttcatatgagatggcaagttgtccaaataccaaaacaattctgaaaaagaataaagtcagaggattcatgggttctgatttcaaaacttaatgacaaagctacagtgatcaaaatagtgtggtcttgggtacagatagatatatagactaatggaatagaatcaagagtccagaaataaacccacatgtcaatggcccaactggtttttgaaaagcgtgccagatacactcaatgaggaaagaagagtctcttcaacaaatggtgctgcagcaactggatttccacatgcgaaaagagcaacgttcaatcccacctcacatcacagacaaaaattaactcaaaatggattaacccacgtgcaagagctaaattcatgaagaaaacataagggaataactgttgggcatggtggtgcatgcctgtaatcccagctactcaggaggttgaggcaggaaaatcgcttgaatccaggaggcggaggttgcggtgagccaagatcgcgccattgcactccagcctgggcaacaagagtgaaactccgtctcaaaaaaaaaaaaaaaaaaaaaaacacaaaggaaaatctttatgacctggatttggcagtagattcttagatataacatcaaaaacatgaacaaaaaaaaaattaaaaatagataacgggacttgagaaaattaaaaatttttgtgcatcaagggatattaaaaaagtgaaggcagcttacagaatgggagaaatatttggaaatcatgtatctgataagtctttaatatccagaatatataaataactcctgaacacagcaaaaagacagactcagttggaaaataggcaaaggacttgagcatttttgatgtttttccaaaagaatatgtacagatatctaatagcacaggagggaatgctcaacatcattcaccattagggaagtgaaaatcaaaaccacaataccactttacacctaccgggatggctactatttttttttttaatcaaataagagcacacaaaatagtaagtgttggtgagtatgtagagaaattagaaccctcatacattgctgatgggactgtaaaatggtgcaggcattgtgaaaacaatttggcaattccttaaaaagcaaacataattatcgtacgatccacagttccaaatcctagatatacacccaaaagaattgaaaacagggactcagatacttgtataacagtgctcgttgcagcattattcacaatagccaaaaggtggaaacaacacccgtgtccatccacagatgaatggggtaaatacagcgtagtatatctgtacaacgaagtattattctgtcatagaaaggaacaaagttctgatatatgctacaacttggatataacttgaaaacattatactaagtgaaataagccagaaacaaaaggacaaatattgtataactctatttatatgaaatatattaaataggcaaattcatagagatagaaaaaagattagagataactagggactggggaaaaggggaaggggaaatggggaattcgtgcttaatggttagagtttctggggtgatcagaaacattttggaaatagtggtgatggctgtgcaacattgtgaatgtaattattgccactgaattatatattttaaatggctaaagtggcaaactttatgcttatatattacgttactgcaataaatttttttaagatggtaagagaactaatgaattcacagtgaatctgataggtttgcagtgtacattgagtttttctataaaagcattaggtaatccagttgtgtgtgagaatcagtaatgtgatagttgtttccagctcttccaaaggacgcatgtttaacttctagatgtatttttagagctgaactgttggggcagaggaggcttgtaggaataggggaagagttcataagcagagctgaaacaacaccaaacatggaaatgttacaaggtggagaaattgtgcttactgaaactcttctcagaaatattgctgtttgtggatgatagaaatcttcagagttgtcacttaaggtagaggtaggagggtaagaagcgtcaaggactca

SEQ ID NO: 9331 - DNA, 2300 bp, Homo sapien
aaattatgtttttctagaagttggaatgcaaatgggctcaaatggtcagagaaaacaaagagaagaaatcatgattccaaatgctcatagaataaaactacagaggaggtaggagacattcttccagagtaggcttctagagaatccaagttcacagtcagcaggtacaaagatcaagatgtttgggctgaacggcaaaaattttgaggaaccactaagctcctcaacttcctctcatatgagcagagagcagccagttgagcattttcatttctactgggtatggctgttgggactggagaaaaagtagaaaagagcctaaagtggaccgccaaaacaaaaatcaagagaacatagcatgtgtgctgaatctagaggctctagaacactgattgactgagctagaatcagctcatccccaagagtcaagccctccttgctgattggcaattgcctccctgtctatgaactataagagatgcctgcatccactggaactaccctcttgcccaaagaactctgcttgtcagggaagaaggttgttgggtaatcagatctatacaactgtaaagcaagctcagctgcccacctatactaattaacatggtccttttgaggaaaactaataacaaaaagaaaaagatcaatatcaatatcaataagcaacaaacaattaattcagaagaaagagatgatgcaaggaatagaaaaaaaacctttgtaaattaaagatagtattctcaaggagatttaggaagatattgcaagattagaacaaaaataggctgctattaaaagatcaataagaaaataagtggcacagtcagtcacatctgtaatctcagcactttggaaggccaaggcaagaggattgcttgagtccaggagcttgagaccagtctgggcaacatagcaagaaccccatctctacaaaaaatttgaaaattagccaggtgtggtaaaacttacctgtcgtcccagctactcaggaggttaaggtggaaggatcgcttgagcccagaggtttaggttgcagtagccgtgattgtgccactgcactccaacctgggtgatgcagtgagaccctgtcttaaaaaaaaaaaaagaaaagaagaggcctcaaaatatgattgttaaaagaaaaaaatagaacagctaaattatagaattaacagaatgagccagtatggtggcaagcacctatagtcccagctagtcaggaggttgaggtgggaggattgcctgagctcaggagtttgaggttgcagtgagctgtgatcacacccctgcactccagctccagcctgggtgatagagtgagactctgtctcaaaacaaacaaaaagaacataataaacaaggttaaagctcaaattagtgatcttgtaaataaagttgtaaccagatgaaatgacttgcacctgtaatcccagctacttgggaggctgaggcaggaggatcacatgagaattcctgtcctcaagtcatcctctggcctcagcctgtgcgatatgctgacagcccatctctctaaaaaaaaaaaaaaaaaaagaataaagaaagaaaacaaagttatgaaaatgttagatattactataaaagaaagcacaaataatataatggagactgtacatatattaatagaataaaatgtccctgggagaaaagctagaatcctcaaaatgaaagagttctctgagcattaatgaatataaaaggaaaacactacacctagacatatcctggtgaaattttagaactttgagtataaagagaaaatgctgcttgggtatggtgcctcacgcctgaatcccagcattttgtgaggccaaggcaggaggattgcttgagctcaggagcttgagaccagcctgagcaacatagtaagacctcatatctactaaaaacaaaaattaaaaaattagctgggcatggtggtgcattcctgtagtcccagctattcaggaggctgaggtgggaggatcgcttgagagatggcagctgtagtgggctatgatcacgccactgcactccagcctgggtgacagagcgagaccctgtcgcctaaaaataaaataaagtaaaaaagagaaaatgctaaaatatctcagaatggttaaaacatttaaaagcagactacccacaaaggaaatagaattaagcatctgaagagcaacacatgagtttccacaaaacttaagagaaaatgatttcaaatctagaatcttatactcagattaactattagttaaaggtgagggaaaatcatggcattttcaggtttatagtaatggctaata

SEQ ID NO: 9332 - DNA, 2300 bp, Homo sapien
gagtttgccattattttttcaaaggaggtttttaaaaaacccagatcggtgttttaaaagcgccccccgctcccagcgcttcctaccagagcccggagcccattcctcggccggcggcggcggggctcagtcatgggccggcggtggcggcggcggcggcggcggcggcggcggcggcggcgcagggagggagggagggagggggaggaggaggaggaggggaaggagggagcaggaggccagggggagaggagggaaggagggaggggaatttctaaaaaagtttaaagaaatcggagcgaaactagaagggcaggcgactgccggatccgcgcgaagccgcggggcgagcgcggcccccaccccttccttccctccctccccgtggcccggctctcgcccgcctctcagcgccgccggctgaggcagctcagcccggggacgcgattcaacatggtgctgctgccgggggcgcgcgagcgggcgacgggcaaggcgagccgatggtgaggggtctgggcggccagaggcccaagagtttcggcggcggcggcggcggggctagggcaggcggggctgggggtggggagggggaggtctgtgtggtggtttgtggaaagcgcggtgacagcgtgtatttcggccccggctccgcggggccctcgcacacattcacgcgcggcctcggccgctgaggccggggcgtccccgggcagaagcaccggcggcagctgagccgctgcgcgccgcccgcctgcttccctccccgccagcctccctctctgccgccgccacggcctggcagccagtgccacacagcgacccccgagggctggccgcggcactgcgcctggctccacaccgccccggcagatcctcgcggggaacaatagactcgactcgccgggcttagggttcgtctgcaatgtgccgcacatttcacacgcacacaaagccggcggaaaggggggcggtgcggggaaacggccactaccggttgttccagggttaggggtggaggcgatgttcgcgtccccggcccggctgttggaagggccgcctcggagtccccgcccgcccgacagaaccggtgtggcgctctgaagggaaaggaagctcaccggggtagcccctcacgctacgcaacattcacagatcggaataaagtcaatttgttaccttctgtttttgtaaaatctaaaggaatcggcttttatgagccgtatgctagtattttggggcctggttagcacattttctatgaattatccacacgctaactttagcaaactatacgttaaatacaatgtgaactgtctgtcctagttctgtggaaatagagtaatgctcttaattcatcttgccgctggttggcttcacatatcaaactggagtattctatgagcaaagttatgcaaactaactaaactggttgggaagcaatctatcgaacttcgacaataataattaaggtttacatttttatagtaaggtctcttcaagattgctgcgtttaaaataaataccgaataaaacgtttttccttgctttcaaatgtcttaaatgtaatcctcgtttaaaatattttgaaggttaaaaaaaccctttgcttaaatgagtcaaaacatctcaacaaatactaccacctaaatttgcatttacgaggggtgttggagccggctctttgctacaaatgttaattaagattacagtacgtgaaacgtattattattcccattttagtgacggccaccacgggcaaagtcactgcctaacccaaggtcacagggtagtaggggtctggatgggttatttcaggtagtcgttccaatgggaacattgctttggaggtgaaaaattatgtaatatagtgcagcttgcttccggtgctcactctaggaaacggacttatttcccaactaaagtttgtctcttaagtggggtcggaataaggttgtggctaggaagatcctgacaacccagggccagtgagtgtctcggaagcctgtgaggggcggagacccggcccggggaggtggagaagctcgccggccgcggaagactaggggtgaggctgctgcgaggaagacccggtcagctgtcccttcccccatcggtcctcttaggggaagtggagatgtgggcctcggagctgcgtggcccgggctgtgcggattccctaaacgccgcacttgcgcacagccccttacgtaaccgtcagtgccggggattccctggagggggtcattctattcaaccattatacacaccccgggctcctgccgccgcgccgccgccgc

SEQ ID NO: 9333 - DNA, 2300 bp, Homo sapien
tccagggaatccccggcactgacggttacgtaaggggctgtgcgcaagtgcggcgtttagggaatccgcacagcccgggccacgcagctccgaggcccacatctccacttcccctaagaggaccgatgggggaagggacagctgaccgggtcttcctcgcagcagcctcacccctagtcttccgcggccggcgagcttctccacctccccgggccgggtctccgcccctcacaggcttccgagacactcactggccctgggttgtcaggatcttcctagccacaaccttattccgaccccacttaagagacaaactttagttgggaaataagtccgtttcctagagtgagcaccggaagcaagctgcactatattacataatttttcacctccaaagcaatgttcccattggaacgactacctgaaataacccatccagacccctactaccctgtgaccttgggttaggcagtgactttgcccgtggtggccgtcactaaaatgggaataataatacgtttcacgtactgtaatcttaattaacatttgtagcaaagagccggctccaacacccctcgtaaatgcaaatttaggtggtagtatttgttgagatgttttgactcatttaagcaaagggtttttttaaccttcaaaatattttaaacgaggattacatttaagacatttgaaagcaaggaaaaacgttttattcggtatttattttaaacgcagcaatcttgaagagaccttactataaaaatgtaaaccttaattattattgtcgaagttcgatagattgcttcccaaccagtttagttagtttgcataactttgctcatagaatactccagtttgatatgtgaagccaaccagcggcaagatgaattaagagcattactctatttccacagaactaggacagacagttcacattgtatttaacgtatagtttgctaaagttagcgtgtggataattcatagaaaatgtgctaaccaggccccaaaatactagcatacggctcataaaagccgattcctttagattttacaaaaacagaaggtaacaaattgactttattccgatctgtgaatgttgcgtagcgtgaggggctaccccggtgagcttcctttcccttcagagcgccacaccggttctgtcgggcgggcggggactccgaggcggcccttccaacagccgggccggggacgcgaacatcgcctccacccctaaccctggaacaaccggtagtggccgtttccccgcaccgcccccctttccgccggctttgtgtgcgtgtgaaatgtgcggcacattgcagacgaaccctaagcccggcgagtcgagtctattgttccccgcgaggatctgccggggcggtgtggagccaggcgcagtgccgcggccagccctcgggggtcgctgtgtggcactggctgccaggccgtggcggcggcagagagggaggctggcggggagggaagcaggcgggcggcgcgcagcggctcagctgccgccggtgcttctgcccggggacgccccggcctcagcggccgaggccgcgcgtgaatgtgtgcgagggccccgcggagccggggccgaaatacacgctgtcaccgcgctttccacaaaccaccacacagacctccccctccccacccccagccccgcctgccctagccccgccgccgccgccgccgaaactcttgggcctctggccgcccagacccctcaccatcggctcgccttgcccgtcgcccgctcgcgcgcccccggcagcagcaccatgttgaatcgcgtccccgggctgagctgcctcagccggcggcgctgagaggcgggcgagagccgggccacggggagggagggaaggaaggggtgggggccgcgctcgccccgcggcttcgcgcggatccggcagtcgcctgcccttctagtttcgctccgatttctttaaacttttttagaaattcccctccctccttccctcctctccccctggcctcctgctccctccttcccctcctcctcctcctccccctccctccctccctccctgcgccgccgccgccgccgccgccgccgccgccgccgccaccgccggcccatgactgagccccgccgccgccggccgaggaatgggctccgggctctggtaggaagcgctgggagcggggggcgcttttaaaacaccgatctgggttttttaaaaacctcctttgaaaaaataatggcaaactcgacggggaaggcgcctccggacgagcggagaaagggactcgctttcctggacgagctgcgg

SEQ ID NO: 9334 - DNA, 2300 bp, Homo sapien
taggaatattctactgaaaaacctattcaatgacactgttccaaacaagaagtttcattaaaaaaaaaaaattcttaaagccagaatttttaaaactaaaggagtttccaaaacaaagaaaaaaattttcccaaaggttacaaagtttcattaactatcttaagtcttttactaagcatcacctttctgcccctcagtgggtatcaagcgatgaataacaatgtcacaaaagaatgtttaccaagattggggctggggtgtcacctgtaatgattttgtatgaaaaatgtaaacgatcctgaaattggtgaggaagactttcaccttcctacaatctcactttatttatattaaatgtgtctcagtctgaaatgaacaagagcttaagaactgtttggtgtgcaaggtttgcttttgtttttgctaaaaacaaatctctccataagtcccttatttccaaatactatggaaaagtcactactactcaccgcaagtaatactgttttaaagcaaaggcagcgttagaacaacttctgggaaagttgaactcttcaacaatttctccccactgattcttctcagaaacctggtaaaacacaggcacagttgtctgaacgtgaacaatctaagaaaatcttaacctaactatgaaataaatacccattctacagagatctgtagatacctaaggcatcagtgggtgtttcggatcgatcggtaagagttactaagcaagggcttcttgaatcactgtgttttcaccagagagccctgtatttaataccacttgttttgtttgggggtgggggggtttggtgggtttgttttgtttttgaagcccggacaataaccaatcgcaagtccctctgtcgcccccttttaaatctcaacgcggtccgtttacactaaaaaaaaaaaaaaaaaaaaaagttcaaaaggatcaatacagttccggacagcgacgtccgcgggttggggggggggccggggctggggccgattccgatccctctcccagatctatccatctccataggcccttctttgaggcctacagcttctgcctagccttgaagcctaagatggctatttggagacaggtcctggtttcttttgttagctgtataaaccgagggcgacggggccgaggctgtgcccccggctgccgggattatttcgcagccgattatcgatgttaaacctgcccgcgctaattttgagttgcacgaaaactgctctcagagtctgtgtgtctctgtgtgtctccgcctgtgctagagcggcagcggcggcagagctgactcgcgagcgagcgggcgggcggcgcgggagcggggcgggcgcggggctcaggctggcgccccgcacgcccgcattccccgccgcggcgctcagaccccgccggcccgaccgggcaccgggcagggcgcgagccggcgccgggccgcccgcccgccggagccccgcgcccgccgcgcgcacgcgagccaccaggccaaaaacagccccgccgccgtccgcctccgtgccaccggctgggagcgaaaagaacgccttttgcccccgcgggccacccccccagccccaagcgcccactccggggtcaaaggagactttttggaggaggccagcgagagggaaatacaaattaaaacttccactcaccttcgcgaatccgcctaaagtagtgactctggtgtagagaccgtgaagatccagctccttcccacccaccgcagggatttttttaaaaggcgacctgcgggagagaaaaagccccgcacttgtcagccgggaccccgtgcccggcccgggcgggagagccccgttcgccccggctcgccccggcgctgcccccccggttctgctctcaccctctgctgtggtggaactgccgcagctcgtccaggaaagcgagtccctttctccgctcgtccggaggcgccttccccgtcgagtttgccattattttttcaaaggaggtttttaaaaaacccagatcggtgttttaaaagcgccccccgctcccagcgcttcctaccagagcccggagcccattcctcggccggcggcggcggggctcagtcatgggccggcggtggcggcggcggcggcggcggcggcggcggcggcggcgcagggagggagggagggagggggaggaggaggaggaggggaaggagggagcaggaggccagggggagaggagggaaggagggaggggaatttctaaaaaagtttaaagaaatcggagcgaaactagaagggcaggcgactgccggatccgcgcgaagccgcgg

SEQ ID NO: 9335 - DNA, 2300 bp, Homo sapien
gcttttttctttttttatctttcttggagtttgtagtgcttctgaaatatataggttaacatttttcagttattttagaataattttctgcccttacattgtcacatattctgtctgcccattctttctcttcttcaggaactccaattatttgtatgttagaacttttcactgtgtgccttatgtctcatacactttttttctcttcatccttttgtctctttatacttcaaacttatttacttgccctctcttcttgctcataaattcactcttgggttgtatctaatcagttcttaaacatatccactgaattcttaattttagttatgtttttcagttgtagaatttctttttagttctttcatatagttttaattcctttgccaaaatttttagttttttatttctttgaacttactattcattgtcattttaagttttgtgtctgatatctttaatatctgaattcttgtggcccttctttcttggttattgaacattgtcttttaaaaaaatgtgcctacttcttttttattgctaccaaacattgtttgtcatagattttttgtgcaatggatttctttgatgatcacatgaagccagtaagcctttttccaactaatggttttaaatgcctaagaactttgattccaaaaaaaaaacccagttgttttgaaatatacacataatgtcacagatactgctaatattactatagttcattgcttaatattcagagttgaagaaattctaaagaaatgtcagatttccaggccgggcgctgtggctcatgcctgtaatcccagcactttgggaggcagaggcaggcggatcacaaggtcaagagattgagaccatcctggccaacatggtgaaaccccatctctactaaaaatacaaaaattagttgggcgtggtggcgcgtgcctataattccagctactcgggaggctgaggtaggggaatcacttgaacccgggaggtggaggttgcagtgagccgagatggtgccattgcactccagcctgggtgaaaagagcgaaactccatctcaaaaaaaaaaacaaaaacaaaaaagaaatgtcaaatttccagtagtgtttaatgtacatagagatgtcatttttcccccatccaagttcacagatttctgatttctttcacagtccctttagtcgtctgtggccctcaggttaaaaagccctaaacataaaaagatgcctttttatataagtatctgaaactatagacaatcaaatatttacatcaaagaattaattccctagaatgtagcaatatccacatgaactaaaaataagtagaaacattattttcatattgtgtgactattttttaaaacttatttttaaatttaattttgagatggggtctcactcttccgcccaggctggagtgcagtggcacaatcacagctccctgcagccttcaattccaggcctcaagtgatcctcctgcctcagcctcccaagtagctgggacttcaggcacatgccaccactcctggctaatgttttaaattttctagtttgtagagatggggtgtctctttgctgcccaggcaggtctcaaactcccagctgcaagtaatcctcccatcttggcctcttaaagtgctgggattacaggcatgagccaccatacctagcctgtgtgtgactatttctaaagcaatagaatagttgtttcaaatcatggagaattaaataatttatcattacagttttggaaagacatcgttgatgataatgaagttcgtgacctcatttctgacagaaacaagtctcatggtaagttagtgaaagcaaaatttttcaaaacctttgaagtattaataaatgaaatattaagtgaaatatgtattttctattgtagaaggtacatcaggagaatggatttgggagtctttatttcatccacctcgaaagctgggcattaacgatattgaaggacagcgggtacttcagattgcagtgattttgagaaatctttcctttgaggagggcaatgttaagctcttggcagctaatcgtacctgtcttcgtttcctattactttctgcacatagtcattttatttctttaaggcaattaggccttgacacattaggaaatattgcagctgaggtaagcatgtgactgtaccttaaactagtttttatagttagcaacatttatgttacaattttaggatgtggcattttatagttgccatatttatagactattaaatgcttacatgtattagttgctaaaaatggtgatgtagaagtatcacat

SEQ ID NO: 9336 - DNA, 2300 bp, Homo sapien
ctgtttctcgagcagaaatgtattctgaatacctctcgacttgcagtaaattagctcgtggtggaatcctaacatcaactggattttataaatgtcttaggtaggatccatagttctttaaataaagtccatttacgtcacttacaacatctcttgctctttaaagaaaataccaaatatcttatctagttttaaatatttctactactagaagtttcgtatggataggttatagtgtggtggaggtttaaataaaaagcagtttcagaaatcacatctagtgtttgtgttggaacattatgagatttatcaaagaaatgaagtttactttctttttcctacctacttttacatgttaaagacatgactgtatctttttaatcttgaataatagaatataatattattatcttcaaatacaaagactttttgatattttgcaaagtacataaaaataggtatcttttattagttatatgtgggtggaattgtttaaaacccagcgacattgttaataaataatgatgttttaaatgggatgattaatcttttatatttctttgctttccatccttgcagaatataactgtgagtcatactggttcatacataagcaacagtaaacatactgctgttgttcatgtaaacataatgttagaagtcaatgtgatagttatcaaaacttactgattatgtatgtactttacagaacggtctttccaaatcatacagtgaagagagtggaggattccagtagcaatgggcaggcacatattcatgtggtaggagtaaaacggagggctataccacttcccattcagatgtactatcagcagcaaccagtttctacttctgttgttcgtgttgattctgttcctgatgtatctcctgctccttcacctgcaggtgttaatttttattgtatttttaaagtattactgatttaataataaaactgaatgaaaaatatatattctatgcattttaaatgtataacttttgtgtctccagtagcattttcttacttggtctattaccatattcatatgattcaaaattgttagatgttaatttcttaaaactattttctcttaagtaaaataattcctacttgggattttcagtcatttcatttggaattttgacgttttcttcatattttcaggaatccctcatggatcacaaaccataggaaaccattttcagaggactcctgttgccaaccaatcttcaaatctgactgcaacacaaatgtcttttcctgtacaaggtgttcatactgtggcacaaactgtttcaagaattccacaaaatccttcacctcatacccaccagcaacaaaatgctccagtgactgtcattcaaagtaaagctccaattccttgtgaagttgttaaggctacagttatccagaattccataccccagacaggagttcctgttagtattgctgttggaggaggacctccacagagttctgttgttcagaatcatagtacagggccacaacctgttacagttgtgaattctcagacattgcttcaccatccatctgtaattccacagcagtctccattacacacagtggtaccaggacagatcccttcaggcactcctgttacagtaattcaacaagctgtcccacagagtcatatgtttggcagagtacagaacataccagcatgtacttctacagtttcacagggtcaacagttaatcaccacatcaccccaacctgtgcaaacttcatctcaacagacatcagctggtagccagtcacaagatactgttatcatagcacccccacagtatgtaacaacttctgcatccaatattgtctcagcaacttcagtacagaattttcaggtagctacaggacaaatggttactattgctggtgtcccaagtccacaagcctcaagggtagggtttcagaacattgcaccaaaacctctcccttctcagcaagtttcatctacagtggtacagcagcctattcaacaaccacagcagccaacccaacaaagcgtagtgattgtaagccagccagctcaacaaggtcaaacttatgcaccagccattcaccaaattgttcttgctaatccagcagctcttccagctggtcagacagttcagctaactggacaacctaacataactccatcttcttcaccatcacctgtcccagctactaataaccaagtccctactgccatgtcgtcgtcctctacccctcaatcacagggaccacctcctactgtcagtcaaatgttatctgtgaaaaggcagcaacagcagca

SEQ ID NO: 9337 - DNA, 2300 bp, Homo sapien
tggttcatacataagcaacagtaaacatactgctgttgttcatgtaaacataatgttagaagtcaatgtgatagttatcaaaacttactgattatgtatgtactttacagaacggtctttccaaatcatacagtgaagagagtggaggattccagtagcaatgggcaggcacatattcatgtggtaggagtaaaacggagggctataccacttcccattcagatgtactatcagcagcaaccagtttctacttctgttgttcgtgttgattctgttcctgatgtatctcctgctccttcacctgcaggtgttaatttttattgtatttttaaagtattactgatttaataataaaactgaatgaaaaatatatattctatgcattttaaatgtataacttttgtgtctccagtagcattttcttacttggtctattaccatattcatatgattcaaaattgttagatgttaatttcttaaaactattttctcttaagtaaaataattcctacttgggattttcagtcatttcatttggaattttgacgttttcttcatattttcaggaatccctcatggatcacaaaccataggaaaccattttcagaggactcctgttgccaaccaatcttcaaatctgactgcaacacaaatgtcttttcctgtacaaggtgttcatactgtggcacaaactgtttcaagaattccacaaaatccttcacctcatacccaccagcaacaaaatgctccagtgactgtcattcaaagtaaagctccaattccttgtgaagttgttaaggctacagttatccagaattccataccccagacaggagttcctgttagtattgctgttggaggaggacctccacagagttctgttgttcagaatcatagtacagggccacaacctgttacagttgtgaattctcagacattgcttcaccatccatctgtaattccacagcagtctccattacacacagtggtaccaggacagatcccttcaggcactcctgttacagtaattcaacaagctgtcccacagagtcatatgtttggcagagtacagaacataccagcatgtacttctacagtttcacagggtcaacagttaatcaccacatcaccccaacctgtgcaaacttcatctcaacagacatcagctggtagccagtcacaagatactgttatcatagcacccccacagtatgtaacaacttctgcatccaatattgtctcagcaacttcagtacagaattttcaggtagctacaggacaaatggttactattgctggtgtcccaagtccacaagcctcaagggtagggtttcagaacattgcaccaaaacctctcccttctcagcaagtttcatctacagtggtacagcagcctattcaacaaccacagcagccaacccaacaaagcgtagtgattgtaagccagccagctcaacaaggtcaaacttatgcaccagccattcaccaaattgttcttgctaatccagcagctcttccagctggtcagacagttcagctaactggacaacctaacataactccatcttcttcaccatcacctgtcccagctactaataaccaagtccctactgccatgtcgtcgtcctctacccctcaatcacagggaccacctcctactgtcagtcaaatgttatctgtgaaaaggcagcaacagcagcaacattcaccagcacccccaccacagcaggtacaagtacaagttcagcagccccaacaagtacagatgcaagttcaacctcaacagtcgaatgcaggagttggtcagcctgcctctggtgagtcgagtctgattaaacagcttctgcttccgaaacgtggtccttcaacaccaggtggtaagcttattctcccagctccacagattcctccccctaataatgcaagagctcctagccctcaggtggtctatcaggtggccagtaaccaagccgcaggttttggagtgcaggggcaaactccagctcagcagctattggttgggcagcaaaatgttcagttggtcccaagtgcaatgccaccctcagggggagtacaaactgtgcccatttcgaacttacaaatattgccaggtccactgatctcaaatagcccagcaaccattttccaagggacttctggcaaccaggtaaccataacagttgtgccaaatacgagttttgcacctgcaactgtgagtcagggaaatgcaactcagctcattgctccagcaggaattaccatgagcggaacgcagacaggagttggacttccagtacaaa

SEQ ID NO: 9338 - DNA, 2300 bp, Homo sapien
atacccaccagcaacaaaatgctccagtgactgtcattcaaagtaaagctccaattccttgtgaagttgttaaggctacagttatccagaattccataccccagacaggagttcctgttagtattgctgttggaggaggacctccacagagttctgttgttcagaatcatagtacagggccacaacctgttacagttgtgaattctcagacattgcttcaccatccatctgtaattccacagcagtctccattacacacagtggtaccaggacagatcccttcaggcactcctgttacagtaattcaacaagctgtcccacagagtcatatgtttggcagagtacagaacataccagcatgtacttctacagtttcacagggtcaacagttaatcaccacatcaccccaacctgtgcaaacttcatctcaacagacatcagctggtagccagtcacaagatactgttatcatagcacccccacagtatgtaacaacttctgcatccaatattgtctcagcaacttcagtacagaattttcaggtagctacaggacaaatggttactattgctggtgtcccaagtccacaagcctcaagggtagggtttcagaacattgcaccaaaacctctcccttctcagcaagtttcatctacagtggtacagcagcctattcaacaaccacagcagccaacccaacaaagcgtagtgattgtaagccagccagctcaacaaggtcaaacttatgcaccagccattcaccaaattgttcttgctaatccagcagctcttccagctggtcagacagttcagctaactggacaacctaacataactccatcttcttcaccatcacctgtcccagctactaataaccaagtccctactgccatgtcgtcgtcctctacccctcaatcacagggaccacctcctactgtcagtcaaatgttatctgtgaaaaggcagcaacagcagcaacattcaccagcacccccaccacagcaggtacaagtacaagttcagcagccccaacaagtacagatgcaagttcaacctcaacagtcgaatgcaggagttggtcagcctgcctctggtgagtcgagtctgattaaacagcttctgcttccgaaacgtggtccttcaacaccaggtggtaagcttattctcccagctccacagattcctccccctaataatgcaagagctcctagccctcaggtggtctatcaggtggccagtaaccaagccgcaggttttggagtgcaggggcaaactccagctcagcagctattggttgggcagcaaaatgttcagttggtcccaagtgcaatgccaccctcagggggagtacaaactgtgcccatttcgaacttacaaatattgccaggtccactgatctcaaatagcccagcaaccattttccaagggacttctggcaaccaggtaaccataacagttgtgccaaatacgagttttgcacctgcaactgtgagtcagggaaatgcaactcagctcattgctccagcaggaattaccatgagcggaacgcagacaggagttggacttccagtacaaacgcttccagccactcaagcatctcctgctggacaatcatcatgtactactgctactcccccattcaaaggtgataaaataatttgccaaaaggaggaggaagcaaaggaagcaacaggtttacatgttcatgaacgtaaaattgaagtcatggagaacccgtcctgccgacgaggagccacaaacaccagcaatggggatacaaaggaaaatgaaatgcatgtgggaagtcttttaaatgggagaaagtacagtgactcaagtctacctccttcaaactcagggaaaattcaaagtgagactaatcagtgctcactaatcagtaatgggccatcattggaattaggtgagaatggagcatctgggaaacagaactcagaacaaatagacatgcaagatatcaaaagtgatttgagaaaaccgctagttaatggaatctgtgattttgataaaggagatggttctcatttaagcaaaaacattccaaatcataaaacttccaatcatgtaggaaatggtgagatatctccaatggaaccacaagggactttagatatcactcagcaagatactgccaaaggtgatcaactagaaagaatttctaatggacctgtattaactttgggtggttcatctgtgagcagtatacaggaggcttcaaatgcggcaacacagcaatttagtggtactgatttgcttaatggacctctagcttcaagtttgaat

SEQ ID NO: 9339 - DNA, 2300 bp, Homo sapien
aagcctcaagggtagggtttcagaacattgcaccaaaacctctcccttctcagcaagtttcatctacagtggtacagcagcctattcaacaaccacagcagccaacccaacaaagcgtagtgattgtaagccagccagctcaacaaggtcaaacttatgcaccagccattcaccaaattgttcttgctaatccagcagctcttccagctggtcagacagttcagctaactggacaacctaacataactccatcttcttcaccatcacctgtcccagctactaataaccaagtccctactgccatgtcgtcgtcctctacccctcaatcacagggaccacctcctactgtcagtcaaatgttatctgtgaaaaggcagcaacagcagcaacattcaccagcacccccaccacagcaggtacaagtacaagttcagcagccccaacaagtacagatgcaagttcaacctcaacagtcgaatgcaggagttggtcagcctgcctctggtgagtcgagtctgattaaacagcttctgcttccgaaacgtggtccttcaacaccaggtggtaagcttattctcccagctccacagattcctccccctaataatgcaagagctcctagccctcaggtggtctatcaggtggccagtaaccaagccgcaggttttggagtgcaggggcaaactccagctcagcagctattggttgggcagcaaaatgttcagttggtcccaagtgcaatgccaccctcagggggagtacaaactgtgcccatttcgaacttacaaatattgccaggtccactgatctcaaatagcccagcaaccattttccaagggacttctggcaaccaggtaaccataacagttgtgccaaatacgagttttgcacctgcaactgtgagtcagggaaatgcaactcagctcattgctccagcaggaattaccatgagcggaacgcagacaggagttggacttccagtacaaacgcttccagccactcaagcatctcctgctggacaatcatcatgtactactgctactcccccattcaaaggtgataaaataatttgccaaaaggaggaggaagcaaaggaagcaacaggtttacatgttcatgaacgtaaaattgaagtcatggagaacccgtcctgccgacgaggagccacaaacaccagcaatggggatacaaaggaaaatgaaatgcatgtgggaagtcttttaaatgggagaaagtacagtgactcaagtctacctccttcaaactcagggaaaattcaaagtgagactaatcagtgctcactaatcagtaatgggccatcattggaattaggtgagaatggagcatctgggaaacagaactcagaacaaatagacatgcaagatatcaaaagtgatttgagaaaaccgctagttaatggaatctgtgattttgataaaggagatggttctcatttaagcaaaaacattccaaatcataaaacttccaatcatgtaggaaatggtgagatatctccaatggaaccacaagggactttagatatcactcagcaagatactgccaaaggtgatcaactagaaagaatttctaatggacctgtattaactttgggtggttcatctgtgagcagtatacaggaggcttcaaatgcggcaacacagcaatttagtggtactgatttgcttaatggacctctagcttcaagtttgaattcagatgtgcctcagcaacgcccaagtgtagttgtctcaccacattctacaacctctgttatacagggacatcaaatcatagcagttcccgactcaggatcaaaagtatcccattctcctgccctatcatctgacgttcggtctacaaatggcacagcagaatgcaaaactgtaaagaggccagcagaggatactgatagggaaacagtcgcaggaattccaaataaagtaggagttagaattgttacaatcagtgaccccaacaatgctggctgcagcgcaacaatggttgctgtgccagcaggagcagatccaagcactgtagctaaagtagcaatagaaagtgctgttcagcaaaagcaacagcatccaccaacatatgtacagaatgtggtcccgcaggtaagttattccatgatcacatttctcttatgaaatttctgatctgtaaatacaattttagagggaaatgcactgttttccatgtctcatcttgaaaagttactgtatcagctcacttgtatccaacctgtccttttctttttctctggttttgtaatattagttttcaattttagcacatgattt

SEQ ID NO: 9340 - DNA, 2300 bp, Homo sapien
aagtcggtagcccaagatcacatggctagtaaaaatcagattgaaagtgtgagtcctgatctgtcaagctggaaaatcctcatcctatttgtgatatctctacggccctaaaatgtttttggtgcatgtgtatgttttcttattgtaaaatcttaagagtgggaacctattatagaaatgtcagtcttgaagtagatttttccctcagagcttagaactcaaaagttcttgacttcccatttctgacaactttgtctttcaacatgttattctcttccttctttcatttgtatgtcatagtagccttgtatgtttgtgatttatctttttttctaaagaaaattactgtggcttttaatctaagttctcagcaattttagcttactgctttcccacctattgccagtacagtcatgtgctacttaaggacatttctgtcaaggatggaccacataatacaacaatagtctcataagatcataatattgttttcactgtaccttttctatgttttgatacacaaatacttaaccattgtgttacggttgcctatagtattcggtacagtaacatgctatacagatttttagcctaggagcaataggctattccatatagcctaggtatgtagtaggctatatcatctaggtttgtggaagtacaccgtatggcattcacagaacaatgaaatgttctgtgacccatttctcaaacatattcctgtcattaagtgatgcacgactgcattaccttataaatgaacaagtatattcaatgttttcccagagttttaatttactgcctttaagcagttcttcaaaaataatgtactaccatttctataagaaatttaacattaatttttccctttgtggtatttcaagaaaatatattgcctaaatttgatttaaggtacattttgattattagtgttttttccaagagaaagggatgggatctaaaagaaaaaaattataggatatatttaaaagactttatgcctacaattagaattattattttttcttttgagacagagtctcctctttcacccaggttggagtgaagtggagcgatctcagctcactgcaacctctgcctcccgggttcaagtgattctcctgcctcagcctcccaagtagctgggattacaggcgcctgccaccacgcctggctaatttttgtttttagcagagatggggtttcgccatgttggccaggttggtctcgaactcctgacctcaggtgatccacccccctgggcctcccaaagtgctaggattacaggcatgaaccaccgtgcccagcctagaattcttacataaataacaaaagatataattagactgggggctggatgtggcagctcatacctgtaatgccagcactttgggaggccaaagggggaggatggcttgaggccagtaatttgagattatagtgagctatgattatgcctctgtaacctgcccaggcaacagaacaagaccgaccctgtctctaaaaataacaaaaatacataattgagcaacttcaaaatctaaaattgttaagcagcttactgcaaattagttaatatcatattttatacatatggttacatcattattgctatctaaaattttcattgctttttaccatattgtttcacattatattctttagaaaatctaaaagtaaacatacaaaaaagtagtaacttgcagttgatctgttcttgtgaagaattcacataagtaaatccaatgggtacatttatagtatatttatttctcatttaaatctacaattgtattgtttcatcctaaaaatctttattttaaataatatatattttatagtggtaataacaatgtggtattaccttcgtggttttatattaaataaaataaactttctaaatatttctataaaaataatttttaaagattttaaaggtaatcataagcttaaaattataaaatgtaaattttatggtagaaatgtataacaacataatcaaatttataagactatactataaaatatgaattttttcagtgtcatgtcacaaactctgcatttgttctttttcacagaacactcctatgccaccttcaccagctgtacaagtgcagggccagcctaacagttctcagccttctccattcagtggatccagtcagcctggagatccaatgagaaaacctggacagaacttcatgtgtctgtggcagtcttgtaaaaagtaaatggcaattttatttgatatataaaagtattctttgttttggaatgcttttatatttaagtttctgtca

SEQ ID NO: 9341 - DNA, 2300 bp, Homo sapien
tgggttcaagcgattctcctgcctcagcctgagtagctgggattacaggcatgcgccaccatgcccagctaatttttatattttttagtagagatggggttttgccatgctggccaggctggtctcaaactcctgacctcggatgatccgcccgcctcagcctcccaaagtgccgggattataggcataagccaccgcgtctggcccaatccacccatttaaacaaaaattctctcgtttttagtatattcacggaattgtgcaaccatcaccacaattctagaatattttcatcatctttaaaagaaacccaatacccattagcagtcacttccaattttccccaaatccttcctttgttgtgttttagtttttttccattgtggtaaaacatacataacataaaacgtactattttaaccacttttaagtgtacagttcagtggcattaagtacattcatactgttgtacaaccatcaccactatccatctccacaactttttcatcatctcataatggaactctctacccacttaacagtaactctccattcctgaactacccccagccccagtaaccactgttctactttctgtctctatgcatttgactcttctaggtatctcataagtgaaatcataccatatatttgtccttttgtgtcatgctaatttcacttggcatgatgttctcaaagtttattcatatgtagcatatgtcagaattttttttcctttgtaggctgggctcagtagctcacgcctgtaatcctagcactttgaggggccgaggcaggtggattgcttgagcccagaagttcaagacaaccctgcacaacatggtgagacctcgtctctactaaaaacacaaaaactgagatgggaggatcacctgagcctggagaggtcaagactgcagtgagccatgattgctccgctgcaacccaccctgggcaactgagtgagaccccgtctcaaagataaaaaaaaaaacctcaaaaactcatagaactgtacactaaaaagcgtgaactttactataagtaaattgttttttcctttgtaatactgagtaatattccattgcatgtacatgccacattttgtctatcatcgatgatagacacttaggttgcttccacaccaatttttgtctcttatgagtaatagccatcaatattggtgtaaacatatctttcaattccctgccttcaattcatttgtgaatatactcagaagtgggactgctgaatgaaacaggtaattctgtttgtttttttaaggaactgccctgttttacacagtagttaggcattctctatatattctgaatattagtttcttctcagacaggtgacttgcaattattttgtctaattctatgggttgcctttttactctgttgatagtatcctttgatgtacaagcttcaaattttgacgaagtacagtttgtctggttttccttttattgtctgtgtctttggtgtcatatcccaagaaatcactgccaaatccaatattataaagcttttgccctgtgttttcttctaagagtcttacggttttatatatggtacagggtaagtgtccaacttcattgttttgatgtacatatccagtttttcaaatgccatttgttgaaaagactgtcttttcctcattgaatgaagaattgtcatacttatggaaaatcatttgaccaaatatgtgaggacttactttttgggccctctcttctattccattggtctctatggctgtctttatgccagtaccacgctgttttgattatgttagctttgtagtaaatcagaagtgggagtcctgcaacattgttctttctcaagattgtttctgctattcagggtctcttgagattacgtatgaattctagtacgaatttttctttttttgagtaagattatcactgtatttattttcctatattttttctatagcttcaatgttttatcttcaaaatgaaaagaaaaacatccccaaatttagaactggatcatttggccctttctcttctttatctcctcccagttcaaaatgcttgcatctcttaatggccagcatcctgttgatctgctgttaggctcaacacattccacccttagcataatcgtggttttagcctttgtattagtccgttttcacgctgctgataaagacatacccaagactgggcaatttacaaaagaaagaggtttattggacttttagttccacgtggctggggaggcctcacaattatggtggaaagtgaaaagtacgtctcacatggtggcaaa

SEQ ID NO: 9342 - DNA, 2300 bp, Homo sapien
aacacagacatatatatatatatatgcacacactttggtaaaaagttagcaaatgtacgcttaaagtctgcattttatgttgaattacacctcaaagttgattttatttttttagagtagtgaagaacatgatgaaagctggaaaaattcttgacaaaatactacataaattatttcaaagagaaacatctgtgttaagttgctttcatcttttctttgccatgaatttatcagaaaaacatacttttaaaggtttttttctgaattttagccaattggtagctatctttagacaaggagtaaccttgaatttacatttttagctatttgggcaaaaaacatttaagcactgtattttaatattgctaacctgatttagagaattaatacttttaaattggtggtttaattttttaaaccatttaaacaaaaatgtctttattatgttttcagaattggttttataccctggaatgttgaaacagaagtccttcctctcatttcttctgtgttgccaagaactatttttccaacaagtaccatatctttcgaacattttggtaaagtttgtgaaatcattttctattttaaaaattattattattagtttcttccagtttcataaaaatgtgtgtttgatgacttagaaaagctgtaaagtaaggcatagtaacttgtaaatacgtctataaatatttggacaatgacttaactttagaattgcttcaactagagtgtatgtatatatagatagatagatacatagtctctccatatatctatatacacacacaatggaatattattctgccacaaaaagaaggaaatcttgtttgtgccaacgtggatgaacctggaggacattaggctaagtgaataaggcaggcacagaaaggcacataaccacatgatctcacttatatgtggaatctaaaaaagttgatctcgtagaactagattgtagattagggggtggggtaggtgtggtggggtggaggttgttggtcagaggatacagtttcagctggatagaataagttctaaagatcaattgtgaaacgtgatgactataataatacagttgacccttgaacaacataggttttaactgggtggcgacattatacatgaattttaaaaaataaatatatcggaaaatgtttggagatttgcaacactgaaaaaacagaaaaatcgcataacctataaatagtgaaaaaaattaagaaaaaggtatgtcattaatgtataaaatatatgtaggtactagtctatttcatcatttactaccataaaatatatacaaatctatgataacaagttaaaatttatcaaaacatatacacactcaaaccacatggttccaccatttgcagtcataagaaatgtaaacagctgtaaagatacagtattaaatcatagctgtgtaaaattaaatatagtacgtatttaccagtgtaacaatttttgtggccgccacctgttgctattctggtgtactcaagtgttgtgaatgtctgggaggttgaggctacaatgagccatgattgcaccactgcactccagcctgtgcaacagaacaacagcctgtctcaaaaaaaaaaaaaaacaaaaaaaaaacaaaacacaacgcaaaacctggtttaatgtaatcatctccatgtgagcatttgtctttctaatagattgcatatcacagtaaaaagtgatctcttgcagtgcatgcatatttttcatagtgtttagtgcaatactgtaaaccttgagtaacacctttgggacccacataagtgccattagtgatgtaggaagtgctcccaagaagcaaaattatggctttataagaagaagtttaattccttgataggaacagattgagatctatagctgcagttgcctgccatttcagacagatgattcatcttgtaaacaaatgatataaacttagggtatcaataaatacagtacagcattataatgtattttctcttatgatttttgtaataaccttttctttagcttcttttattgtaagaatacagtatgtaacacataacataaaaaatatattaattcactgttatcagtaaggagtctggtgaataacagttaagttttggggagtaaaaactgtttcaatttttgactgtgttgggggttggtgctcctaatccctgtgttgttaaagggtcgactatattgtatttttgaaaattgctagagagtggacgtaaagtgttctcactaaacaaattataactatgtgaggtagtgcatatattaagtagctagatttggtc

SEQ ID NO: 9343 - DNA, 2300 bp, Homo sapien
aaaaccaaacagctgttgtataataactaaaaaggaaattagtatgctattaagtagaaagtaggctattaccaactgaactaacagaagtaaaccaaaatacatatgatcttgcagtgcaggaaacaagcctcctagttagtgtgatttattttgaacaatgtcaataggccctttgtgaggcaagcaagggggaaaattaaaaggcagttgtcatatgcactgtggacaagtcataagcaatgcagccaccaacgttgtaacagaaagctgtttcagtcagcacatctacttttccatcttagtataaaattggaaggaaagaacatacctgaagtgggtgccagtggctaaatggtaatttatggttaacaagagctgatggccccaggccacctagtcagcccctgcttgagatagctacctgttttctagatgatagctggaaaagaaatgttaagtgtattattgatattaaatagcttgacttcttgtgtataccttttgttacaagatactttaagtttgcataaggtagcagaaaatgttgattagaattttaactcatatgttgtaaacatagcaggtttgacatacttcacccagtttctgtattgtggccttttatattttacttgtagtaatagcttaacaaggtaagatgaaatcagcatttgggaaaattgtgtaaaaaattgtgtattatttgaaatacagcttttctacgtatttcaacccttgccaatgtgctggtatcgatgctggtttacagcctttttaataaaaattaatacaaggtaaccaagtccttttatgtctttgtacaggaaactctttatacagtgaaacaggaggaaagaaaaatgcagcaataaagataaataaggtttgttgaaaccaagaaaaatctttttcttagatgataacactttagggttatttagtccataaataaccagtgcttcaggtgtatcaaaatatttaagtataactattatttacctgttatttatttgctgtttcactaactactttttacttttctagcctcagagatcaaattggagtacaaatcagtgcttcagaaattttttctccaatatgttttcttctgttagccactctggagaatcttcctttacctatagagcttattggttagtattttctacttttaatttatgctgtttatacttgatgtttaataattattaacttttgctagaaatttaaactctgggcccaataaaaactgaaaggcccacctggttgttttgctttagtttttttttgggcgggggggaaggtaaactagctctagcaaagagaaaacctgttaattttgggagcttctctattgtgcagtgattgcctatgccagtgtgctttgttttcattaataagttgttctatataagctgtttatatgattgagaagtagcttatttattagcttgtggggatgttacctaaagaagaacccttttacagctgatccattcatctttgaatcctagtgactggcatgtagatactaagttgatatttatggaatttgaagattaaattgaggttttaaaatcacgtacagttagttgagccagcagcacagaatacgattgtgtgatttaattttagaacttggcaaggtaccaagaaaaaaattatgtctaagtaggcttttgaaaagctgaactatacccatttttggttgcagtcatcttaccctactttattttcttcttttgtcttaggcttagtttcaagtaggaaactattgcacctagaatttcttcctttcaataatgaggatattactctgacttgactttatttaaaaaattctgtcacttaagatagaaattcaagggttatttttaacaatcatataaatacaactctgatttgcaatataaaaattgtacttattttaggaatgagtttattttgaaagtgtttaaatagaaaagagctcacatgcttgtaagtgtgattcataatgccaggtacaaaaacgactgctattctttgtacaacctaattgtttttttgaacctaaaattgtgagattctgatgaaggtctaaaatttatcttttagtacagaatttatagaagccagtgaaatcagtgcattgattaggcagaagagacatgaactggaattgtcatggtttcctgatacattacctggaattggaaggtaaaaataaaaaattatttactcaggtgtttacatgctaacatgaacaagatagcattagtacttaagtacaagggtaccttattcaattgttattt

SEQ ID NO: 9344 - DNA, 2300 bp, Homo sapien
cattatagaagtgtaatatagtaagtgtggcttttcctgaagacatattctccatttttccaaacgctgtttgtatgtataattacattgcaaaagattcattagtgtaaagtagattccaaatatatttttctgtgaaattatgttttcttgcttagaataaaatttatttgatagagtttgtattttacttaaaagtttggtacagtgctagtttaatttttgtttaacttaaaaggtatttcttggcacatgagatatcttccacattctcttaagtgccttccctagacctttacttctttcgaatcttcacttcattatctttttccctttgcaattgaacttcttgaattctacaactacctcttctcaattcttactcacttttcagttcccatagaacatttacctctattatcttattttacaaacactaccctcaccaaggtccaggctcagacttccacattccatggtttgttttctgcgtgtagtgctgctgactaccctctaattccttcggcttctaaaacatccttctcttgtgggtatgtatgtaagtatgtatgtatgtatgtatgtatgaatgattgttttacttctctgtcctttcacaatcttctttgtcatatccctaccctcctgttccttttcttaatcattaggactcataggatcttcatttaaattctttcagtatactttctttctaagtcttctcagctattatacttcagtagctttaagtactacgtatatttggatgcttctaaaattctgtcactgtcctagacttctttactgagagccagacctgtatttacaaccacttgtgcatctctatctggaataccaacaaaatctgacattaacaaactccaaattaatcacattccctacccctttccccagccccagttgttaatggaatcacagccctagtcaccaagatcagaaatatctgggacttttccagttttctctccctcatctgtttttttctgctcaatgtcttaaatatgtttcttctgtatccctccattgttccctctttgtagacccctattctttcatctaactagtgctgtctgatagaagtatactataagccactaaataactaaaattttaagtaagcatcctaaaataataaaaaaatgaaataaattgaatgatatattttatttttaatccaatatatctaatgtattagctcaacatgtaatattttaaaattattattgagagattttacattcttttaaaaaattatactaagtctttgaaatcttgtgtctattttatacttgcggcacattccaatttagacgagccacattccaagcactgagtggccatatgtggctagtgactgttgtcttggacagcatagatctagtctatcttaagagctttcttttaagatctagtttatctataagagcctggtttttatagtctctccttaactggttgattccccatatcacaccaaagttatcttcctaaaaacaaatttgatcatcgcattcacttgctttaaaaagtccgcttactctctgatgcctgtagattttcttattcaagaacctttacagtcgagtcctaacacatttcaccaatttcacatctagctactctgtttttacctgtctacattggcttctcactgttccttacaactctgttctttcctccacctagaatatttttttcttagaccaattcctaactatcctttaagaccaactcatacatcatctactcattaaagtcttctgtgacatcctcagttaatttctgagtcctatatgtatatacaaatctgtgttcatatctctgttataagcacttaatctgtttatgcttagctgtcactattttgtttccccagacctaagcatacttactaagcttatggtttagcatgcttgaatgaataagcatatgtatttggactacactttttaattggacagttttgtttctgtaattttaatcatttcaaggaagaatttaaaaagttatttgtaaggctggattgttgctctaaattgattttgcttttctcataggttcaagtaaaaaaacagctgagagaaacaaaagacaagaaaaatgaaaactcatttgagaaacaggtctcctgtcatgaaaattctaaaagctgtataaggttagtgattaactttagaagtggaatgcaaatgagtggaacagaagttaactagtacaaaaaaggtattaaaaaaatgaagtggggtttaaatgtatttaatcacttattcaaaagcaca

SEQ ID NO: 9345 - DNA, 2300 bp, Homo sapien
agagagactgtaacttgctcgagtttattaaaaagatacgaaagtagcacagtaaattcatggcctctatacatcttagtttttacgaaaaaacaaattttcatttattaccacataacctttttttaatgtttctctaaatttacctttaaaataggaataaaaaacattttgaagcttttgtaaaaataggaagcactagaaatattacacttttaattttatttatctatgtttcagagatgggatctcactctgttgcctaggctgcagtacagtggtgtgatcatggcttactacagcctcgaactcctaggctcaagggatcctcctgccttggcctctcaaagtgttggcattacaggcatgcaccaccatgctcagccagatttcaacttttaaatatttttgaaaaccataaatgtagcattaatataatctcttaagaaatttcatacagggtatgccactgggataaacagcaatggttatgatgttaagttcttcgaactagacaatgcattattaaaaaatatatgaacttctttgttgctgaagcaaaccttcttaaggtcaagttttctatagggaaagtaatagcctcctaaatccatagtacttaaaagtaggctgaactggcttcttccagtctgaaccaatttaatatagtaaggtcacatttcctaattcagatgtggtaaagcttttttcccattgaagcccacttaaaagagaaagaaaatagtaactcagcccatattttggctgctcccaaagtgacttgtgagctttgtgaaaatgtgttaaatgatcaaggaccatacacaatctgctctacttttacttgtataagcatgtcttgatacgtggtaaaacccagaaaggcaaagatcacattttttacataggaataatatatctagtttccattactatctttgctctttgagactattgctattagattgttaaaattccgttttatttttgtaaccataggtattaataatatcaccttttggtacgctctttgcagagttttccctcctaccctaatagaaaatacatttcatcttaaattctttaaataatgtaaacccattcttacacaaatatttagtagttttatcagagaaactcttagagttgatgcacaggaattttaaaaggacaggaaataaagcaagataatgttgacttataatcatagtatcacttaaggaccaatttccttaataaataaagagcacctataactcaatttgaaaaagagtagcaacttaataagaacctaagcaaagaacttgaataggcagcttaaagaaaaggaactttggatagtccttaaaaataggaaaatgtgctcaaccttactcctataaaaggaaatgtaaagtaaaaaactcttattcatattattctgttaaggataaggcagctctgaattactaatatgaatcaatcttaagtttatatattaaaaagatacacatatatgcatatgcaatggatatccacaaaaggttatgtaagaaactgcctctggagtggccatctaggtggctgaggggaggggtgaaggagtacttcattttcttcatatctttcaaatgtttttattgctggcacaactgcctatttaatgtaactaatttggggggaaaatattaagtcatagaatattaaaatttgtgaggaacctttcggagccatttggagtggcccaagtttagtgtaacagccagctttacatcacagaactactgctgtcagcccaactcatctttcactatactagtagttctcaaccgggcagcatatcttaatgggattttaataacagattctgtctcgttcatcattgtattccaactatctagcatacaggaggtattcagtaaatgtttgaatgaatgaaacaaatttaaggtataaaaatatttttttctttcgaagatagagataaaaataattttatggaaaatttataattgtatttataattttgatctaaagaaacatttgtaaagatataatttgttaatcacttttcagacactggcttcatgtcctattgaccgtaaaccttttcaggcagtgtttaaattcagtgcattggaaggttatgttaaggtaagtctttttattctgcaacatgaattatataaaaattaattgaagctgtttgactttgatttccagtttgtgtatatttgaaaattgttcaacttaaggtttaatatgttattttaatcctccttagcatgataaatttatacctttcaactaatatacttaaa

SEQ ID NO: 9346 - DNA, 2300 bp, Homo sapien
tatagattttttaaaatataaaacatacacagaagcatgttgcaccaggagtccatatcaggagttacactctctagagtgaatcctagagattgtatacataaaaaagctacacccttattctgttggatggctcataaatgttgatctggttatagctttccacactaattttcactatttctcttaacaatcatcctttataatcattctttatatccaaatagtatatatcctttactatttgctctgattttgacagggaaaggtccttcataagaattttgttgttccatcagaagaaagcattttaacgcctctagctcattttcccctcaaatatcccaaatacagtaaagccacctaaattcccaaaccccatatcaaaaacagtacactgaaaaactccaaagactttgacagcgacaagaccgccattcatgtgttccttcagcaagtgccagacgctgttatgaaagtgataagacactgtcccaatcctcacagtgtgagacagtgagcagactcaacagaatgcataggatgaaagtgccagaaaagcgacgtcctcagggcgggagcaggggacgccgcaacgtagtctgcgagaatgcaggaaggcggcagtgaagcggtcggtcggcggggccgcggcaaagtggggaggaaactcatcccgggcaggcgtcagggtggctggagagcgcagcacgcgcgaacagaacgggggcaggcgacaggaaaacgtgtgagcgcgcggctgaaagcgactgggacctgggtgagccgcgcgcggggagcagagcttagtcctgcgggagccgcaagcaggacaagggcgtgggtgggaggactggaaggtcagctggtagatgggggacactgagggcaggcagagcaaccggaagcttgctgcagtcgacgagaagagaaactaggaggttaaataatcagtgactttgaaaaagtcaaaatacctccgaggtaaaacaaaacatttaacaacccgccgggggaaaaagtggaggatggcacacacgtcactatctaaccacaacgcggaggccttttaagtaaataatgataaagtttttgttgttgtttgagacagggtctcgctctgtcgcccaggctggagtgcagtggaacgatctcggctcactgcaacctccgcctcccgggttcaagcgattctcccacctcatcttcccgaggagctgggaccgcaggtgcgcgccaccacggccggttaattttattttttgtagaaacgagatcttaatacgtcgctcaagctggtctcgaactgctgagctcaagcgatccgccagcctcggcctcccaaagcgctgggattaccggcgtgagccaccgcgcacctggcccaaatttaattttgtgatgtggggttaagacatgggaaagcccctaggctcggggagtcaggcgggaaagctctccccctggcatctaaaaaaatgcccaccagaaaggaggaaaggtgggcttccaaattgccgactcttcactccacaggctgcatttcaggtgggcagcgcagccaggtgaacactcaatccaccgcaaacatgcggacactcttttcaatatcagattaccataaagataaggagcacaccctgcgcaaaatccttcctgtccagttcccttaaagcctctttcattgtcctccgcgacgcagcctgtaaaactgccaaaggagggcagaggccaaagtccacgcgctgcgcatgcgcaccatccgcagtgtgggcgaagggcggtgctggaaggacgtttcccagaaggcccctccagcgcagctgcccttcctcccgctcacaggccgcgtgacgtgactccacccaccacgcttctcggtctcaaacagcagtttgccagcgcccccctgcggcccaactgggtactacgaacatgcactcagggccagagcgagcgagtaagcagaatgtggcgagtccggctgccgccgtcgtcaccttagcgcgccgacagcgagggaagggaggaggagggagacgcgcagggaggggaggggagggaggaggctagacaaggcgggggaagggggagtagcggtggcttaagccgcgcggagcagcgcaacctgggtcgctccctgcttcgccgccgcctccggaccgagccagcggagtcagtgtcctagagaccctgtaacaccacaaagcggacgaaggagtccatgttggggaacttggcagcggagtgactgggacctgggaacctactgtggggccgcggccggaccgagcgcctcg

SEQ ID NO: 9347 - DNA, 2300 bp, Homo sapien
aaactattttttcctcacgtggatattgtatatttggtcatgttttccttacatgaattttaaaatttacatcacccctttttgttgagacagggtctcgctctgtcacccaggctggagtgtggtggtgtgatcacagctcactgcatccctgacctcccaggctcaagcaatccttccagtgcacgccaccacagctggtcatttttttaattttatttttagtagaaactaggtctcactatgttgctcagacagtatgtcctttgaattcacacatttttattgccataaaaatgccagagatcattaaaataaaaatgtcctcttatagaaactaaagaccaaaaagttaggtgatttattcaaaactgaaaaggtgttaagtgacagtattagaaccatgtttttcttttttttctttttctttttttttttttttgagatggagtcttactctgtcacccaggctggagtgcagtagcgccatctcggctcactgcaacctccgcctcccaggttcaagtgattctcctgcctcagcctcctgagtagctagtagctgggattacaggcacatgccaccatgcgggctaatttttgtattttcagtagagatggggtttcaccatgttggccagtctggtctcgaactcctgaccttaagtgatccaaccacctcagcctcccaaagtgctggaattacaagcatgagccaccatgcctggccagaaccatgtttttcaatccagtatatttacagcatgatttcctcccttaatttgaacttgatattgtattctatttataagttaaattaaaatagcagttatttctgaaaaagctccatcaaaatcaatacgttgattacccatttttaaacgtgccactgtgggtttctgttgctatgtgacaggactgatattttaagtgcctggtaaagtgcaacacaccaagtggacattcagtttaaggctgttttatgatgcatatcatttgtgctttttacagttaaaatcaaatctaaaatgttgacaatgatggttcatatatcaactttactcctccattttatagcccatcttttattgatttagaactctgtacctctttattatattgtaaatttaaaaaatatgaaaacatcagagagaataataaatctttacatccaaacataataaggaggatgctgcatatacagaaatacacatgaacttttctctggaaagaatggcctattacaaaccaccactctcttctatttgcacatgaaggtagaaaccacagtggcattaagagcatttttccttaagacatgctcacatgatatctaggaggccaacagtaagaacgtgaaaacttaattctctgctaggaaacaaatacatcaaaagatctggtatttttagttttgatgaaactatactgttattatcaatttaaaatagttttctatttggcagattttatcatttgggcttaaattttgagaaaaaacactttcctaaaacaaaactgagatttttaaaaatatatttagattttaaatatatatagattttttaaaatataaaacatacacagaagcatgttgcaccaggagtccatatcaggagttacactctctagagtgaatcctagagattgtatacataaaaaagctacacccttattctgttggatggctcataaatgttgatctggttatagctttccacactaattttcactatttctcttaacaatcatcctttataatcattctttatatccaaatagtatatatcctttactatttgctctgattttgacagggaaaggtccttcataagaattttgttgttccatcagaagaaagcattttaacgcctctagctcattttcccctcaaatatcccaaatacagtaaagccacctaaattcccaaaccccatatcaaaaacagtacactgaaaaactccaaagactttgacagcgacaagaccgccattcatgtgttccttcagcaagtgccagacgctgttatgaaagtgataagacactgtcccaatcctcacagtgtgagacagtgagcagactcaacagaatgcataggatgaaagtgccagaaaagcgacgtcctcagggcgggagcaggggacgccgcaacgtagtctgcgagaatgcaggaaggcggcagtgaagcggtcggtcggcggggccgcggcaaagtggggaggaaactcatcccgggcaggcgtcagggtggctggagagcgcagcacgcgcgaacagaacgggggcaggcgacaggaaaa

SEQ ID NO: 9348 - DNA, 2300 bp, Homo sapien
tccttcaaatttgtgctcataattaatattcaggttccctctccccgctttcatagatcccaaagtttgagaaatgcagcaattcaattgtgaaaaaaacattcttctccccagcttctgttttcatatgtactgtgtagtggtatcagtgttaaaaatggaagatcattatgaagaaacaatttgtcatttgggtatatctgtttctataggacaaggatttgtgtctaaatattccttacttgtatctcagaggactatctgttaaataattgatcttaatgccagcataagaaatcaagggaactatttctcagacatttctttctctaaattaagtagggtttcaggttccaagtttacattgagagaactatgttacctgggagagaatgtaaatttttctaattcccaaacaaaaccactaatttctaggaaacatttattgtttatatgcagatcctagagacttctatttcagtgcagatcaacaacttcaaaaatatacagcctcctatttatttacaataatatttacatacaaatgaagtatttcctgcaataagcctcagctgcatagattcttcctttaaaaacgtaaatttgagcctgtatacagatgggcccagtttcatagcccttccttagataaaagcctaaagaaggaaaatgtctgcaccttgtgaactttacatattttgcaagaactttctctttgagatttagtgatagtttttagttgttagacaccccaccttcagcttgtacctgaaagctttatctcgttataaataattcactgtaatttaggggaagtatgtcctgttgctaaaggattctcaaacctgccatccccaaggaaaatcatgtattagtattgctaaatgatggtctgtatattctttgttttgaaggtggctagatgtttgctgtaaacttgaatgggagaattatattcttaaagtttacaccccctataagcctaaagccatttaaattgataaactgagagagactaatagattttgctctaaggtataaaatccattatctgatcatattcctgacctccccccgactccaactaaatgtgccatagtccaacactgtgcctcactgaattggaactcagtatttcattcttttgagagcagtttgtagctccttaagcagagcagacctttcagtagagaattcgctttaaaaggaggacaggattatcaccacacgattaacacaaacactggagaacttctgacacaaattcagtatttcttctaagtctgcatttacaaagggtcttttattttaatttctttcacaactgcctcgccccaaccaaagcctcactttcatttcctcacagctttaaaaaataaaatattatcatgcctcagcccgaggtaacaccgagtgcaggcagcctgtgtttaggaatttgcacctgcgctgctattttcaacgagaaggggataaccaggtggcagcgctggattcactcactttcttgccattgcagagacccctgccgccaggctcctttcctcccctccctaaagcctggctcctgtatgttgcaccatgagtcctaggaatcatctggtgagggaggactaatgggaagtaaaagggagactcattggcttagggtggttctcaaacttgatgcgctttagaatcatttgctgagtccctccctgagagcttctgacttcaccatgtctgggagggggctgagaatctgcattctaatgaggtccccgatgatgctgatgctactggtctaggggccacactttgagaaccactggcttagaggcatgaatcaagctctagaaagcagtcagttccagggtaatagtcttaggtgctcgccgaagcactgaggaatcttaccacaaccctgtgtccaccacaagccctatcaccatcacccatctgggtgcttctttttctcaacagggtctgtaactgtaaaaaaggaaagtgggtggagaggtttttttttcccccttttttcttgttttctaacctcccagcttattcctggagagttaaaacacagttactagcactaaaaacattaaaagtgctgcgcgctggcctcaatgactggtacattggagaagctatgcagcagcatccttttctgtggtgggcagggcaggagatgaaccataggagccaaaagtcagacaaacagaagaaggcacaccaagcctgaaccctccggacaacagcagagttaccagctgagggatgtccctggaggtttctgacccatgagaggccccctcacc

SEQ ID NO: 9349 - DNA, 2300 bp, Homo sapien
aactgttactcagattctaatgagcacttctttatttggtaggacatttttgttgaggattttaaagcagggatgactaataggttccaaaatttggatactattaacaaatagtgttaaccatacaaataaacctttgcccttctaaactgtaatgccagaatatattcttttctagatattacaataagatttattttctttgctttagggtacttttgacttcagtgacattgctgtctatatattcaataaacctcctattgatctgttcaaaagaaacaggtaagctgaggacgtgtttgattttgttaaaaccagggtgaattatttttatggtagcattgtggaacaatgatgttctctctgtacagcaatttgattattaaaaagaaagactattttgacctagagtgattggaagacctatagtagtatttatctagagaaacagttgcagcaaaatataaattaaattgtcatggacaatgagaaaataatgttgtcacttaaagtgaaccctcaattatacctgtttttctggtttaaaatgacttcattttaaaagcttgtttttccttaggtctttataaatccagaacaaagatcccatgtttttatattataacttccaaggttttaaaagtaaacagacctgtcattctcttgtgcatattccaaggagaaagtgttactcctgaggcaatgtgggagtgagcaagctatgaagagacttcaagtactctgggcagtgtaatacctgaagtgtttattttctatttctgggacactggattatgtttgtaattctttgacttttacattaactaaaaccacattggtcaactattattgtatatacatgactccatttaactggaacattttataataaattgaggagctaaccattgtctagtttaaacaccagtcttatgagagattaaacaaaggtttaattatagcctgtcccatattgctctccgtgaaccttttgaaaacatgaactgaacagttataaagaaatataaacactttttaaaaagtgaatgctttagagtttcagtatttattgagatgagctagtcgaacactttcaaattttgctacagacaaattatgcttttgacagattagtcttctgctctcttttgtgagttgcatgtatttgaactacattttatgaataattaggttttgtatgtcgtggctattaaaatgtttctaagcttgttattacatttagaacgtggaggcattgatgggatgttattaagataattccttgtttgcctaatcagttcaggtcattaattcaaaaggaatctttttgtttcaactattaggatctttttaaatcaaatatgtattttaatggtgtacaccagacctgaagaaaaagatcacagaaggaatttcccctttgtaagatagaggtagttaaaaataagccttatgacctaataggttaattgtaatgctctggtagccaacttgaaaaaggagaaatgatggttgcatctcacattttaaaatgttaagaatttgttttgtaatgaggataccttaacccctgaaggccaaaatgactatttgtgtgagtttgagaaaggcacatagtaacttggggaacagtcaatagaatgacaaaatcttgactattttaactttctgaaccctgtcatttcttgtgttctcaaatttgatttttaaataggctgcatggtgtatgaaaagctgggggaacaagtctttggcaccacagggaagttcgtaatctttggagccacctctctacagaacactggaggtaaaaagaacatgcttttctttacataacttgaaactaattctggtggatgagcggccacatgaattttaacataattcaagcagttatcatcctcattgctaaaatggcacagggaaagtaaagcagagacagcagtcacttatttaaagccacaaatcctgctagagtagctgaagttgcctttgtgtcttactgacagttggtctaagaacgggctgataactttttatgtagcttgcaacataagccttcgtatcttctttctaaaaatgttctcattttccttcagcaatgctgagctacctcttcatcgtaaaaaatgaactaccctctgccataaagtttctaatgggaaaggaagagacattttcgtaagttatagaccatttttttatgatataactaaaatgtttttaatttaaatatgggccaatcaaaattcttgcttgtgaatattgcagaaagtttttcctaggctgcgttttgt

SEQ ID NO: 9350 - DNA, 2300 bp, Homo sapien
gagactctgtctcagaaaaaagtttattaaaatctaatgtacagtttaaataggcatgcatcattgcttcattaaactagtccagttcaagtggttttatatttattaatgcaaaattcactgtcatttgttctaaccatgatcaggtaattgaatttccagactagaagagccaaaaagcatccttaacatatcttactaatatatgcagcagtttgcctatgcctggacttttaatttcatttaattttttatttttatagatttaggaggtacaagtccagttgtgttacacaaatataatacatagtggtgaagtttgggcttttaaaatagtaaacgttgtacccattggatagtgtttcatcccttgccccctcccaccttccccttctttggagtctccagtgtctattatttcactctctatgtccacgtgtacccgttgtttagctcccacttatgagtaagaacattcaggttttgatgttctgtttctgagtcatttcatatagaccttcagctctacccacgttgctgcaaaagacatgattttattatttgttatggtgacatagtattccgtggtatacatctacactacattttctttatctagtcatctgttgatggacacttaggttgattccatgactttgctatggtgaatagtgctgtgataaatatatgaatgcaggtatttttttgatataatagtttcctttcctttgggtagatacccagtagtgggattgctagatggaatggtgttctatttttagttctttgaggaatcttcatactgttttccatagagactgtcttaatttaagttcccaccaatggtgtataagcattcctttttttccacatcctcgccaacatctgctgttggagttttctttgacaaaatcatttgttggataatttttttaaattagaaatttaggctataaagttttgatactcaccctgaatatatttgatgattcttaaagaaagcattttaaattcttacttctgtatatttgtacatcatttactccatttagcctggctgaattgttcccatctcaagtcctattttccccatggagaagactgtctaacatctattgctgttactctgtgccaggtgctggactgatgtttaacatgtactctctcatttaagtctcccaataacttgataagatgatgtaatagtgttaacttctgtttcccagatgaggaaactagggtagcatgctcaggccctcagagatagtgaggatttgaattcaagttctaagtcccttgctttctcaaagccttggctctgaccctcaccatcgaccatatgccttgcctcccaccgtaatttcctagtctgaactcctgtagcctcctgtttgcatcacttattacctacccccgtgtctccccagtgcctgttccagtgacttgcatatagcaggcgctgaaggaatgtctgacggtgaaacagttcttttcttttctgcaagggagagggaatttctatttaacaattttgtagtccaagaacctgagctcaaaagaaaacttgcctctagtatccttttaaataccaggtttatagtagtcttgatattatctaattttccacttagggaaaaactatacaaaaattaatttatgttgcatatagtgtttaaatttattattaaaatgattcaaaatgtatagctgtttttgacttacggttgtctttcatttcatctcaagatgagcacctgttattggcattgttttgtacaaggtagagtgcaggatataaaaatgaatgaggcaaagtgcctgcccttggggcacttatagtttatttggtaaaacgagaatatagacaactcataatggcaaaagaaaaaaaggtggggggagttggtggttgaatagggctgtaaactcttagagagctgattggtaactgttcatgtatgttttgatgagtaacatatcatttagtaaagatgtcaagcttcaaatcattatcataaggttaaatatattacgcatgtctttacagcaagtttatttctgatcgtgaaagtagaagaagtctcacaaacagccatttggaaaaaaagaagtgtgatgagtatgtaagtatcattataatgaagtatgcttatttttttaatcatataaattgggacaaatctttttaattcaagtagcatagtaccaaaagcataactacctgtattcaccaggatattcctcataccttatgtattttctcttgaaatccattcaaggaaataactagataactaaga

SEQ ID NO: 9351 - DNA, 2300 bp, Homo sapien
gagaaaagtctccttaacccagattggaaatgccatccgctgaattaactttctatcagccctgtaatatcacttcagtagcctgggatgtagtcacacaagagggagtcagtgtggcaagacttttagaaattacccagtctagcccatttggacagctttcatcaaagagggccaaggggtaagagtggggttcaaccattttaattcatttcagcttttgcaacataaggcagatggtaaaacatcaccactgcatgaaggtaccagaaacaatcagaaatgggccgtctctagcaccaccactgtggttagaggaatcagcctcagaccaggagtcatgaggtcaaatctccctgtcctggctctcctccttcttgaggaagtgccttgccctgaagacaagacaaggttcctagaatctgagatgttataaacatgtgtatattatggcacattacaggatcctgaaaccagggaagttttattctagataggagactgtgtgaatgaaaagaataatgtgtggcctggctgtggaaagaggaaaagagggggatacctggaaaagttatcattctaaggcactttctgtgggtcttcaaaataatagaaattagtaagatgcttcttgaaatattacttagttgggcgcattgaggtttgacccttaactaggctatagccatcttatggaatttaggatcagacaaaattcaaaacattgtccaaggggatttgctaatgacattttttttaaaaaaaaccagctcattgacattctgcttgattccatggtccccatcactttgctgagagtatcacggtgaggctccccatgcattatacgccttgcttttgaagttgcatttgcctctgtggccatctgctttttagacaagattgggcacattcagggtggcatggccatagacaagccatctgctttttaattcgtgaggctgctgtgcccccaaaattctttttctccctccctacttactatgggtgatccctcagaaacttaaaccacagtcatccatatgggagaaaatgtgaactctggaggtttttcatttctgatgagtaatatagtagcagttggattaaaccaaatcctttgagtatgagtttttaattccctaattccctgacataaagtgatttcattgaagagattgatttaatctcttgcagttgatggatacactacttgcaaaatttcaaaacataaatttgttgtttactggttgactaccagggttgcgtgcttgatcccaggatttgcatttttctttaagctgggattgctaaaccgaaggtgcttttgtgtctgtgcagtctgtaccagctatgtgtgtgctctgcgatctgacacattaaaataactgaatcactttcattttaaaagcactgcttcaggccgggtgcggtggctcacgcctgtaatttgaacactttgggaggctgaggagggcggatcacctgaggtcagtagtttgagaccagcctgaccaacatggagaaacctgtctctactaaaaatacaaaaatttgccaggcgtggtggcgcatgcctgtaatcacagctacttgggaggctgaggcaggagaatcgcttgaaccagggaagcagaggttgcagtgagccgagactgtgccattacactccagcctgggcaacaagagcgagactccatctcaaagaacaacaacaacactgcttcatatcataaaagggggtctctgttacctacagctaacatgatattcttataaacctgatcagtaagattatggggcatgattcactgtatagttaaaaatggaaggaaatctataaaaggcataaaatttagatacacctccataacttgatagacaaagattgctttaatgcatctagtagcaacatgtaaaattgtataatcagtaaattaactacttgtttatttgtggtaatttatttttaatcagtagcgtttcatatgtttagttatttttttattttgctatattttaggggtgtcaagcttccattttggtatctacttctaaatacactcagaacaggagaaatttggactaattttcaaactacagacactttctaatcatgatgcatttcaaaagtggactcgaattaactgagttgcaaaacatgacagtgcccgaggatgataacattagcaatgactccaatgatttcaccgaagtagaaaatggtcagataaataggtgagtatttttccactaacatttctatccagtgaaagaaatggctcgtggctcacacctgt

SEQ ID NO: 9352 - DNA, 2300 bp, Homo sapien
gagggtaaaaaccccggaagggcggacacctccacatcgccttttgccacctttccctttatttccggaggtaaggtgattatccgttcccggggagggctgggcgagcggcaaggggagatttagatgtcggaggaggaggtaacgtagaaatcatctctgcgggcgtgaaagcagagagagctcggctgtgcccgatgctttcggatgttgcttttaggagaggaaaagtccaggtctcctgtgcttcccgaacgcacgcggcagcgggaggaagcgccagggcccccgagttcacctttgcgtgggctgtggcttactttttggtttgttttcctgtgactttggtgtgttttcctgtggctgtggcagagtgtggtaccagatctggttccatttttacgagagccaggaaccacgcacgtctggagggagagcgcagctgacccgagggcgcgaccgtgttctgggagtgtttgaatccccggcctttggtgaaaatttcctgtgtccgcaaggcccagaggagatcgtgtgatgtccggggggtgctgcgtgcggccggctgggtagcggccgcggaccaccactaaaccggggcatgtttgccgtccttcctggtgctctgcccctctgtaacgcggggaagtaggagggcgcggggagaaattactaaaggatgcttgcagtgactcactgtcctttcctgccctgaagaggattttctaaaatgcagagggtggcaggggacagaggtagtgttttttcgagagccgggatgtgctggagccagcgaacaaaaggccacctcttgcgcggtcttgggcgcagactgctctcgcttccagtcccacctcctccccaacccccggcacctagttcgcgtccctaaacgttgccgcagaggcctttaaacgcgtgggtcggtgccgggaggagagcgcatcttcgcccttgtgcgagccccttgccccctaaattatccacctcctggcgcatggggctccccagcacccactgggacccagtaggttacccggctgcctgggcaccgtttgcctgccaaatcgcccgcctgaggtttgtgctgaactgtagttagagaaggcacaagtgcatatggcagcaaaaggaatttcgcggtacccgcgtcacgccgctcccagtgcctttcacaggctgccttgggctggggaaggtggtgctacaattcagagtcctttgtcttgctctgcggcgcggacccggggtttgtacaaaccctcgttctctgttagaaacctaactgccgccaggatcacgtactttctcggacgaatccgcggtgatgtgtgtagcaaaagtgaaaaaagacgcctctgctagaaaacggtatttatttgcgtttggaaggggttttgacctctctgcagtgggtttttacatttttcaatataagggggaggaggaaaataaatttatggtttgcagaatgcagggcccagcgagggtgtaatttgtcaccttgataaaagaaactgtgcagcaactcgtgctttttctgacgtcagaaggacaacggaaataaaacctgagctcggtgcatggctggcctcgttgtcaaatgtctcatgccaatttggtactcccgaaatcttgcaaaacagccaattccggggtactgacctggtgtggaccccctggattttggttcgaccccagcctcaaaatggcctttctcttgagagtcactcgatttctcagtatgtcgctgtaagcaattggaaactggaatagtttggtttgaggtcttaatcttgaggtttattcgctttttaaaaaaatgtggccaataaacattttctacagagggcttactgtgcgactggcagcaactaacaagatttgtttcaccttctatgaagcttccgttctcagggggaaatagactatataaatgtaggcatatacatttcaggtattcttagtgcaatgaagaaataaaacaggatcatgtgatgggggaggatgcttgaaatagagtgactcaccgggaggggcggtgtgagggtataacatttgtcctcagacccgaatgatgaaaagggatcagctatttccataattgagggaagaaggccagcggaaggaacaggaagaaggaacagcaagtacttattgcactcttctttgactgtaatataattgaacagatagatgaatagattttaaaggtgttttggagctttaaacctatatgtatgttgtttatgtatattttttatgatgcttcatgaattaaggccatttaatgaaaggag

SEQ ID NO: 9353 - DNA, 2300 bp, Homo sapien
agggaatcgcttccccttcactaattactgtcttaggtgaacatggccaattcaactttgtacttgttttcttaaagaggataatacccaactgagggattgaaagctttaaatgagatatttacatgtaaagtccttagcacaatagctgccatatcataggagctcagttcataactgttgattccaattcaaaaagtgctaaataactgcagtcgttttgatatacagaaactagcaagtaagttaaaattggaaccaaaagacaagcttggttcagataatctccaaacagcgatgaatacacattctgcctttaataaggtaaatattccaacaggcctattaagctatggctcacagttcatctactttacctattcagatttcttaccttattgataagaattatttgtgccaggcaaggtgcacactacttaaaatcattaatttcacaataaattagcttcctctagtaaggtagaaagaaccaactttttgatgacctatagaatattgctatgttgtgtgtactcttctcccctttttcacaaatttagaaaacaggattaggacaaaagtaaagcagatgagggaagcagtaagtgtcagaggaagaaattgaatgcaggtctgtctgagctaggctgcccatgtgtttgcccttttggtttgctctgaactttctgtttttcagtatttctcaagagcatgccttctaaataggattctcaggaagccactgttgaactaataaaggccatttactgccattcgaagggaataagaagtttagtccgtgatgagtttcaaatttggttatcatcttgcttttccagtggtgatgaaaaagcaaaattcacccaaatacaatgactactgtctacttgaaacgctccaggtagttaatttttgaattatgattcaccttccctttcctgttttgatgaaccatgaacaggagactgaaccttccctatcaataaaaagctcgcgtttccaccctgcaaattcgcgctatgacagtctaattggctgaggcgcaggtgggatttcctgtcgccattttaagacacaactcctctgcaagcaagtgcccagccagtgaaagggggctgtgtctgaaacaaagagtaagcgggaaaaaagggaaccaggcccagttgcccctgctcccctccatgccgctccctcgtcccccggacttggagcgccccagctccgttaacctggacgcaccaggtccttcggtcgggaccacgtggggtctccaggccctccaagagctggcccccggctctttgcgcctaggccggtgctttctcggtgctcagcaaatccttctggttcacctcacacccagtccccaaagcagagctccacagggcagatctcaggaagggctgaccaggtctgcgggtgctggatccggaagaggggaggtgcctcccgcttcaggttagggacaaagggtttttaaaggtgcccgagctccccgccgcccctgccacttcggtccccttcccgccaacccgggccatctgcaggctgtgcccagggccagccctccgctccaacgctgcccgtagtcccaggcgctgcccgcggctctccgggctgcgctcggacctgccactcccgcggccatcctcatgctgcgcccttcccacaatgcaactccctcgctccttcggccccggcggggctctggcgtacccaaaatgcaggccccagcggaacgcacagccctcctgtcctccgccggtgcccctttagccgccccacccccatccctaagggctctcattctccagctgcagccgcagctgggttccgaacacgccgccgggccccgggagggagaggggcaggtgccagggcggcgcgcagcctctgctcccggtgccagcttcagtgcgccgggcacacgcgcgccccgcaacccctccctcaccctttccccgttgctcaatctccgccagccgcggtcgctgcatcgtcagagagctgcaagagggaggcagcaaggtgcggccgccagcagtgacaccatgtgaccggcacggctcactgacacgcagctttggttaaagagcgggcgcacaggaggggaggagaccgcgcgcgggacggggaggaatggcctgtccgcgttaaaccatcacaagccatggttgcggaagggccacgcgtcccccagtaggagaatgactccgattcgtgaccctcagcgccggtgcatgtcgatgtaagtgcgaggccggcgagcagagtgtgagtgggggttggtggtgagggga

SEQ ID NO: 9354 - DNA, 2300 bp, Homo sapien
tttgaagactgccaatgaaggaggtatgatagcattcttgatttttctaaaacaatgtatacctatcattttatttctcttttaaaatccttggcttcatgcttctgtcttcaaattgtagggtctttattatatgaacaattgggatataaggcatttggattagttggaaagcttgcagcatctggatcaattacaatgcagaacattggaggtaagaatttttcaaaagattatttgggtagactttatgctcattgtggagcacagaatggtgacacatgcgttttagtgtcacgtgccgcgttttgcacttgtaatggtataattttgttttcctccagctatgtcaagctacctcttcatagtgaaatatgagttgcctttggtgatccaggcattaacgaacattgaagataaaactgggtaggtgctaagtaaggttactcataagaaacaattatagtcaaaagtggttagatacatttttatcaaagttgtatacaaaatgattagttaattatccataaatgttccttttgaaactgaccaagaaggccccccatccccgtaaactgattcgaactttggagaaggaaaggccgaaagatagtagctagccctacaattttggatatcttaatttctaaaacaggttttctagaacttgctttctgtctttatgttcatacttaaagaagttataggtgtttttaatatatatcctaagtgaggactgaagctttgaattacattaaaaattaatccgtcttatttttgtaagtttggaattcttaagacttaatctgttcaatgcaaaatacaggctggacatccctaatctgaaatccaaaactttttgagtgccaacatgacactacaagtggaaaatccacacctgatctcgtgacaggtgtgcaaaattaattaaaatactgtataaaatcacctttaggctatgggtttaagaaggtgtataggaaacataagtgaattttgtgtttagacttcagtgccatctccaagatacttcaaatatgtatgtgcaggtactccaaagtccaaaacacttcggtcccaagcattttgaataagggatactcaacatgtgccagaaaatgtttgggcatgctatagaaaccattttcttctagcaaagttactcatcccagtgaactcacaggtatttatctaaagtaaacatggggaaggataatttacttcccaccctatgtgcagctcattacgtcaaaatagagaagtgctgttatctcagatgtggctttagaaatttaattttttaagctgatctttaagtgttggtgttctgcagagtgcttactgctgaagtgaacagaattcatgaggcaattagaatttgaaaatagtgatttagaagacagtgcaattcatgatttacctaaaaagaaaaaggcttagaggatatacataatgttttctaaagttcaaaagggatatttttggctgtctttggagttaaaggtgggtcaagatgtcacaacatactctgataacctggaataagtcctggtttgggggactgagttttataattttttttatggggggggcagtttgcctgtgcattttatgaaaacgtttcctcattgaaatatttaataatatttgctaacgcatctggaaaaaaacttgttttaaaattttttagtttccagcattagaaattacatgctaaagctgtaccaaagttggtgtacaatttttctgaaagtgcttaaagataagattactggcttaacaaacaagctttgttccctgcattagtatcaagtctttgagaagcattttgtgttatgaatcagctggcagccttcccagagcaagtagtgggacaaaagttacactgttttatacccgacttctaacctgagtaaatgttcatctagcacacaaaattaaaaagttattcctatcttgaacaggggaaactttttccaaacatgtcttttttgtgtgtttgttttcatggtattcctatgaaatgagtcctgttagaagatgtgtatatttttcagaggatatttgtgactgttttgaccttgtttctgttttctttagattgtggtatctgaacgggaactatttggttctgttggtgtcattggtggtcattcttcctttgtcgctgtttagaaatttaggtgagcaaactcatctctaaagagaattgaaatgagcctctcaccagttagttgggctttctctgaatagaaattaatcagaatgaaaaagccctagaaagtagaaaggtatatctt

SEQ ID NO: 9355 - DNA, 2300 bp, Homo sapien
agcatctagtactcaaagccaggcttaacctcagtgtggaatttcacaaagcagagatttgcaaaggtctgcttttcttttcatgaacattctatcgtgctggagaaaataacttgagtagaaggcaccaatcagctaagtaaaacacatctgtcacaaagggacaattccatgctatatacatatggtttccttatctgtacaatgaaggtattaagttacacaatcctccacagaaattgccttagccaggggtccacgggtacttaaacttaagggctatgacacaaacatcactgaaaaatacatgcttaagattgcatgtatttttgttttgtgctttttccctggaaataagatccacatttttctatcatattctccaagagtcagtgacgcaaaaatggctaagaaccactgctctgaagtcttctgtacctccaagagtctatccacgtatttatgctggaaagcacagaagtaattaagtctaactgtgcaactgtggggggaaccatttaaaaataagtacttactaaagtattcattttttgccacaacatgtggcaatcgaacaggtctgacaaaagcaaacattaaaaaaacatgtatggattgcttttcagggtccagaaaattatgacctcctcgtcttaaaacaaacatgttccaggctgggtaaataccaccacaccttgtatgtttagagaaattttcttttccttattcacgtaaggggccacaggtccttaagaactgtgtcgatttaccaaaatgatttggagcttattaggattttcagcttctgatttgccaaaacaaaatttatacctaccctggctttagccatagtttttttaatatctaccatctgttacaattttgttttaactattcccactgacttagaagacttctggcttaatttgtcagttttaaggactgccctatttttttctagttggctttcttgatattgtgcagtatgtagtagaataaagagattttttggggtttctcatacttttaattttaagcaagtaacttttgagtcagctactccaactgtaaattcagtttctggagccaaaatatgttttaccatagtaactgccctgcatggcagactcactacttacacatacttacataaaaagagcaattccagtattagccatggcataagaaagcccaaggattccactgcccacaatcgcattgctcagattaaatactgacattccaaaggaagtagtacctggatgctacatagagggaaaacgataaccaaacatataacaataattaaatggagaaaaccagctttgggcaagttagatttgaattctaaaagtaaaactattcttttactccataaagccactgacagacaaattactatttttaacttacaaattctgtttcatacttcttcttccccaaattcgattcaagtaaaaagttctggttttcaggatctacatctgcataatggctgcaaaaaatatagacatatataattgtaaactggattgaaatatctatcattacacacaagactgctttaacataaaataccctccaacagcatagctctgatacaacatctttacttaatgtataaatattaactaggagttgactttcacaccagctatcttgtcattacaacaagataatcggatactctttcagagattacgcaccttctctaaatgctatagcaaattaaagcaatggaagcagagtcctaggtaactccctgaacccaacccatgcaagccgttttttcaaaagtgtcacaacttctcccaccttttcagagcagcttgcttggtggggtaggagtagttgaagtcgctgttggaactgtagctgctgctgtcttcatccggggaaatactgaatcgtcccatttcggccttcttcatgctaagcactgggaggaatcgggtgcagctagtagcgctgggctccttttgtccttggcggtgggtgcagcggcccgcgagtcggcctgcgaaagtagaggcggcgcgtcaggaccgcagcgccagcccgccgcggtcacgtgacgccgcccggaggcgcagcgcggctgattcatcccaggccaggcgagtggaaaagtaccagccgcgcgcgaggggcgggggcgcgccgaggggcggaaaagtacagacggcggagccgcggggagaacaaagatgatgccaccgctgtgttgcggccgtcgaggccccctactccggcagatttcagtatttcaccctctctattgtccctcgtcggagtggagg

SEQ ID NO: 9356 - DNA, 2300 bp, Homo sapien
tgatggagttagcaggcatgcctcagtttggccctcgaaaagaccaatcaaactggcaataaaaacatggaagtttcacccctccacccttctttttttgtcatttactgttcaagttctgatcatacagagaccagatcaatattgcagctcccccccccgcccctgccctccactttgccctcagctgtacaggtattgtgcttctcctaaatatgtgttgcaatacaaaccaccaaaaagtccaaaagacatgagatttacttatagtgccacttgccacccataactaccaaccctgagggcctccttagcacctctaactgggcagaggaaacgaccagagattcatctggaatgaaaaagtggtttaagaccttttgattgttatcagttgaaacctaatataaagaaacttcctgggactcctctctaacctaccactaccaagattgttgtgacaagaagagttgattgattttattggggaatgtatgtggaaggaagatagttttttcagccctaattgtgtgtcaaattccaaacctgcccttggggagttcacaatctttgggcagatgatactacaaatagtctggaacgattttgagtgcatgacagcacggatttttaaaagtccgtcaccatattgttttagaaaatagtacctgcaaaaagagggctgagtacggagggattaaggcatgcggggcgctttcctgtggctcgaagactaagccttgcatgacagcggcatttaaggggatgagaggagattggacaccaaagcaagaatggctattatttaagactggcctgaacagagtagaaggtttgcggtagggaagactggcctgaacagagtagaaggtttggggtagggaacacaggagtgtgatgggggaaatcgggacctcgcttgtcaatcataaacactggtgcaggcgagggcacccgaagcctcacgtgcggcggaaataggcagttgtacggatttcctcagtaaaacattgaaagcaaaaactgcgatcacacccagccctttcctctatgccctgcccaatttctcccaagtccccaaaaggaagagagcagtaggtcaaacttgtttattcattcattccatgaacatttctctctcctaaggggtctttgtttcctgcaagggagtgagtcttgcctttcccgcagcaccaatttttccacagcgaagggtccccctagttgcctggctcagcaagaccacacacatcaccattgaagggaaaggaccaggctccgcagaaagcgcctcagacccgcattcagacaaggcagtgcctttgcccggggcggcggtggtgggataagagaagcaacgtgtcagcgagtggaaaactggggactcccaaacggccttaggagcgccgggctccccactggggcctctttctaaggggcctggcttgctggccaaaaggtagcctttccgctagtccagtttccatggccgtacaaaaagcacatcccgaaaaggagctgctcgccgacctccggctagttttgaagagtgaaagcaggtctaggtggaaaagaaagaacaacaaaccatcaggacaaccttgctgccttggcccaagtttgtgagacaaaacttcactgtaaatcacaaaaataacaatcaagaaagtgtttggtgggagggtggtgtcccccaaaagccttgatgtgtcccccgaaagcaaggactgctggtgactcggacaggagaaaattttaaggagatggctcctcaaagacaaccgcatgtgttgagcaccaaccctggctgaaaaggataggcaggggaagcatctgggggtctttccagactatctagaaagctggagagagtgggcttgggctttgcgggagagtcttgggggcgcctgcgggcggggctgggccgcgggcgcgggccgcagagggaggggcagggaggcggggcctaggtctgggcgggtcggaggcggggcccaggtggtgttgatacacaaagagaaggcgcccgggcggccgcggtcccgcccactgacgcgtccccggggtgccgctataacccgccgctcgcagggctgctccacagccgcgcgacgccgccgccttagaacgcctttccagtactgctagcagcagcccgaccacgcgttaccgcacgctcgcgcctttcccttgacacggcggacgccggaggattggggcggcaatttgtcttttccttttttattaaaattatttttcctgcctgttgttggatttggggaaattttttgtttgttttt

SEQ ID NO: 9357 - DNA, 2300 bp, Homo sapien
gtgcaacagcgtgtccccagggctcaggacagttgtttgtcctagagctatgggagttattgagctaagcaatacttgttaaaagcatgagcttacacaattgatcagccatgtcttgttaggatgtactgaattggaatttagcagaaactgggagagcaatgtccccgtcaggaaatgtctgttcaatcttggtctgtgtatatcctacttacccacatgttattttgcacataatagtttttttgatgtttattaagaacaaaaacagcctctttaaaattgtgtgttcagttagctaactgtatttcagcatccaattaataatcagaggtttaataactacagccttaattctggcctcacaatgatagaatgataaaatcataggttttttttttttttttttttttttggctgaaggagatcttataactgctctgtccaatacacaaccactggccacatggctatttgaatgaattaaaattaataaaattgacaattaagttcttcaatagggcattttaattgctcagtagccacatgtgactacttaaataaaattaattttattaattcattcaaaaatggacagcactgacagatagttccattattgtaggaactgttattggacagggctgataagttaccgaaggaaaaaaaacaggtaaaagaagatatttgagatagcttagcattagcattgttacatacaaagaacattacactcatattcaaagtgtctgctgttaggttggtgcaaaagtaattgcggtttttgccattacttttaatgaggaaatatttcgtatatgataaacagttttccttagcagttgtacctaaattaatgcacatttaaacatattcaggagaatgaatggttcaaaaggattcctttttgcattcctttaaagtgaatactcattccagttgatcctttgtgagttctatttttttttctgtttaaacatactgaaatcaacttgagtcactacacaagtttgacattcattagatttggctgtgctttttaagctcgcatgattgagaaactaaaatactcagtaatgttggtaaaggacaaatgccagatagttttggacagaccaaatatatatttaatgacatcacacatgcaatacagacagttctcaatttacaaacactcttgagaagcagccataggttaaatataaaacatactgggtgtaccttctttaaaatcctcttaagaacagtaccacctggatatccattgtatgaacaaattagtatttaaaaataataaaaataagtcttagaattagagaatgtatagttttgagctgtggaggcaataaagaggctgtgtaaaactcagggggagttagttgaggttatttccacagtagagcagatttgcttaagtaaccccctgacaaaaatagcttagttccgcctccccgcagcatgcctgcccctccctgctgtgtgcatttcccccagtccttcagtcgttaaaaattttcccatttcatttatactccagtttcagttccgttgattcaaagttttgggacttaggacaagtttgctagcttctctgagcctcagttttttaaaccgttaaataggaataacagcatgctgagtgccaagaattaaagaaaaatttatgtgaaaatatagattagaaagaaaactaatataaatgcaggggattatgatcataatactcataaaacttcagtactccctgggaagatccaatggccgtcagtcatgtgcacgtgatcagaatctgggccatcatatttttttaagcaagttgatggcctgagggttcttggccaggtgggaggaggctgctctgggatgttgaagagagattttaaaaaggagatggaaggctgtgaaaacatagttcaaattggagggagcttgggcagataccaccttttcttttaaggaatgaatgtaattgcttgcattttgtctctacttccttcctctcattgatttattccgaaggctagagtttctactttacattctaattcatctgacatagcgtgtttttaaaaaacttagcattgcttgctttgattttccagttgacttttgctgatggagcctctctgaagggcaaattcaaagtacagctgggtgctgcagcactggagtgcgaacttgtggctgtggttatgaaggagcctcgtcagctatgcctttagcccctggtgaagcagtgccagtcacactttgccagtcaaacggagaggcagcagtagtaagaccagaccaaatcaaac

SEQ ID NO: 9358 - DNA, 2300 bp, Homo sapien
gcacatattttaatttcttatgtgaaggtcaagttaaagtgtttgtcatctcattcccagacttgcttcattattcactacttacgtatttttcattttattcatttttaaggtctgcccatattctgatgattagctctttctactatggtacatgaaacaagcatgagcctaactgaatgttgcatgtgccatgcattaaaattcaaaacagcacaagtctattagcaaatgcgcatgagattacattgtggtatgattttaataaatattcagaacattaaattataattataatgattaagtctgtgttttgcttatgaaagaaaagttatcgtgagttttgttgagagcagaccatatatttcttcactaattttggccacatctgaaaatgtcaaatgatctagggaaaaaaatagtcaaatgatgaaccagatacttaattgttttaatttattaacttttgccaaattagttttcatgtgtatatatctgatttttaagtcagtgttagaaaagttttgtaataagaattttgctatgtagagtaggtttaaaagaaacatgattaaactcttcaatagaagtctcttgtgtgtgcttttaatttttatccaatgctaatttactataattatttactatacttgaagatcagaattacaacaaagccaaagcttacaattttaggaagagtaaaactttaacgatctatacatttatctccacccgattttaaatgatattataatttaatatcaaattaacatattggagtgcattcattcttgtttgattgacccactattaaatgaaattttacaagaatagatttgattttctaacaattattgcaatttttgcatggttaatcttttatttatctggtaactttgcaaacagaaagaaatcttaaattggaaacatcactattaaatgatggaaatagaaattttaaaaggaatttttttgagatttccctaccgttaaaattagtacatttgttattatcattgttcccctagaccacaatacttctcgtctgataaaagacaaaactatggggtaactctaaaaaatagacaatgagctaagagacaagtaaaagtaagtttgcaatactatacagttaatagaccaaacgggcacatttggaaaggaaaaaaaattgttaactacacattttgtttaatgtttaatgtcttgcatcgacttaagaatatcttactcgaggagcaatgtttagttttcttttatagaaataggaattgacacatctgttgtaatctagcattgcttctgattggttattagattgttcattcatgtcataaatacttaaaaggcaaagaaccctcaattcttgattcgtttgtgatttgtttttctttcctcactttcagaatagtttctagttgatacattttaatagcagaataaataaatgatttgccaacatataaaatatggcagagttaaaaaccctacctctgacatgttgagagccaagtagattttttttttaatgcagaaaatacctacttaaaaattcttttaaaatgccaaacagccttttgcctactcagcacactgccgttggtgtaggagtggtggctgatattggcctgtgatttccaacttcatggcatcttgagtaactgtaccgtttggaagtatttgtcattctgtaaaattttctctgaaaagatcaacaacttaaaagaaaataactctttcactatgtaatcaatattttctggagatttcgattatgtttcattaaacaatctgacctcataactattgttactgtattgttttgctttgacttcaattcataagtcttttgaaaacggaatatttctggattcatcagtcaaccaacctagtaaaatcttaatagagaatgacaccaaccaagctaaaactttcagtgattattttattgtatgaaagccaaaattctaaaagcaaatagaaattggtgtaactgatgtttaatccaaatgtacaacagtaaactgacttagcttctctttttttttttttcaagagctgacgcaagttggacagaaggaggtgttggggtgaggtggtggtgttgattggcttgtctcgttcactcccactggtctttaaatcaatgtctagatctctaaagtttcatataaatcaaagctgttacacgggtctgccattccaaacaagtcaggaaagcctgcacaggactggataaataattaaggtacagctgtttttacatgaatatttgcagtgttaaaataatgcttactttc

SEQ ID NO: 9359 - DNA, 2300 bp, Homo sapien
gagttcagtactcttagtcagtagagaatgcttgggaggaggctggggagggaggtgtggtcagggagatccttgcacattctctctgcaagtgtcccttagctctgcccctcccctgaattttgaaagttacctgtgctaacagaacaaagtaactgaacataggaattagcaatacattttattattttattatggccccataatagaaagcatacagcttttttgattgcttttaatgttaggatttaaaaccagtgctcaaatggaaagataagacaacaaagtcttatctttccatttgagggaaaaccaaattatttttctggttctcaagggcatattctattttagcatagataaaatttacacaaacatacaacaaaatccaaacaaatgttcttctatgcttttatgaggggagaggtggaggggatttctcttctgattttagtttttaatggctatatttttcattttagtatattatagcagagtcaggaagtacaaatgtatttttaaaaggtgatgtagggaattgaatgacagtaacaaatgctatccttttatctttttagtagatgtttatgccagtcaagatcctgggttttcataacagactttgacaacttttgttttgtaaggatctattattccaggtttttattccaagctcagaggtctgcatacctctttaccatatccatgcttgtaaaatactcttggtcataatgttattaggaagggaattcaattacttctaccacccaaagcattatttgaaatgttagcaaatgtccatacgaaatgtttttcgatagcgtgatttcctctatcataactaaaacaaaggaaaaaggagaggagatggaaaaaagaactaaataatactcatgccagacagtccagcccagagaatgtcattccctgtatatgattatttcttgttggctatttctgcctattgttcccaataaatctaatgtgtattcatgattaaaatgactattatctcagttcccttgtttcccctcaattttgtctcttttgttcactactgtcaccctgatgcctaacacagtgcctggtataaacagacactggtacatgtttgttgaatgaatgaaggaagaaagaaaacatgtttctttctgttttttgacagaaaatattcttcaaataaacatttttttcatggacctactaaaggcctttgcaaaatgattttgtgcattgtttatagtcaatacaaatacttttaaattgtttacttaatttgcatgattgcacatgattaagagtataagcttggtaggcaaggtaatgtggatatgaatcctaatgccatcataaagttgggcttcctgggctcagatcttgactctaccatccaacttcctgggttccaattttggctctcccactttttgcctgagttaccttgagcaagtcagtccactttattgcttcactcatctctgaaatggggaaaataatagttccaacctcacagggattttaggaggatcaaattagtgaatatttgtaaaacatttagaatcatatctggcactttttaaaacaacagctatggtatagaattattgtgatgatgatactgcatggcacgtaaacactcaataaaataggattgctactatagatattatcgcaattcttcatttctataatctgctatgaagatttggggccctaacagcctttccatgttttggtccagtgaaagtcttattgtttctaccttccctttcactcgtaactctttctacccaccctgtgtttgtcctgtcattttgccttgcgtcatttattcattttacactgcatactcctaagggcagggactttgctctttgttttggcataatttaataacactgggtacactcgcggtactataaagatgttgaagaaaaagaaaaaagacgcaatttaccaacaggcaactttggcttacggcgggataggtcgctgttctgtctgcaatgttggtactcctgcaggccgcccagcagcatctaggggcgtggctgggggctctccagtgaccgcacgtcctgggcggccactggggtgtgcgcagcgcctggagcatgagccgggtggtggcgtgcacggaggatcgcgggaggctgccgcctcgggacaccccactcacacaggtttgcttgctgcttttgcgtggcaacttggttagagggtccaggagagtgggtgagacgaacgtggaaggggaaagagaaaaagacatactgcaaagcactgaaaaacgaggtggg

SEQ ID NO: 9360 - DNA, 2300 bp, Homo sapien
cgtggactttaggatgccctcagctatcactgcctcgctgggaaagagcctgactttcccgttctgccctgctgcagtatccttcaggggttccaaaaacaccactcttttacctgcacctgccttccgttcatcagcggaggcatcactagcggggccaggactgagaatcgatgaatgggcattgctttggtgtagcatatttttctgtctcttggttttacacttgcaggggcatggagtcagatagaggtacaaaagtaccaaaacgatactggccacgcaagcagcaagagtggtaaaagctgtgttaaatgcctcatgagcatgggatctgcttacagtgaaattgctcacatttattgtgacgtccacagtttcatttaacaggcgttgcttattcattgcgatacaagaatacactccagcatcctcaaaacgagggctttctataaccagacttccattgtgaaacacgtaaaagttttccatctctttatccggctctagcagtctgttatctggacccacccagatgaaatccgtatttgcattacctgtcttgctgtcacagtggaccatcagtctttccccgacctgagcctcatgaataaagccaagcgcacgaaaggaaccattgatgatgctgtcagagcaattcataaagctatcctggagcagaagtacctgacgcgagtgcctggagtcagaccacaggcgacaggtgtaatcgttcttaaaatccatcactgagctaaagtgcctacgataccaaaagaccagcaaggagtacagggaacagtcacagacaaatgggtttccatgaaggtagatgcctctcagctgttttcctggcactaaatttatgtggtgcattggcatggaaggaattcggttataagaaacatctaaaaacatcagttctgccagcttgaaccttccaacatacaaatccatcggaaactgtgtgagaaaatttccacttaagtagagtttctgcaactgggagagccctccaaacgctgaaggatcgagataggatatgtgattgttgtaaagcagaagcacttccagaaccttcaactcttggaatacagcatttttcaccgtcttcagcttattggacgataagtcaagacacttcaaatttggagttgtggaaaaactgcccgtggaaatgctggtgatgttgttatgacgaagaattagggtgttcagctttgcaaacgatactggaatccactcagaatccagaagcccaattctgttataactcaggtccagtctcttaatcagtctgaaaaggttcccaggcaccttggacaggtttttgttggtgcagctgacgatgtcagtggcacagatgcaagcggtggggcacaccccagaggcaccagggcccacagtcactgtgatcatcagcaaacacagcagctccctgcagcccggtctgacgacggctccaagcagggtgggcagagtgtgtacacgtaacgacattatggtcgcctctgagtctcttcccggtgtcttttccaccggctcagcctcccaccagtgaacctggcaaacaattaataattcagagggagtaaaaagcagaaactgactaccactagttaacccataagagccataccttactttctttccaataacttttgaaatgggttttatttcacaatagggagctctgtgttgcctcttcactgttaaatgtattttttcctctttcctgggttagtcctgcttataaaaatgtacagtcacattctctccatacaacccaccgtctcacccaccatcagaaactcaattttttcctaaggtgcatcctgcgttgttgttgttgttgttgttgttttaaactccctccaacagacacaactatacgcaaacgtacgctacaaacaattaaacggaaatacttagcaaccacccatccaggaaaaaactcacggtgctggggagcctcgtgggctccggggaggctgcctacgcagtgccttccgaaggtctgcgcgtccgtctgtccgtgtctgtcactcttgcaccttccgacttcctttccctccggctcccggcgggcggcaccctctagccggctctcaactttgaggagtttcaagcagccgcggcggcagcagcagccctggacgcagcagccaagctcttcgctggctcccgggggctctcccgggttcctctcattgcaggctgaaggtaccgcctcggcgctctggccgccgtgtgcccgcgcgcggggcgccccgctcccagagccggggccgcgggagggg

SEQ ID NO: 9361 - DNA, 2300 bp, Homo sapien
aaactcaatccttttacaacgttcttccctttcacaaacatgtgaaatcccccaaatcaggtcttcaaatggataaatagccttgtctatggattttgagtgcatttagtttacttttgctgtgtaatctctgcataatgtttctacaatatgcctgtagttataataatataaccttcctgtttccatttttttgaatcacttattctttttagactatttttgcattaaatacaggtctttcttctgccttcatggtttccttaaaatacgatgttaattagtaaaatcctgcaaaaacctggtcatttattagtcatttaaaaaatattcctctgagcgattttaattctattcctctgtattaactattctaactctataaaattgaagtcctggagaccaagcttttgagaatcccaggaagtgtggcctaatactagaaaatctcaacttctgcctctcccctttaagtacacagtaagaaatgcttgcatgaagcattttaggctgtgttcttatgataaaattcaactttcatgaaataaattaatctgaatcaagttgtcctcatctgaaaatgcctagatttattagtgctagcccggctttattccacaaacaattctatttaaattaggtgttggtctaacaaatctgcctgaccacagcaatgactcacggaccatgtaggaaacaactttcactaaattcaagattgctcaagtgaaaaggtgcgcgggggaggggaggaagagttggttgtcctcatcatttttatttttaagtaatattacaagttatctatcctgccccaactgtttcctcaatttggttgcttttcattccactgtggttggcatcttttgtcaaggcagtaatttatttcttttaatccggatataatggccaaatgggcgatctgactcactcaaatcccatcgttaaaacttatcttggaattaaacaaaaatggatttttaatcgtagagctcatcagcctcatagtctccacctcatttctgaatggccttgttcggcttgcaccttctgtgcttgctgaaccaaagcgcgctggtcggccgcggcatctccggaagggatgaagagcctccgcgcacacgccccttacttccctgtcccgcacgcgccacgagcacgcttgcaaaagacggggaggtggcggggacagagacagaggaaatgagagagagagaacgaaagagaaaggagagagagggagagagagagggagagagaagaggggaaggagaagagagaaaaaagaaaaaaaggtctgctctgggattattattattatttgggttaatactcttatctttgcattccagccggaaggtcggctccaagccttctttcctgccctcctccttcttgaattggacaccatccctgttgccgcctcctgagtcaggaaagggatagaactttcccagggaggtgaggggtgtccccgtggcgatttcccggttacttcctcccagcagatatccctgtggagaggaaacgttcccgacttccctccccgcgacctcctccctagaaacgagcggagacgtcaggctgcttctgggtttattttgtaaacccagacagtcaactgcacttggcgcaggcaaagcctccttggcccttgccccaaagcaaagctctaagaggtccggggattccttggcctgggtggggagagagacgtgacctgtgcggccgccgcgaagtgggtctccaagggtgagacccctccctcggtggctgggcgtgtcccctttagccttcctggaccccattaccgcccggcttggagctggacgaagggacgtaattggtaggcgagtgggttgggcatcttgactcaaggaccagagtctgggcctctggtgtggacccctgccccctccccgctctgcgcggccgttctagaggtccgggtgggagctggaggaggaaagcgggaggaggcggcgaggccgcggggcggtatgagggggcgccggccgcctctcggattggctgcgccgccgccccctccgcatcgcgcgccccccaccacgcgcccagcctgctccctcccgcaggctccgagctgctgcccgcaggaggcaggacgcgcaggggtgggaccggcgccccagcccgtctcccggccccgggcgcgcgggaaccccgggtcctgcagcctcccgagtgcggagaggcggggccgcccgctgccgcccggctgcctgcgccccctcccgcggccccggctctgggagcggggcgccccgcgcgcgggcaca

SEQ ID NO: 9362 - DNA, 2300 bp, Homo sapien
caatatccacccggttaccccaagacagaaatctcaagatcatctgtgactccttcctcttcatctgccacaagaagagtagcttctatctccaaagctagtctctgatcagtctacttctcttcctatagcctctgctttagttcaaatctagaatcctgctgtggtggtgctgtggcttccaagttcatcttcttccaatccgttctctaaactacagtcttgctctttctaagactcagatcttataattttacttcccttcataggttgaatttaacctgctaaatcacataaaatttttctgaagataccagcctttctgccttaatcaaacacattagccaaatccatagcattactgggataaagcctgaagatcccaaattgataaggcatctggattccctttgataacagtattcaataacaatgaacacctactgagtatactattccaagcatttaaagtgtatcaactcttttcacaaaatcaacaataattattattgctaccatttattgagagtctactttaatccaggtgttacatattcatgtattcattattattacctttttttttgagacgaaatcttgctctgttgcccaggctggagtgcgatggcatgatcttggctcacggcaaactccgcctccctggttcaagtgattctcctgcctcagcctcccgagtagccgggattacaggcatgtgccaccatgccccgttggccaggctggtctcgaacaccttacctcaggtgatcctcccacctttgggattacaggtgagcccagcctattgttacctttaaaaccaccctgcagggtagctcttactgtctccatgaggaatatcagaaaagggaaaggacttcctggagggctggttctgcctcaagccaatcagctgacactaagcagtgaagccggaatctgaggtccctctgcctgccctggtctttgctcaccctgacaaccagacacctcactgtgtcctgagcagcatagatgccacacgcacagtgccacatagagaagggtgatgtaaatgaaaattaaaacactgtgacaaagtcaagcagggcatttgtttttgttgttgttaagttatttttggtagatacagggtctcactatgttgaccaggctggtcttgaactcctgggctcaagcaatctgcctgcctcagcctctcagaatgttgggattatagacatgaaccactgcacccggccagtgtcagtctttgttccctacaagtgaaatcaaaacagcctcacgcctgtaaacccagcagtttaggagcccaaggtggaaggatcgcttgagcccaggagtttgaaaccagtctaggcaacatagtgagaccctatctatacaaaaataaaaatagcctgggcagggtgactcatgcctataatcccagtactttgggaggccaaggtgggtgcatcacttgaggtcaggagttcgagaccagcctggctaacatggagaaaccctgtctctattaaaaatacgcctgtagtcccagttactcgggacgctgaggcaggactgcttgaacctgggaggtagaggttgcagtgagccgagatcgcgatactgcactctagagcctgagtgacagagtgagactccgtctcaaaaaaataaaaataaaaaattagctgagggtggtggtgcgtgctatactcagctactcaggaggctgaggtgggaggatcacctgagcccagaaagtcaagtctgcagtgagctatgatcgtgccactgcactccagcctgggagatgagaccctgtctgaaaacaaacaaacaaacaaaaaccaaaatggctaagtttacagcaccaagtctatcccttaacagtatgactgctttgagttcaggcacgtgtctaagggcagccggttcagagaccttgacacctggtggagtcacagaatcaagaccctgggaaaacttcttatagcttatttatttaaagctttacaattgtttacactgctcaggaaaaaaagaaaaaaaaaacccaacaaattatgggtgttcagagagctgtgttagcccacaaagttcgagggagaaactgtcattcacagagcttgattaaccacagacttaaatttcaggaggaagtaagctatgaaaaatctgtaacctctgcctgtcatatgcttagtttgttaaagaaaactagagaaggagcttgttattctttaaatagaaaagctccaaaaagccctaaaatgttttatctgaataagttctctcagtaggtatcttaagaa

SEQ ID NO: 9363 - DNA, 2300 bp, Homo sapien
tggggaactgcaagataactttattgatggccatagaggatgaaaacaatgcataaggtatggaattaattttaagccacacactgaatagacagtgatgtaaagtaaaatgatatttttcaaggaaagacaattatgtcacattataatccagtttacataaatagcatactattaaaaaaagctaagtcttcagagcatgtaattcaggactgttgtgaaacctcttactcttgttggttagttattttgtgctgtaagggagggaaaatggcttcctccctacttctaggttctttggctgggatacaaattaaattgacataaaacagattaacaggagaaaaaaacatttttggccaggctcggtggctcatgcctgtgatcccagcactttgggaagctgaggtgggaggatcacttgagcccacgagttcaagaccagcctgggcaacatattgagaccaaatctcaattcaaaaaaaaagaaaagaaaaggaaaaaacatttttaattatatgcacacacactggaatcccccaggtaataaaagttgtctgagagcaggactcttcctgatacagatactttgactaatgtagatttcttttataaatataaatttattttacaaaaggacagcttttcagagatactcttgtgtctgcagttgctcagaataatcagctcgaaatatgccaaataactatattttggggtggcatattttttatttttgagatggagtctcgctgttgcccaggctgaggtgcagtggcgcaatctcggcttgctgcaacctacgcctcctgggttgaagcgattctcctgcctcagcctcccaaggacctgggattacgggaacctgggggtggtatattctgatcttctgtagtcatgcactgggaccttctgtagtcatgcattttctctctctcttttttttctgattcattatttccttttctttttcatcttggtatttgtagggaaagtgatattcctctccccgaaatcatattattccagacaaaagaaaacaaatgcctacacttatctaatcaatcagaagaccatctcccccaccctttttttttttttaaagatggagtcttgctcttgtcaccctgactggagtgcaatgggacgattttggctcactgcaacctccgcctcctgggttcaagcgattctcctgcctcagccccccgagtagctgggattacaggggcccaccaccacgcccagctaatttttgtattttcagtagagacggagttgcaccatgttggccaggctggtctcgaactcctgacctcaggtgatccacccgcctcggcctcccaaagtgctgggattacaggcatgagccacagcgccagacgaaccatctcccttttaagcacgctgtccccttgagttacctgctggtttcaagtggaacactaagggaggaagcagaaagttcttatcttgctctgccacatactggatctagctgaggctggggctcaggcctgtggtttcctgtagtgtggactgagccatttttccatcaagacgtcagtggagagatgaagtgaaaggatttaaaagcggtttgtggcctgccatggtggctcacccctataatcccagcactttgggaggccaaggcgggtggatcacctgaggtaaggagttcgagaccagactggccaacatggtgaaacaccatctctactaaaaatacaaaatcagccgggtgtggtggtgggtgcatgtagtcacagctactcggagcctgaagcaggagaatcgcttgaacctgggaggcagaggttgcaatgagccgagaccatgccactgcactccagcctgggcaacaagaccaaaactccgtctcaaaaaaaataaataaataaaaataaaagcggtttgtaaactgtaacaccttgcacagaaacacaagattactactattaaatattatttagaaaagtagagttcttcttaccatttccctgtttctttcttctcacttcctcctttccccttctgaccatcttttcagccgtgaacataccacaccagcaagaacaataagagccaagggtctgaattgtttaatcaaaggaagagtcaaaataagctacacccagattactgagaaaggtgaaatgaaaacaagctcaaaaccaaattccaggaagatgctgtctttgtattgacttaccatttcatgttttcacacatgtcaaagtcttgaagcttcggtcattagtcttccgcttcctaaagcaagaaactaaatgctgact

SEQ ID NO: 9364 - DNA, 2300 bp, Homo sapien
ctccagcctggatgacagagcaagacactgtctctgccttggcttttactcacactatgttgtagaggattctggaaacttgagttcccactgctttgcctgttggcagtgcaactgaggacttgccagtttcaagctctacggcttggagcggaagaaaggacaagcaaggtccagggactaaggaagctgaggaacaagaatcttgtgctggtgaaatgaatgtcatactgcctatgcacaccgactaacttctcacattaggcctttccccaggccatggttttccccacttcagtgccaacaacggacctaggggtttttctccctgctgccgtgtccagccgagctctcgcttctctcttctcctccagctccaaaaataagtcaacagctctgcactgcctaccttagagttaattgtggaaatcaaatgaaatgctgtgtaaactctacagatgttcgctgctattgttattctgagccaccttagcatatctggaaagtgggcttagtggttaagggagatttccagttaaatgaagcatttaacttattatttagcaacattaattatttagtggcattatttagcataccctccaaaaagtatttacatgttttaccagtttatctctttattcttcttaagaactctaagaagggcgcggtagctcatgcctgtaatcccaacactttgggaggccaagacggtcggatcacctgaggtctggagttcaagatcagcctggccaacatggtgaaaccctgtctctagtaaaaatataaaaattagctgggagtggtgtcgcgtgcctgtaatcccagctacttgggaggctgaggcacaagaattgcttgaacttgggaggcggaggttgcggtgagcagagatagcaccactgcactccagcctgagcagcagagtgagactccatcacaaaaaaacaaaaacaaaaacaacctaagaaattattttctttctttctttccttttcttttctctctttctctttcttctttctttctttctttctttctttctttctttctttctttctttctctttctttctttttctttctttctttctttctttttttttcttctttctctgtctctctctctctctctgtttctttcttgtctcactctgttgcccaagttggaattcagtggcgaaatcatggctcactgcagcaactctgcaggctcaatcaatcctcccacttcagcctccctagtagctgggactacaggcctgtgccaccatgcctggctaatttttatagttttttttagagacagggtttcatcatgttgtccaggctggtcttgaacttagactcaaataatccacctgcctcagccttccaaagtgcttggattacgggtgtgggccaccgcacctggactacatattctaattttctccattttatacttttaaaaattaaggctaaaagattgagtaatctgcccaaggtcatccattttataagaagtagtgctggaagtaaaacctgatgccaagcctttgtggtcaaccacaacatacaagattgcagacaacagatgcctcacgtcccttctccagttcacaactaaattggctgttttctttcactgtccattttaataaatttacaagtttatcaatcactaatatttttgttattgccaagcaccagttgtctctttagtgttacatggggtgggctgaaggaggctagggtgctgattcctgtctacagtaagtgcccaaaaaatgatggtctcaagaaaggctggtcagaaatgccaacttaaagtttcagataaaatggaaaaactgaaaagtacttactcattaaagtaactggtgatttttaagcatctctctcagttgattctagatctcgtccctagatagctttcttcctctcctgtagatcattgtgaccagacgggagatctcagagcttgggctataggggaaataggttagcctctgggtgctgctgtgcttgcaagccagcgtctggggagaagatgacatttccggtggcatctggggcaaacgacacaagtcagcatttagtttcttgctttaggaagcggaagactaatgaccgaagcttcaagactttgacatgtgtgaaaacatgaaatggtaagtcaatacaaagacagcatcttcctggaatttggttttgagcttgttttcatttcacctttctcagtaatctgggtgtagcttattttgactcttcctttgattaaacaattcagacccttggctcttattgttcttgctggtg

SEQ ID NO: 9365 - DNA, 2300 bp, Homo sapien
gattgcttatattcagttttacatgaaagaaaaataatctttcatgtttaagccactcttattttgggctttctgtcacatgcaaccaaacttaacatagtatctccataacaggaagtcccaaggttcattttcttcctaaagttacttagctaatacttcctttcttaagatttacattaactgtcagactctttaactatttgaaagagcccaataattgttttggatattaaaattaatagcatttacaatcattaattgcagcattttattgttgcaataataaacactcctgtttatttccactgaccattacaactgcaacacataaaacacataaagaggtttgtctctttgaaaataactcttcaggtattaatgataagttcaattgagatgactggagtaaatgaataaaagagacttaaaagaaaggcattatttacacattttgttgaaatccatttaaagataactgccaatagaagtggggaggtctgcaaggaatctaggaaagaacttaaggtggcctaggtctgagctcacaggagagaaggctgccattgcaggcacaggttttgtgggacagcaggagcctcagaattaggtgatgatgaccatcaaaaccatttgattaacttttctcactttgactctatattcactaagctacttctgattattgtatggtttgagagagaaaaagagagagaaaagcagggtcacctaagggtctatgaggttttactagagcagccagctagcccccttatctctcttctcaatcaactctgtcagaattaataaaacaaatgtggttgcttttgttaaaaacaccagtaaatcaatatttgcttttaaatacttaataaaaaaattattaaaagtcagttctctatctccctaatacaaccaaagaatcatttcattagtaaatattttgacgtacacttaatgatttgactactatgattttaaaatataaagataccaataattaagcaatgggaaggatgtgctaatgatatgaccttgtaagacagcactccagcctagttcttcattgatcagcgcctgggttagtggcttccagcttcaaatgcacagccgtatcctatgctttaaaaaattctgattggcttcactcaagactagttacatcagaatctctgggataggacacagaaatcagtatacacacacacacacacacacacacacacacacacacacacacagacacaaacacacacacacacacacgtgtatatgtatatactccctaagtgattccaaagctcagtcaagactgagaaccaccgatctggattttgaggatatttgaggttacagtcctgttttaaatggaaagtttcatttgtttgtgtttgcttctgtggacttctgcaattatttttgttttgctttcgtttaagagttgtcattgcaacgaagactccctcacacgggaagcagaagcaaaaagtgttaaaagtttcgttcttttttctctgtaagccagagcatatctaaagacagattgtaacactggcacatgtcaaagaaagactcagagatagattcacttagaaaaggggtttacttgcaaaagatgcgaggagttagacggaaggactagtttgccaaccagtacttaaagggaaaaaaaaatcccctaaaattaccaggattaccggttgacagtagtctgttcatggtggaaaaacagtaactttctcacatggttattatactcacaaaggtcagacaaattaatgtcacaaaggtcagagattagcaaggtaaatattagggattaaactgtttaagggagtccagggaaatattcaaggttttattgttttggagatcagaaaatcaggatgatcctgcagtttttgggttatctccttttaagcttagtcatattggaagcaggcagaaggctcagatattgcttttacataccctcaagccaccaagctggttccatcctgagaaggaagtcacgaagctgacttctgcgcgcgctcaagcccaggctaaagggggcggggcgaggccgcgggggcttgtggggaagcgcaggaggcggggctttgcgtgagtcactgccgggctcggcgtgagtcgctgcggggctgacggggtggcagtgcggcgggttacggcctggtcaggtgagcgggcgttgcggttctcgctgcccggagcagcgtaggagatccttggggtggccggtgggaggaggggtagcggttatgggtaccggtgaggcggggcgggccggggctggc

SEQ ID NO: 9366 - DNA, 2300 bp, Homo sapien
caagaagccagcaaggagggaggggggccacagttggacaccctagtggtggacaggggcccagagcctaaaggacgtgtaaaatcaccacacggcattgcccacagaatgtcccccgccccttccccctagaaggggtctcacgcttgagcatgcatcagaaccacctggaggccctggtagtacaggacagtgagtcccatccctagagtttctaattaagtaggcccggagtgaagccccagagtttgtgtttctaacaagttctcagacattgctgaagctgctggtccagggaccacatgttgagaacctgctctaaagtccttctgtctctgcagcttagctaagggagcagaagactaaccgtggtcactacacaggctctcaaaatccttgcagcagttcccaaactcttggcagcgggcattgcagtgacattggtggtgcttgtcaaaggcttcgtagcagcggccctggcaggaggtgggtgccgagtacaagtctgagaagagaggggtggtgtgtcccgggctgacctctagaggtcgctctgaacgccccacaggctgtcgctccctagcctggctgtcttcactctgcccagtaaagatctccagggaaggaaaacaaacaaacctaattcgtgcacacccttcacagtcaggaagtcctttctgatgccgaactttactttctggcctgctgtttttctaatcttctcattctaaaaataaaatctcttccacttccctctccaggcctcaggctctctttcctagctaccctcctcccatggccccccaggctggctgagcccccccaggcttcttcctgcccaggttcccagaatccaacaagcctctctcatctggctgaggcctgggcctggtgccactgccatggccgcccctgcttgtcaccctcatgtccctcctgctttatcttgagggcccccctttggggaggcaggctcactgctggcgagggcctcttctgtctcttcctccagctgtggcaatggctctgactctttgtggtcctctgcaggtagatagaaaaataaagtcaccaacaacctgagaattcccctgctgcttggtttctggttctctgtttccccagcctcaggggacaagcaagggcactggaagcaaattctgaacaggggctggggtccaatggacaggcaccaaataatgatgatgaaaacagaaaatggaagatgtttccaatggaagacacattatagaaaacttataaaaaaggaaaataatttccccaggtgacacatctggattgaaaactctgacttcggtgatgaaaactctgatttaacaaaagttgacagatggatagaggcttgatgctgtcctaatgacaaagccctcacttaggaacatcctgtacctagaaaaacttctcgtcagagctcagggtaaactctcagggcctcaaggaataagagctgtttcctgagattccaacttcccttctttctttgccccacttggaaatggccacaaagactgtgtctagggaaaaggcatgttcagaaaagcacattcctattgctgcccctttcccttcacctgcaagctgagtgactgtagctcagctctgggtggagaagggtggatttgaggttgggggtgatgcaggggggagaaatgttcctggggactctgagttcctctctcatcacacagtggaataatccccccaccagcaccccctccacacacccaacaaacagtactgttacaaagtgattcagaatctactagtgagtttgctggaaagttattaccatcagaactaccagttaggttattcttcagtcaacaaacatcttctgatcacttactatgtgtcaggttgtgttctaagtgctggcaatccatggagttctgaattcagccacattttatgctaaacagaattttgtgtgctgagctggaatcctaaccatcatttccaatatgtttttctataggaaaggggttctgagttgcaaatcagaaacttgaagatgaaatggctactacgctgggtattgcctttatcttgaatgccagcctgatggtccaaggtgaacaagccttcctgtgttttctgaatggtaagaaaaagtggggacacaaggacagcagaaaaggcataggctctgattccggctgatctcggcctgggtctccctgcctggggaaggaggtgtatgtgtgtgtgctaatatatatgtggtgctaatgtataatacatatgcttatatggtgatatggtttggctgtgtcccccct

SEQ ID NO: 9367 - DNA, 2300 bp, Homo sapien
acatatgataacacacgtggtaagtgctcagtcaatgttgctggtggttgttaaggctgttattcttattgaaggatgcagttttaaacacttgggtactcagatgaaccatctggctctatggagtcatccttaactgtcttccccagctccaatccttgctcctgacctaaaattccattaatggggggagagctcctgccctcaaaacaccatcccatggccagttcagctggacactaggagaacctagccaggctgtactccactctgacagctttggcttcagctagggtccacccagctggacacttggaagggacagaccattcattcccaaattctgaggcatcattgcttcccaggccagccagtgacaccctcctttgtcccctaaacaacaggagtcagagacacgtttatgtggtgccaacccagggaggatgaggattctgaggggcagtgactcttcagcctgcttttggattgtgtaaatgaaatctatgcaaatgaagcagccatttctgctcttactcattctaaccagctcccttctgggagagaagggctaggctcactctttagttgtgcttccgggctggatgcagtggctcacacctgtaatcccagcactttgggaggccaaggtgggcagatcacctgaggtcaagagtttgagatcaggttggccaacatggtctctactaaaaatacaaaaattagccaggtgtggtggtgcatgcctataatcccagctactcgggaggctgaggcatgagaattgcttgagctggggagatggaggttgcagtgagccgagatcacactgctgcactccagcctgggcgacagagagagagattccatctcaaaatatatacatacattgcacttcctgtgtgagccccttgcaaagtttgcttgccctaggcttgtccttctctctacccctgagtccctatgtttggactcctctctacacagcaacaggctgggggattctctttaacccaccagcaactgttcaacctggcgcatgggcaggaaaactcgagattaaagtctgagaacctggaagggattgtcagatccaaccccatcatttcagatgagaaagctgaagaccagcgagaggaagaaacttctcctgttaaagcacactggatgaagacgtgctccactcccaacctccagaaaaaaatcactgatagagtggcctccactgttcaccaattttgcctttttatatgatagttttctttcctgagagggttgagaatccccatgcagtgctctttctggcaagggcatcatacttggcagattttacctttattatcggggaaaactggacagtcacggggagctgctccccttcttttggacttggaaacaaaagaacctcactggggaggagttcctgaggagaggagtgtaagttggggtgaagggagtgaaaccctgggctcccaggggaagaagagtgggccttcggctgcctttaagaggcctcttgcccctcccctgcctcataaggaatctgaaacgtttaaaccccagaggctgactcagtaagagtcatttgcataatattttagagtgatttagccatgcgctcgacatgtggctgatttagctatgctgggcttggtggtcataagaatagcactggttctgaccgacacatcctctatctctctgtccaatgaccccaacccttgcttgggcacttactgtttgtcaaatttggaccaatcaccttactgtgtgccagtgtcatgctaagctccaggaatttgaagatgaatccaacctgtggccccttggaaagtcaggtctgagacttggaagtaggtgtctgtttggtggggatcacccaaagatcagcccatgggtgtccctaatttggacaaagaaccctccaaactggacccatcttggtgtgcctgcctgcatgacctattttttaagctgcaaacagctagcattacctgttctcaacatctggcattacctaccttcttagtcaccttccctcaggcttcaaacagctgtagggccccacctcctatccatctagggtccctccctcccctttttcttcctgaaaggatctggagacaccagctccacaagtcctggtgtctttaaaaggatcagcttgaggaataaggctcgtctgagagctgtgacattcatctgactctagtgaaagtccaacagccactccctttttggcctccaactgggcaccatgagggcctgcatctccctggtattggccgtgctgtgtggcctgg

SEQ ID NO: 9368 - DNA, 2300 bp, Homo sapien
gaggaaaaggaagagaaaaccaaagtcagcagctgaaggattttcatattagaactgctctggacctatctggcagatgcagaagcacacacacacggaggggcatggatttgccccgcccttagacatgttgtgtcttctcctggatccttggtcccaggtgccttacctgagctcaggtgaatgtggcaagcagagccctctggtggtgtgaatgctgtgtggcgcccgtgctcctggtgacacagggacctcacaatccctccctccacggtctcctctcatgtcctcccagccttattttctcgttcctcttcctcccaggcccggaacttgcctgtttggctccccaaccaggacgagccccttcctggcagcagctgtgccatccaagttggggataaaggttggtggtctgtgccggctgggcacagcccgacatctgcaccctgctgtctctgcctctcttgtcctgctgtcgtcactcttgacctcggtgtgcctgggccaaggtggcacgctgtactcctcagggtctgtgttccaggctgctggctagatctgcctcctacctgcctcttttttgctcagggcctccccacctgcagctcagcctcttggggatccctcccaccattactgcaatagccgccctctccctcctggggtggagatcaggcagcccttcccacagctcagtctggtctcctcttcagtcccctatgacatctgccggccagaccactcagtgttgaccctgcagctgcctgtgacagcctccgtgagagaggtgatggcagcgttggcccaggaggatggctggaccaaggggcaggtgctggtgaaggtcaattctgcaggtggtgagttgtgcccctggatagaccccaagggagggtggcccctcggatctgcgcccaggtcccccagtcaagatcattgtcatcattgtcatctttctggtcttcctcagtgtgaatgatggctagcattaatgggaggtggagtgcgtctgttcgaagtgcatttcatgcagtgtgtaagagcatgagctctggagcctgctgcttgcattcggcaccagccctttagctcaccatctgtgtgtcctctggcagggtacttcatccctctgtgctcagttttatcatccataaaatgggaatagtaggagtacttgcctcctggaggaattgtgaggatcaattgagttcatctatgaaagcatttagaatggtgcccggcacatagtgatacataagtattagctgctattattatcatcatttgtgtttagtcatttaatatgaattaataacaatctcatgagatacaggtacttttatcctattttcagacaagaacactgaagctcaaagggcatgagctattcctcaagctcacacagtgagagtagctggtcttggaacttaagtagtcttcatttgtttagtcactcagcaaacatttttgaggatcagctatgagccagcaatatgttaggagctggagataccacagcaggtaaaacaggtcagcttgatggttaagagcatagacggtggactcccagacccgtgaaggcatcttaggctcaccatttactagctgtgtgatgctgggcaagttgcttaacctctctgagcctgcatttcctcacctgtcagatgaggactgtaattgtatctacccacagggttgcaatggctaagtgagctaatgtgtgtaaagcacttagcacagggcctgccagtcagtgctgagaacatggcgggctcaggagtattaagatgggcctccagagaacctggaacattcaaaaccactgttctctgcggagggcacgggcttgacagctggaacccagggcagacaagaattaggggcgttcaagaagtggggatgagaaaagaaaagccttctcccttcaggaagtggggagagatggtcacctgtgtgccctgccctgggaagcactgccctctgctggccacctggtgagttgcagttgcccaaaggtcatgtttattgagaccctactatgtgccaggcactgtttagagcactgatctccgaagcacttggatcgacacccatgtcaataaccaacatttaattaaaacccacaccccactgtgtgaatatttgtttgtaagtaatacacatatattactacattaatatcataataaagatagataaaatagaaattgatggagtagaaatgcaaagcaggtagaaaaagtaaacgtaagtagaagagctcatattttccccaggcacatggatgatctgatgta

SEQ ID NO: 9369 - DNA, 2300 bp, Homo sapien
tctgaaccactggtgagggccggggagaatccagagccccaagggcctccctgctgcagccccagggatacctgggctcactcacctcccttctctcttgtctgcaggttggagaatggctgtgggaatgcatctcctcagatgaaggtgtctgcctggccccagtttctttcctctgctcctcctggactgcaggcccctccttcgccccctgaccctgaggggctctgtgggcgtgggaagctctcctcccacagacacacccttgggtctctgataggtgttcacggggcccttgctgcatgtggtgccctgggccaggccgtgccaggaggcgcagaggcctaaggtggcctccctcctcgcccactccctgactcaatgggccttttattccttttgggaggtaattcatgcccacaggtagagcctgggagatgaggaatggtggctggagttggcccctgaggcccacggggctcctggtggccagtgctgtgggagctcagaggaaggcgaggcccctccctggaaagtcagagggggccccaggccattctcagctggggcttaaagggaagcaaagaggggatgagaagatgtgactgcagccaggatttggttgaggaatggtgggagaaagaactggaaaggtagattaggttggtggtggggagggctgcactgggaataaaatccaggggcctcaccatccagcaggctccccatggtcccaccctactgtgtgtcccagcccctgcctgctggagactcttactggcttcttctcctccgcaggcgaagcccgttctcccctcagggcctttgcacttatcccttagcctggaagggtctttctctggctctgcctggcaggatccttctcgttctcatctcagccaaatgctgggttcccagacaggccccctcccgtctccctatccggagcaccctcccctttctcccaccacgctctgccttggtgtcctctgtgattttcttcaaagcactctcgccatgtggagttgttttctttgcctacttgctttctgtcctttggtatctctcccatcccactggagagttgacttccctcctgcgggcccccacctccgcttctccttgctcacatgctgcctggctcttggctgacgctcagaaactgatgtgggctcaccctcgcaggccgggcactgcgctaggtgctgatgctgcacctcattcaaccctggcctgtggggctgcagtcaggcaaggggcagagcagttcaacaacccgtgatgtgcagtgacacgggacactttccctgaatgtgcactggagtcggctcttccaactgtagtccgctcctgaaaacgggaggggaagagccaactccagtgcagattcagggaaagtgtcccgtgtaagcgactactggagttgagagctgcagggggcaagggtggaggaagaagaggattcctggtgggcaaacccaggaggaaagggaacccaggaggaggatccctggaggagcgagagtaagagtaggaccccagagcaggcaggaggtgggcagggccccctgggccaaggacaggggtctgatctttgtcctaagagcagtgcaaaccattaaaggggtttgagccaaggttggcaaagtctgatttgtgttttgaataggtcagctaaagagcctgggctttctccagcagacaatggacgccactgaagtcgagtgcgggagcttcacagggctctggtcaggcagattggaggaggagggctggaggcacctgggagggaggaggaggagcatagttgggccattggagtagataaggagtgaggcctcgtgggcaggtggaactggagttagcctgggcaggggaggagggggcacagaagacccacttcaaagaagaatcttcaaagcaagatgacaagctacggaagtgtggaggagcctggagctggggagaatggctggggaacagagtggtctgggaggcaggatgcaaggatccgatgggtatatggagtgtgaggtaatggatcattcatgtggaaggatgcagggggtttttgagaccagggtttggaagagagttcagcactgctggtagttttgggaatcacccatgtgcaggcgacacatgaggcagtaaggaactctgcaggggtccctgagatttggaaatgtagggaagagcaatggattgaggtccgaacctggaggatctgctatacgcagagctgggaggagggacagagtcagtaccagagtcggaaaaaagcagggtgggaaggggaa

SEQ ID NO: 9370 - DNA, 2300 bp, Homo sapien
cagggattaaacacatggaaagcacttgaaagagtgcccgcacatgattagattttgtagctctgctgaaatgtatacaagtgtcctgcctcactccccagcatcttccacctgcccagagtaagggcagcaagaataggaaataggggacccctttgtgacccaactgccagtctcaggaagccttcctgcaagaacttctaggccagggcactggccccagcaacccgaaactcatgactccatccccctaactcttccccatgcatacctgtgactcccaacttgtcatcctttcctgtcagtttccaggttgctcttccttcttccaaattaccagaactccgttgaatggatttgggtctgaggtcagattcattctcaggctttcctccttccccggagaggcatttaaaactccaccagcgtttcttaatgtgtggacacagcagatgacctggggtgtttgttccaaatacagattttccatttcatgccaataggattgaatatgaattgctggggacggagcctgcattttagtaagcttctgggaaacattttttatacatgtatacattaaaaatgggattttaatcacaattaaaatttctctccccactttcaagaaaataataattggtggaggatgggggcttggcatcccaaaattgggagtataggcttcttagagctacctcttcccagtcttctcctcactttcaagaaaataatcatggtggaggatgcgggcttggcatcccaaaattggggtataggctttttagagatacttcttcccagtctgggctggctcaacagcaaagggaaaagggaagagaaggggcaaaaagtcctaaaaagctgggggtggggcgttcacctccttccaaaccctcattatcgtcctgaattacgggtcgctgtccccggccactgtctctccaccctctcaggagtggggcgaagaggcccgcgctgggccatttgcacagtggtggaaactgaggcccagggaggcgtggagcctcggtagcaagcctgcctagcagggcgctggaatgcccggtctccgcctcaacctacccggccaccagggagcgcgcggtagggggcgtggtactcgaacaccttctgctcccctggaagctctgccacaaccccaatctcctcttagggcccctacccgttctggagagcagtccttcctctccagcctcagtttcctcaactgctcccggtgtgtgtgtgctggggcagggggcagtggggcgtgggtctgggaacggaactgtgggaggcaaggcagcgggattccccgcgggaaagccgcctattccctcccccgggcggctggagaccctgaaccgaaacaggaggcagacacccccagccgggaagcggccccagcccggatttccctcccgggtgaggccgcagtgactcaccccctccccgctctccccggtttccttgtttgcatttctcctcccggccacgtggcggccagtgcagccactcaccgccggatccctgacaccccggccgttgcggcctcctccacacacttcggggccgctcctgccccctggggatactctgggctcaggcggatgtccactctggtacccccgggtgcggactccaaagcctgccagtgccggcccccttcccctacgcattcctctaccgtaaggcagggcgcctccaccccgccccctccgccagtcctggggaggggaagggggcgggcagcgcagggggtgtgacagctcccgcccggaccggtgccagcgcagccttgcttcagcgcccggtgccagctggctccttcgtctgagacgaaggcgcaggctcggggctccctgtcgccggtggctgggtggcgtccccccaccacgcccccacccctctactcacccaagaggagcctctccaccgagccctgcatcctgctgccctggcagccagtccagctaggcactggcccagttcactgtacctggacttacccactggcaccctccggatccccttatcaaagctgatgggggtcgctggggaccccccagccttttgctagagcctgcacggctgtgcgagcttgaaaagaaacatgaaggtgggtaaggtggggtcagggttgaggaggagcaggagagggcgggagaggaagctgacacggtggggagtttgggtgggagagggagggttagtcagggctgaggaggagaggagaagggtttaagccgaagctgcatttctgggagacctagtgaatctatagcttcatactggga

SEQ ID NO: 9371 - DNA, 2300 bp, Homo sapien
gtcgcccaggctggagttcagtggcatgatcttgactcactgcaaccttcgcctcccgggttgaaagaattctcctgcctcagcctcctgagtagctgggattccaggcgcacgccaccacgcctggctaatttttgtatttttagtagagacagggtttcaccatgttggtcaggctagtcttgaactcctgacctcatgattcacccccacctcagcctcccaaggtgttgggattacaggcgtgagccatcgcacccggcctcaattttccttttttgagtagactctcctaggcagtctagtctacattagaagaatagaatacatacagagtatacgcagtataccatggtgagtacgtggagacagacaacctggattcatgccccagctccaccatttactagctgtgtgactttggcaatttccttaatatccctgagcctcagtttccccatctgtgacgtgaggataacagaagtacatacctcacaggatcgtggcagggattaaacacatggaaagcacttgaaagagtgcccgcacatgattagattttgtagctctgctgaaatgtatacaagtgtcctgcctcactccccagcatcttccacctgcccagagtaagggcagcaagaataggaaataggggacccctttgtgacccaactgccagtctcaggaagccttcctgcaagaacttctaggccagggcactggccccagcaacccgaaactcatgactccatccccctaactcttccccatgcatacctgtgactcccaacttgtcatcctttcctgtcagtttccaggttgctcttccttcttccaaattaccagaactccgttgaatggatttgggtctgaggtcagattcattctcaggctttcctccttccccggagaggcatttaaaactccaccagcgtttcttaatgtgtggacacagcagatgacctggggtgtttgttccaaatacagattttccatttcatgccaataggattgaatatgaattgctggggacggagcctgcattttagtaagcttctgggaaacattttttatacatgtatacattaaaaatgggattttaatcacaattaaaatttctctccccactttcaagaaaataataattggtggaggatgggggcttggcatcccaaaattgggagtataggcttcttagagctacctcttcccagtcttctcctcactttcaagaaaataatcatggtggaggatgcgggcttggcatcccaaaattggggtataggctttttagagatacttcttcccagtctgggctggctcaacagcaaagggaaaagggaagagaaggggcaaaaagtcctaaaaagctgggggtggggcgttcacctccttccaaaccctcattatcgtcctgaattacgggtcgctgtccccggccactgtctctccaccctctcaggagtggggcgaagaggcccgcgctgggccatttgcacagtggtggaaactgaggcccagggaggcgtggagcctcggtagcaagcctgcctagcagggcgctggaatgcccggtctccgcctcaacctacccggccaccagggagcgcgcggtagggggcgtggtactcgaacaccttctgctcccctggaagctctgccacaaccccaatctcctcttagggcccctacccgttctggagagcagtccttcctctccagcctcagtttcctcaactgctcccggtgtgtgtgtgctggggcagggggcagtggggcgtgggtctgggaacggaactgtgggaggcaaggcagcgggattccccgcgggaaagccgcctattccctcccccgggcggctggagaccctgaaccgaaacaggaggcagacacccccagccgggaagcggccccagcccggatttccctcccgggtgaggccgcagtgactcaccccctccccgctctccccggtttccttgtttgcatttctcctcccggccacgtggcggccagtgcagccactcaccgccggatccctgacaccccggccgttgcggcctcctccacacacttcggggccgctcctgccccctggggatactctgggctcaggcggatgtccactctggtacccccgggtgcggactccaaagcctgccagtgccggcccccttcccctacgcattcctctaccgtaaggcagggcgcctccaccccgccccctccgccagtcctggggaggggaagggggcgggcagcgcagggggtgtgacagctcccgcccggaccggtgccag

SEQ ID NO: 9372 - DNA, 2300 bp, Homo sapien
ttctctcacaccttaccactgaaataaccttgtgaatgctttatcctctacaattttcccccatcaaatctaactggatattatagtctaactaatcttcctaagacttggcgtatgtcatgcaatccctgttcaataaaaacaataacaatttcaacagcagcagcaataatttgttgaattactgtgttgagcactttgagtgtattatctcaatatatctcgatctttgtaacaagcctgtgatgtttcatcatcattccctgtgtacagatggagggacaggagtcctgggtctagctgtgctaacacagtagccactagtcatgtgcagctacttaaattaattaaattaaatttaaattaatttaaattaaatacactaaacttaaatacattaaatttaaattaatttaaattaaatacaattaaaaattcagttcttcagtcacactagtcacatatcaagtattcaatagccacctgtgattagtggccaccattatggagggtgcagatatggaatattttcttccaggcagaaagtcaattggattggacatctgtgagttaggggcacttgcccagggtcacagcaaatggtgaagctaggcctctgaccccacctgagtctaatgctctgcaatagctcttcattgtttccacaatttaaaaaatgtttaagcctggccttagccttgtacaacctggtctagtactactgttacataattatttctctttcttttcttgcgcaatctcactttccagcacagcaagcttgctcactgctctcccatactcctaatatgtccactcataatatttttgctctcctccttctgtctgctcagctaatgaattctcccctgacctttaggttcagatagctgaaatagctcttgaagcagtttcgtctcttccattctctctgcttctgcctggaccagctctgaagcccctcatcctctcttgccatggcagccttctgctgctactaattctacttcctgacatttattgagtatctaccatgtgctaggcactcttccaggcactcctcatcacaacactttgaagtaggtgttactgcagtctccattttaaagacctggtaattaaagcactgtggggtgaaatttgtccaactcatctctctgcttctagtgtttcacaggcagttcgccttcactctattactctggccatagttctaaaacacagaattgtgagttttctcccccagccccaaggggagggggacagccttcttaacagagcatgcaaggccctttatgttcagaacctttctaatctccaaacccgctactctaccttcaaacttgacattccagccacaaacgacttacagtttcccaaagcggccgctttatttcttccctctgcgccatcacacgtgcggttcccactgcctggagtactgtccatcctggccagctctgaagccatccatggaaatgcactccggaccacggggcttgctccctcctccacaggaccagcactcactctccaccggcagctcctaaaggagggctgctgctgagctcacagccttgacatcacttctcattaaaatacacactccaagattcaaaatttaataggcaggggtggggctgggtttatttttttatttttaaagaagctcccagattattctagagtgaggcaaatgtgcttaacactggtttacatcccttgtttggcagttaagcacaccctgtctagattccttgtgtataattgcttttgtttttattttattcttaccttcattcactcacactcacctattcaacaaacatttattaaggggtcattatatgccagacatgcttttagatgttgatgtgaacaaaactggcactgtccctgctcatgaagtttatgttccagagggggtgtggtgggtgggataataatggcccccaaagatgtccacgtcctcatcccagaacctatgaatatgtcaccttccacggcaaagggatttattttgctgatgtgataaaattaaggatcttgcgatggggagattatcctggactatcccctcaatcacaggggtccttagaagggaaaaggaggaagagggagttaaggcatgtgggtagcctcactctagaagctggaaaaggcggccgggcacggtgggctcacacctgtaatcccagcactttgggaggctgaggtgggcggatcacctgaggtcaggagttcgagaccagcctggccaacatggtgaaaccccatctttactaaaaatacaaaaatta

SEQ ID NO: 9373 - DNA, 2300 bp, Homo sapien
ttaataggcaggggtggggctgggtttatttttttatttttaaagaagctcccagattattctagagtgaggcaaatgtgcttaacactggtttacatcccttgtttggcagttaagcacaccctgtctagattccttgtgtataattgcttttgtttttattttattcttaccttcattcactcacactcacctattcaacaaacatttattaaggggtcattatatgccagacatgcttttagatgttgatgtgaacaaaactggcactgtccctgctcatgaagtttatgttccagagggggtgtggtgggtgggataataatggcccccaaagatgtccacgtcctcatcccagaacctatgaatatgtcaccttccacggcaaagggatttattttgctgatgtgataaaattaaggatcttgcgatggggagattatcctggactatcccctcaatcacaggggtccttagaagggaaaaggaggaagagggagttaaggcatgtgggtagcctcactctagaagctggaaaaggcggccgggcacggtgggctcacacctgtaatcccagcactttgggaggctgaggtgggcggatcacctgaggtcaggagttcgagaccagcctggccaacatggtgaaaccccatctttactaaaaatacaaaaattagctgggtgtggtggtggaagcgtgtaatcccaacttctcgggaggctgatgcaggagaatcacctgaacccaggaggcagagattgcagtgagctgagatcacgccactgcactctagcctgggtgacagagcaagactccgtctcaaaaaaaaaaaaaaagtcaaggaaactgattttcccctagagcctccagaaacaaggcaaccctgatgtccccttgattttagcccagtgagaccattatttggattcctgacctacagaactgtaaaataataataagtttgtgttattttaaatcagtaaatttgtggtaatttgttacggcagcacacacacaaaaaaaactaatgcaaggggtattggttatgttttgtgcaggtatatgatgggcctccccatgtggatccttagtgctgtggcagagcccttgttattgtgctgggattttccctccagctcccggccggaagctgggctcacgtgggagctcagtgccctcctgctacagatctgtctcttccttacaatggtatgatcccgagggtcagggtgaggggtttgggaggataaggcttgtgctgataaaaggaaaggtgaggtccgttgcagtggctcaagcctgtaattccagcgctttgggaggccgaggtgggaagacagcttgaggccaggagttggggaccagcctgggcaatatagcgagaccctatctctacaaaaaataaataacaaaaaatactagccaggcgtggtggcacacacctgtagtcctggctgcttggaaggctgaggtgagagcattgcttgaatccaggtgttggaggatgcggagctatgatggcgccactgtactcctgcccgggcaacagagtgagactctgtttaaaaaaaaaaaagtagggatttgtggggagctgtgcgtgaggatagaatgtatagaatgtttgcagtcagaaggtgatggtcgcaggggttcccagactttagtgtgtggagaaatcctctgcgatatggtgggagggaacctggttgatagaaggacgggcggaaggaattctattcacagcgtactctaatatttcttaagttttacctattaatttttaacaagaaattttaattttaattttaaacgaaaatacgcatcgtactcagaggtaaagatttttaatcctcgcggttcgctcgtataaaggcatatttccggtcccttccaaggtccaacaatccggacacggcgggtctggggatgggcccaggaatccgcctttttagcagcattcccccaaacgacacggcagcttcgcaaagcggcggtggcgtctgcggttccgggcgcgggcggcctccggccggggagggcgctgtgcgggcggcgctgggggcgggccgggggcggagcgcggggcgccggctgctctggcggctcccgcggctccggctggcggcttcgggccctgcacctgtgactctcggccgcgctcgccctcggcccgcccggcgccgcagccccatggccccgtccaggctgcagctcggcctccgcgccgcctactccggcatcagctccgtggccggcttctccatcttcctcgtctggacggtggtctaccgac

SEQ ID NO: 9374 - DNA, 2300 bp, Homo sapien
attaccctttccctgtggctccggccactgcaccccacagatgcttgcatgcacacacacacatgcacacacacatggtcacacacactcctctttcattccctctggtgctccatccttggctcctttctgcctcttgctagttaagtcccctagggggctgagtccttaggctgtgtgtgccagggacatgggtggccagccaaggtcaaggaggtcagagaaatctgccagttgtgctggggcactgggagccttggagtcctaagaacagggtgccccaccgcaaagttggcaggaccgcccctggcaaccctgcacagtacgatgatcgccacttcttgtgacctcacaggatagtcgtgatgcccatcgcccgagagttctctccagacctagtcctggtgtctgctggatttgatgctgctgagggtcacccggccccactgggtggctaccatgtttctgccaaatgtaagggagcctcagctgagggggacgttagggacagagagccaggcggtgcggggagttgggaggcactcccaagtcagaaagggaaggtggcagtggccagcccagggctttcagcctgaggactggagtatggcagctggtcctgaaattccccgggatctcctagccgagcacagcccaagccctttctcaggaccaggccggttcaccacggagggcttgaccaggtcatacccatggggacttaagtccagtaggcaggaagctcagccgtgggactccccaccacagctgggttgattccaggtgggctggcagctcctccagaggaaggggagagagaagcagcactctcagaatagagggtggccacagggcccagagtacagaaagaagagagggtgtagctcagtgaaaaagacacaggctagagtcaatgacccaagttcaggtcctaccttgctgccacttactagctgtggggcctttcccaaggcccttaacctccctgagccttgagtgaagcatactagtaggttttgtacgacattcaatgtgaaagcactttggaaatagtgattgatacatgtgagtcattctttattagggaggaagcaagcagggaagccacaggggtagagaacagggtcacctctccactcccgcccctcccatttctcccctcccaacctctaggttttggatacatgacgcagcaactgatgaacctggcaggaggcgcagtggtgctggccttggagggtggccatgacctcacagccatctgtgacgcctctgaggcctgtgtggctgctcttctgggtaacagggtgagccgtctccctcccccatccatgcttctgtcaggcaggtaagcccggctctcaggactacccaaggagcaggcagatgggatgggacagggtgggagtggccaagcctgaaacaaggtaggcgaagcggaagcctctgttccaagttaggtccaggcagcatctcctggcctaggtagagtgtgcttgtggctagaaggctggggcccctggggtgggagtgagctgggcctgtgggtccctgagagactggtggctgatgtactgttttctataggtggatcccctttcagaagaaggctggaaacagaaacccaacctcaatgccatccgctctctggaggccgtgatccgggtgcacagtaagtgtggagatgggacactcgctgagctcagactgaaggatcttggtggtaccctgccccaccgtggccagatcctagggcttccggtgccagccaggtgacctgctgttggtctggagtaagattcctgtgagtgacccaggcagcaatggtgagcaccccccagtgaggggttatcctctgagcccccccgatggagccagcagggcctaccagacagtggcccctcaaggtagggactggcctccatctctagcgacagccctagaccagggccaggtcaagagcaacactcaggccttgtttgccaaaaggcctggttcccatccctcccctcagtcctggccacaggcgtctcaggagctctgctggcttgggggctgcgtcttgggataacccccacatttgtaaagtactttaaattttcaacttcaactcaacatctattgagcatcttatgtcaagacccataatctatactagggataaaaatgagtaaaatagattcccatatcaagggctgggtaggggagccgtgatgtctttacataatggtaaagacatggctgattcctcttacggtgggtgccctcacactgagccagattccaggacatggttcctc

SEQ ID NO: 9375 - DNA, 2300 bp, Homo sapien
tctcccttccatatttctctcccccaatactcacccggccctgctctctgggctccctgctccctgttgggccaaaggctgagagtattcacgctgacgtgggctgggcctctccccgcagggctcctggcacagcggatgtttgtgatgctgccctgtggtggggttggggtaagtgtgcccaggggtctcaggggggcgttgccagggctctcagctctcctccctgtggttctcccaggcccagcccctgcagaacctctgcttgttgtggttctgccagacagggtgagccagggacttcctgaggtgccccctgcagcaggaagctccttttggacaggcgtgtctcggacccacagtctcccccgaatgcggagtccagcctaagccttcccctagaaggtgtctggtagatgttgagtgaggtttcaggagcagggccaaggctggggcttaggatcatctctcccttcaaagacccccatgactgggcattggccgccaggctgctctgtctgctcttaagtggcaagttggggtacctcagcctggtccccagaccttgggctgcctggtgtgacatcacggtggtgcttccggtgtccttggcgatcccagcactccccactccgggacatagccccaaactccgctcgcgagctttgcttcctaagtcctcacccctttgtgaagggagcttcccgctccctccggctcagctctcctcgcctaacactatccctgcagtagtttctcaagcaaggtgtgtagaggcaggggatggaggcctcattccggagggaaagtgggagctgtagctggtgggggactttgggagccagtcagtgccctattcacaacttcccatttcttgccactttctggtttttccaactgttgttgcttctgttttctcctccctcctctccctctctgtctttctctctctctctctttctccagcctcttgcgactctctctgccttcctcgcctctcttggtctgcctcgccctccccatctccccatcatgccccccggcccctccctagccttgaggcccagggactgggtttggggggcctcccagcctgggctaggggccctgagtggaagacagtggtgcagacggcccctccagctccgaccgtcccgcagggcctgagcagagtcagctggggcttaaaaccccctcccggcccaaaccccaagtcccgcccaggtaacgccatgccccctcccctgaccggggaggcaggcgtgatgctgccagcagagtgctggccagataatgggctggtgctgggacttaagctgggaaaaagtcatgctgggattgggggacacaggaggccttgcctttgggcggtggggcactggggaggcagcactgtctgcccagctccctgcccctggggtcctggccgtggggtggggaccacccccttgggccctggctcctgtgtgaagccttggatgatgcgggccctgactctggctcccgcaggtggacactgacaccatctggaatgagcttcattcctccaatgcagcccgctgggccgctggcagtgtcactgacctcgccttcaaagtggcttctcgtgagctaaaggtaggaggtttgggttgaaggtggacacaccacaaaggaggaagcagagtggggtagtggggaatccaggcccagaaccccaggcatcgcattcctcttagagattgctacagggttttggaggggaaattgagggctctgggaaccaggttgagattggaactcttggggtacgttcatgcagctgtgggtcagagctgtctgttgattgacaagcattctttctttttccagaatggtttcgctgtggtgcggcccccaggacaccatgcagatcattcaacagccatgtaaggctaagggaagacctgggtgggatgaggtggggggcaagcccccaggaacttccttcagggacattctctcttcttccctgagctttctcaggctgggccaacccaggggcctggggaggtgagggcatgtggagagaatgggctggcaggacctgtctctccttccaggggcttctgcttcttcaactcagtggccatcgcctgccggcagctgcaacagcagagcaaggccagcaagatcctcattgtagactgggtaggtgcctgtccgtagcaccctccaattcgagagccctgggggaaaagccctgagcctgatgttagagatgcggcttcatgtcttagttctgcagtagcctctctgagcctcagtttccccttgtgtaa

SEQ ID NO: 9376 - DNA, 2300 bp, Homo sapien
agcacgccggccgcatccagagcatctggtcccggctgcaggagcgggggctccggagccagtgtgaggtgaggaggcgcgggtggggcccgaggaatgggtggagggaggagtcatgggaggggaggggtggggggccctggggcccatgagagatgaggggcacatggggtggtggtgatgggagggaaggggcgagcatgagctcagagctctgtggtccccttttcagtgtctccgaggccggaaggcctccctggaagagctgcagtcggtccactctgagcggcacgtgctcctctacggcaccaacccgctcagccgcctcaaactggacaacgggaagctggcaggtaatggcctagtggccctgtctccccatgccagcttacctcacccagctcccatgcactcctgtctcggctctgcccgcccagccagcctcctcctgcaccctggacgtccctactccagcttgctgccaagcccctcctcagcccacctccacctctcccttccatatttctctcccccaatactcacccggccctgctctctgggctccctgctccctgttgggccaaaggctgagagtattcacgctgacgtgggctgggcctctccccgcagggctcctggcacagcggatgtttgtgatgctgccctgtggtggggttggggtaagtgtgcccaggggtctcaggggggcgttgccagggctctcagctctcctccctgtggttctcccaggcccagcccctgcagaacctctgcttgttgtggttctgccagacagggtgagccagggacttcctgaggtgccccctgcagcaggaagctccttttggacaggcgtgtctcggacccacagtctcccccgaatgcggagtccagcctaagccttcccctagaaggtgtctggtagatgttgagtgaggtttcaggagcagggccaaggctggggcttaggatcatctctcccttcaaagacccccatgactgggcattggccgccaggctgctctgtctgctcttaagtggcaagttggggtacctcagcctggtccccagaccttgggctgcctggtgtgacatcacggtggtgcttccggtgtccttggcgatcccagcactccccactccgggacatagccccaaactccgctcgcgagctttgcttcctaagtcctcacccctttgtgaagggagcttcccgctccctccggctcagctctcctcgcctaacactatccctgcagtagtttctcaagcaaggtgtgtagaggcaggggatggaggcctcattccggagggaaagtgggagctgtagctggtgggggactttgggagccagtcagtgccctattcacaacttcccatttcttgccactttctggtttttccaactgttgttgcttctgttttctcctccctcctctccctctctgtctttctctctctctctctttctccagcctcttgcgactctctctgccttcctcgcctctcttggtctgcctcgccctccccatctccccatcatgccccccggcccctccctagccttgaggcccagggactgggtttggggggcctcccagcctgggctaggggccctgagtggaagacagtggtgcagacggcccctccagctccgaccgtcccgcagggcctgagcagagtcagctggggcttaaaaccccctcccggcccaaaccccaagtcccgcccaggtaacgccatgccccctcccctgaccggggaggcaggcgtgatgctgccagcagagtgctggccagataatgggctggtgctgggacttaagctgggaaaaagtcatgctgggattgggggacacaggaggccttgcctttgggcggtggggcactggggaggcagcactgtctgcccagctccctgcccctggggtcctggccgtggggtggggaccacccccttgggccctggctcctgtgtgaagccttggatgatgcgggccctgactctggctcccgcaggtggacactgacaccatctggaatgagcttcattcctccaatgcagcccgctgggccgctggcagtgtcactgacctcgccttcaaagtggcttctcgtgagctaaaggtaggaggtttgggttgaaggtggacacaccacaaaggaggaagcagagtggggtagtggggaatccaggcccagaaccccaggcatcgcattcctcttagagattgctacagggttttggaggggaaattgagggctctgggaaccaggttgagattggaactcttggggtac

SEQ ID NO: 9377 - DNA, 2300 bp, Homo sapien
cgctgctgactggtgagtctgctgcttcttcagggaaggggctgggtccctgcaccctgctaagagccaagcttgggatggacccatccttcctccccatctctgtccccctgtcctgcgcattgccctgctgcaccctggccccccaccctataccctcgcttccttccattgctccctgtggttccctccttattccaccccccgattctttccagtgcccgggcttgggcccttgcccttccactttgcccagtccttaatgaccaccgagcggctctctgggtcaggcctccactggccactgagccggactcgctcagagcccctgccccccagtgccaccgctcccccaccgccgggccccatgcagccccgcctggagcagctcaaaactcacgtccaggtgatcaaggtgagaggaattgggcagtggaggtattgagggagtgtttaactggggacttaggggccaaaagaagaggggtacttagaaagggcagggaactggagggcaaaagagggggatgtggcttcttggggcccagagctgcatggcagctggagtcctagcaagatgactggctgcctggcccagcccaccacctcccaccccatgcccctcgctccaccatggcttctcagccaggttctcccctccccagaggtcagccaagccgagtgagaagccccggctgcggcagataccctcggctgaagacctggagacagatggcgggggaccgggccaggtggtggacgatggcctggagcacagggagctgggccatgggcagcctgaggccagaggccccgctcctctccagcagcaccctcaggtatggcagtccccacctgcccctcagaaagtgtcctcagaagactctggggcctggcataagatggggaagggagggagatacgacatcagtgcaacaggcagctctaggacccatggttgccctataagatcctgggtgctggatccacactaaggtgtaggcacacacacacatgcacactcacacacccatacacacacatacacacaacagcttgccagtctcaggtgaagcatgtcccttttccaggaaggagtctgtcctttcctggagccacacatagtcctgccctggtatgtctcccctctatccagaaaggtggctagggccagaggtgggatggagccaggctccagcgtgtccagcagaatgctctcactgtgggaatcaagacccagtgcattagcttgccggagctgttgggatacaggctgggcgccttaaacagcaggcatttaccatctcacagttctggaggctggaagtcaaaatcgaggtgttggtggagttggttccttctgggggctgtgagtgtgagggcaggggctgttcccggtctctctccttggcttgtggatggtcatcttcttcctgtggcttcatgtggtttccctctgtgaatgcctgttcagatttcctcttcctataaggacaatagtcatactgggttaaggcccaccctaacgacctcattttaatttgattacttctgtttgtaaagaccctatctctgaataaggtcatgtttagaggtactgggggttgggacttcaacatataaatttgagggtggggaacataatttactccataacacatgatgacaggccacacacatgttcttgaacagttacatagtccaggacaggaggacatcctggtcagcacaagatccagcgcccctcccctggttcctggctttggagccccaagggcccggggagctggtggaatgggtggtcagtctggggtgcaaacctgtcagggggctgcaggggacagggggcttagagagtcaaaggccagagccccactggacagcaggtctaggtttatcctggaatctctctaggaaaggggcctgcttggcagttcccaagacctcaggcagaagtagagggagcaggaccctgaaacactggagaccaaggccccatctttcccctaggtgttgctctgggaacagcagcgactggctgggcggctcccccggggcagcaccggggacactgtgctgcttcctctggcccagggtgggcaccggcctctgtcccgggctcagtcttccccagccgcacctgcctcactgtcagccccagagcctgccagccaggcccgagtcctctccagctcagagacccctgccaggaccctgcccttcaccacaggtgagaccgggaggagggtggcgggtggagggaggggctcggctgcacgagtccatgtgggtgtcttggt

SEQ ID NO: 9378 - DNA, 2300 bp, Homo sapien
aggggtcccctccttaggactgccatgcgtggttgcatgggggtgtcccacacacttgccgaagcgggggagttggggctgaaacccagtccctgctctgttagctaaggtgacatctcccagaaaagggggcacccttcaaaaaattatgcaaaggtgctgtaggccaaaggtggcctgtcttcttcctgctctgatgggaagaaagcaggaggccgggcgcggtggttcacgcctataatctcagcactttgggaggctgaggcaggtcaatcacctgaggttaggagtttgagaccagcctggacaatatggtgaaaccctgtctctactaaaaatacaaaaattagccaggcacggtggtgcatgcctgtagtcccagctacttgggaggctgagccaggagaatcgcttgaacccaggaggtggaggttgcagtgagccgggatcgtgccattgcactccagcctgggcaacagagcaagactctgtctcaaaaaaaaaaaaaaagaaagcaggaagcaaaggtgctcgttaaggaagggggtgctcccgggtctcctgcaccaggcggcctggctgtaccctcctgcccaccctggcctctgactgcacttccctctctccccaaccctcagactcctccccaagtagtagcagcacgcccgcatcagggtgcagctcccccaatgacagcgagcacggccccaatcccatcctgggctcggaggtaaggccttgccgagactgggctctcctggggcagttctgaggctcagccttcttccagcaggcggccctacctgggctggggctgcagggtctgggcagcccctgccagagcctcctgggtgttctggggaaggtgcgccggggtagaggtctgggaccggtgaccctcgccctgctccctatggcaggcgctcttgggccagcggctgcggctgcaggagacttctgtggccccgttcgccttgccgacagtgtccttgctgcccgcaatcactctggggctgcccgcccctgccagggtgagtggctggggtgcccacccccactccaagcccccccagcttctttcactcccttttcttgctgcctcaccccatcatcttcattgttctctgctggaatcttcttccccgtgacttctcccgcctctcccccaggctgacagtgaccgcaggacccatccgactctgggccctcgggggccaatcctggggagcccccacactcccctcttcctgccccatggcttggagcccgaggctgggggcaccttgccctctcgcctgcagcccattctcctcctggacccctcaggctctcatgccccgctgctgactggtgagtctgctgcttcttcagggaaggggctgggtccctgcaccctgctaagagccaagcttgggatggacccatccttcctccccatctctgtccccctgtcctgcgcattgccctgctgcaccctggccccccaccctataccctcgcttccttccattgctccctgtggttccctccttattccaccccccgattctttccagtgcccgggcttgggcccttgcccttccactttgcccagtccttaatgaccaccgagcggctctctgggtcaggcctccactggccactgagccggactcgctcagagcccctgccccccagtgccaccgctcccccaccgccgggccccatgcagccccgcctggagcagctcaaaactcacgtccaggtgatcaaggtgagaggaattgggcagtggaggtattgagggagtgtttaactggggacttaggggccaaaagaagaggggtacttagaaagggcagggaactggagggcaaaagagggggatgtggcttcttggggcccagagctgcatggcagctggagtcctagcaagatgactggctgcctggcccagcccaccacctcccaccccatgcccctcgctccaccatggcttctcagccaggttctcccctccccagaggtcagccaagccgagtgagaagccccggctgcggcagataccctcggctgaagacctggagacagatggcgggggaccgggccaggtggtggacgatggcctggagcacagggagctgggccatgggcagcctgaggccagaggccccgctcctctccagcagcaccctcaggtatggcagtccccacctgcccctcagaaagtgtcctcagaagactctggggcctggcataagatggggaagggagggagatacgacatcagtgcaacaggcagctctaggacccatggttgc

SEQ ID NO: 9379 - DNA, 2300 bp, Homo sapien
atgcaccctccacccccgcccccgtgttagccatgagcacacacacttgcctccttcctccccagttgccacaaccagtccttacccttcctctaaacataatgcccccgagcccctctctcaactgatacctgccctcctctctttaaattctccccaccccacctgagcccttctcacacacacacacacacacacacacacacacacacacacaccctactggcttttttcttgcacatgagccccttctctctttatattttccctgagcgcaaaaatgtcctggttcccagagcaggttcctagtgcaggtgacagagcccccagtgggctcttcacccacgcaccaagcacctggcttctatgcctaggtcagagctctgcactatagctgctggagcggacaggcggcccactgctgccacctggagatggtccccattcctaccagccccacattgcccagccctgcccgctgcagcctccccctcaggtcccagggcccgtgctcagggcagtgcccgtgcagtgtccccacacctctgaagcagccttggcactcgttctgtagaaccctggagcccctggagacggaaggagccacccgctccatgctcagcagctttttgcctcctgttcccagcctgcccagtgaccccccagagcacttccctctgcgcaagacaggtgagctgaacaaacaggcggacctttcaggcaaaggaagggggaagggcctcggacatgggggaggagtgtgcaggggtgggcgggctgggctgggccaggagatcatcggtaggctaggatcttctttctagttctgccttctctttccttgaccgatagagatgactgggactgaggggttaaagggtggaaaaaagaagggtggtgggggcctgagtgacgctggtgctccctgcagtctctgagcccaacctgaagctgcgctataagcccaagaagtccctggagcggaggaagaatccactgctccgaaaggagagtgcgccccccagcctccggcggcggcccgcagagaccctcggaggtgagggccggctgagccagtgcggttgccatcctcaaacctggctggtcttgtccctttgggtcaggccccacctagacaggggtcccctccttaggactgccatgcgtggttgcatgggggtgtcccacacacttgccgaagcgggggagttggggctgaaacccagtccctgctctgttagctaaggtgacatctcccagaaaagggggcacccttcaaaaaattatgcaaaggtgctgtaggccaaaggtggcctgtcttcttcctgctctgatgggaagaaagcaggaggccgggcgcggtggttcacgcctataatctcagcactttgggaggctgaggcaggtcaatcacctgaggttaggagtttgagaccagcctggacaatatggtgaaaccctgtctctactaaaaatacaaaaattagccaggcacggtggtgcatgcctgtagtcccagctacttgggaggctgagccaggagaatcgcttgaacccaggaggtggaggttgcagtgagccgggatcgtgccattgcactccagcctgggcaacagagcaagactctgtctcaaaaaaaaaaaaaaagaaagcaggaagcaaaggtgctcgttaaggaagggggtgctcccgggtctcctgcaccaggcggcctggctgtaccctcctgcccaccctggcctctgactgcacttccctctctccccaaccctcagactcctccccaagtagtagcagcacgcccgcatcagggtgcagctcccccaatgacagcgagcacggccccaatcccatcctgggctcggaggtaaggccttgccgagactgggctctcctggggcagttctgaggctcagccttcttccagcaggcggccctacctgggctggggctgcagggtctgggcagcccctgccagagcctcctgggtgttctggggaaggtgcgccggggtagaggtctgggaccggtgaccctcgccctgctccctatggcaggcgctcttgggccagcggctgcggctgcaggagacttctgtggccccgttcgccttgccgacagtgtccttgctgcccgcaatcactctggggctgcccgcccctgccagggtgagtggctggggtgcccacccccactccaagcccccccagcttctttcactcccttttcttgctgcctcaccccatcatcttcattgttctctgctggaatcttcttccccgtgacttctcccgcctctc

SEQ ID NO: 9380 - DNA, 2300 bp, Homo sapien
cttggtaggaccagaacccatgctagctctgcccctagcagggtgactttggacagggcccttcacctccgagcctcggtttccttatttaggataacaagatagtaatgactaccccccggggccagtggcttgatgtagctgctcatgcacaagtgctgtagatgtaaagattgtggttaggagtggccagcttgggcctggaggctatgatttctgactcctggactggtactttgccacaggcctttccagccctcctcagccccaatccctgaggacagtctgtggctgccccactgggagatgcccagcgttggaattgctgaaggaggcctctccaggaaggcttctccacttgtgtgccctcccatggggccggcctgctcctaccccacccacttccccttctccaggataagcccgctgcaacagctccgtctcccagtgtctcagcctctctggctgctcagcccagcctggtccagctggctatgctggcatggaccctagtctggtggccagttataaatagcccctgcacccacagccttggcagggtgctcctagtgtgggtgcagaggacacttgagaagaggcagccgtgcctgccatcctgaccatgccaggcccagagctgccatggaggcacccaggagcaggcccaaggacacatgggccctatgagctgaggaacctgccctgggcacagggttctgcaggcccaacgtggccggtcagggctggctgtaggcttgaggcatcactttatctcatgactggggatagagcatgggagggtggcgacccagagggcctgtgaggcttggggctggaggcagaacaaagtgggcctgtttgcctgcctgattgcttcctttgagcccaactcattagagggcagctgggcaaatcctctgattccagggagggatgaagggagggagaaggcagggccaagaatgtcctaccataggatctgcagcccatcggagatcactgtagccctcagcccccggcccagggaggagcatgtttagtggaggagcactgtggtggagtcggaagactccgttcaaacaccaccagtgatacagtgttactgtgcacagttcatgtgacttttttctcacgagtaaaatggaattgataatacctaccttgcaggaccacgacaggattaagtgaggaaaaacccccatgagagtgttttgccattgtcaagtgagcctgagggaggctgaggggggatcaggctgtatcatgcccccgaggacaaactttccagtttaccctgctccctctctctgtccctaggctgccccaggccctgtgcagacacaccaggccctcagccgcagcccatggacctgcgggtgggccagcggcccccagtggagcccccaccagagcccacattgctggccctgcagcgtccccagcgcctgcaccaccacctcttcctagcaggcctgcagcagcagcgctcggtggagcccatgagggtaaagatggagctccctgcatgtggggccaccttgagcttggtccccagcctccccgccttcagcatccctagacaccagtctcagtcctcaactccttgtccctttctgggctgccggccctgcccacagctctccatggacacgccgatgcccgagttgcaggtgggaccccaggaacaagagctgcggcagcttctccacaaggacaagagcaagcgaagtaaggaggtggccaccccagcccagcccagccccaccagccaggtgcctgcggctgcctgtgtggcttgtgaggggtgaggtgggagggccgcagccagctgggcctgagccgaggctttccctctgcttgcctgggctctgcctgtgaatgtgtgggggatgtgggggtggggggtggtgtctggaggctctagggaggggtagggcctcgggcttggctcttgcctagggagtccctgggacgcctcctactgaggatggggacagggcagtggccaggtagtgccacgaggccgcctgtccacccacctccagccccctcctgactctgcccctacaggtgctgtagccagcagcgtggtcaagcagaagctagcggaggtgattctgaaaaaacagcaggcggccctagaaagaacagtccatcccaacagccccggcattccctacaggtaacaccctcctcacctgccctcctgtccccacatgcaccctccacccccgcccccgtgttagccatgagcacacacacttgcctccttcctccccagttgccacaaccagtcctta

SEQ ID NO: 9381 - DNA, 2300 bp, Homo sapien
tatggagcttaactcagacatggtacctgcccacagagcactaatcctggtgtggaacagccatgtgattggagtccaaaagagggagggatgctaggcgctggctgggtccagggatgagggaggactccagctgagctttgagcaaagagtaggatttggaaaagtagaatgtagggatgaggacagcacaggcagggggacattgtgagcaaaaggtcagagaacagaagagatgtggatttgtgacaggtggaagctgatggccaaggtggagggttcatgttcaaatgcagaccaagttgagagaagccaagttaggaccagattgtggagcctcacaaatgctaaagcacctcgaaaagtatttccagggctccaggcagagcccatcctgtattcccttctgctgtggaggcagtggccatgcagagtgtgaggggaagggcccctgctgggggtctgctcacagtccgtatgtggctgaagccactggtcttgggtccaggtcgctggccttggttcccccaagcccctcttgcataatcaggggagtcaccccgggaagccaggacacagaacatggaaggactgaaacctttcctggggcaggagtgttttggtattcgaaacccagactcaacccgaatgagaatccggatttcttgggaggcaatgtgaacaaggggtggggcatcaaagccatacattttctactgcgggcggcatctgggtgcacagccatcactgtccctccaggcctcttgatattcgggggacatggcgggcacctccttgctgggctcctgtcttgtgtccatgtcacagtcagggaatgttagagtgaatgccctttaatgacagcctactgcaaacccctctttgcttagtgagaaagccccttgaggggaggtgaattcctgaaagttggtgggaaactggagtacctgccttggtaggaccagaacccatgctagctctgcccctagcagggtgactttggacagggcccttcacctccgagcctcggtttccttatttaggataacaagatagtaatgactaccccccggggccagtggcttgatgtagctgctcatgcacaagtgctgtagatgtaaagattgtggttaggagtggccagcttgggcctggaggctatgatttctgactcctggactggtactttgccacaggcctttccagccctcctcagccccaatccctgaggacagtctgtggctgccccactgggagatgcccagcgttggaattgctgaaggaggcctctccaggaaggcttctccacttgtgtgccctcccatggggccggcctgctcctaccccacccacttccccttctccaggataagcccgctgcaacagctccgtctcccagtgtctcagcctctctggctgctcagcccagcctggtccagctggctatgctggcatggaccctagtctggtggccagttataaatagcccctgcacccacagccttggcagggtgctcctagtgtgggtgcagaggacacttgagaagaggcagccgtgcctgccatcctgaccatgccaggcccagagctgccatggaggcacccaggagcaggcccaaggacacatgggccctatgagctgaggaacctgccctgggcacagggttctgcaggcccaacgtggccggtcagggctggctgtaggcttgaggcatcactttatctcatgactggggatagagcatgggagggtggcgacccagagggcctgtgaggcttggggctggaggcagaacaaagtgggcctgtttgcctgcctgattgcttcctttgagcccaactcattagagggcagctgggcaaatcctctgattccagggagggatgaagggagggagaaggcagggccaagaatgtcctaccataggatctgcagcccatcggagatcactgtagccctcagcccccggcccagggaggagcatgtttagtggaggagcactgtggtggagtcggaagactccgttcaaacaccaccagtgatacagtgttactgtgcacagttcatgtgacttttttctcacgagtaaaatggaattgataatacctaccttgcaggaccacgacaggattaagtgaggaaaaacccccatgagagtgttttgccattgtcaagtgagcctgagggaggctgaggggggatcaggctgtatcatgcccccgaggacaaactttccagtttaccctgctccctctctctgtccctaggctgccccaggccctgtgcagacacaccaggc

SEQ ID NO: 9382 - DNA, 2300 bp, Homo sapien
gcaagacactacaagaaatgcacccatgaccaaggcagtagctggactcagggatatccactcttgaatgctcttggaaggaagagagttgagacaagtagactaggtgggcgaaggtcaatgtataaagaccacacagttcagggaagaattcctcttggctatgggaatccgggaaagcctcccggagaaagtggtatgccactttctttttcttccagtccttccttccttccttccttccttccctccctccctccctcccactagatagggagtgggtcttgaggattggaaagatttcaacagaaggagaaaggggctgggaggacatttcttttggaggcagcatgatgagcgaaggcaagggagtgtggaagcgtgaggacaggatgggaagcagctagcagcccagtctggcagaaataatgatagtaataatagtgactaacactactgagccctaagtaccaggaggcactgggcagggatgtgtatggagtgtggtgccaggttgtaggaggacttgaatgccaggaaaggcttttgggagggtaagttaacaagcgcagaggggttggatctgcctgccgaaggagaactgggacaaggaaaggggctgaagtaagaagtcccacgctgaatatgccggtagcaacagatagtgagtcccgagctgtgcctgagggaagggaatagaatctatggtttgaagttcaccgccagcatggccaagccctcctaggccactgtgggctcttgcttccaatcagacatgactccacctctggggctgcctcaatttttccttctctggattcttggggtttcttaggattgcgggagatagaatggggtcaggggaagctgctccttggtttacaatggtggcgcctcacgctgcagagagcccagtgttcctgcgtggtggacctctccccttcctaggagcagctccagattgctggaggcagacacggctgaccggctagcccaggaagcacaatggcgaggtccttagcccctgacccctgaatctgaccttctctccagctaaaagcggagggagaggcagggagggccactgcctaaagccggccctgagctgagtttattagctgagggagggctggaggcggctgcattccgactcacagactggaacatttctgtgatccgctgtaatgcactgggggacactgggcacattgctgaagtttgactcatagggaccgggagggggaaagaggggggttgtggagggagaggaatgggaggaagagaggaagaggagaggagggaaggaagtcccttgagaaatttctttaaaaaaagaaaactttcaaaatctgcaccacccccacaccctttttcttttaataggaacaggctggacccttccgttcccctcagcaggcatggtgtgtgtgtgggggtgccagtgggggagggctgggcagtgattcaaatcagatcctggaactttcctgaggcaagtcgtgcttatgtgtgtgtgtgtgtggtggggggtgtccgtctgggattccttgtatgggacatgggacaccacgcgtgtcccactgtgcccgcgtgtggctgcgtgcttgtgggctgtacgggtatgtagtgtgtgcacgggggtccaccccgaagccccagtgtgtgctgtgtaaatgattctgccccttgtaaacatggatgcgtgctcgtgtacgttgtgtatgcgagggtgcgtgcgcccaggtagctgggtttccgggaattgtgcacggctcggagcgcctcgcggcggctggggctcggagccgcggccggcgttccgggttcggcgctgcctccccggcagtgcgccgcgccccgccgcgatctggccgcgcgcggtgtctgcggcccgcctgtgcgccgcgcggtgcagtgtctgccggggtggtgtgtcccagggccgcgagcgcctgccccctccctcccctcccccttggcccgctctcagactcagataaagcatttccttccattgtcatcctacccggccggccgggctgccagggccctccccctcccggccccctcccttcctctcgccgtctcacagtcgctctgcagcctccggcgactggggggatgtgaggccggcgccccagccccccgccccgccatgagccccccgctctgagggccccggcccctggatgcacagccccggcgctggtgagtactgggcggccgccccccgccccgccctgcgcgcggcacccagcgtcgcccgcccaggctcggcctccggccctggccccggctcc

SEQ ID NO: 9383 - DNA, 2300 bp, Homo sapien
ggaaagaagtggtgcagataagcaagaatatgttatcatcagtcccaaagggacagagggaatcccggtcacagacctcggagattccctaacctcatttagcttttcttttcctggaaaccttaatgtattaggttggtgcaaaagtaattgtggttttggccatcaaaaataatggcaaagatcgcaattacttttgaactatcctaatagtaatagtgacactattgctaatttctttcacagctagatttatacttgctaaactctaatgtatatataatatatacattaaatatataaatacatattaatatatattatatattaatatatattaaatatataaatacatatttaatgtatatattaaattttagcagctacatatacattaaagtttagcaagtataaatatatacctatatataaagagagaagcactttcagaaagagaacaaagatcattgcagcgatagcaaagacacagaatcaacccaggtgcccatcaactctggactagataaagaaaatacagtatatgtgtgtgtgtgtgtatatatatatatatacacacacatatactgtcctttttacacacgtatactgtcctttttacacacatacactgtcctttttcctttgcagcaacatggatacagctggagaccattatcctaaggaaacaaagccagaaacagaaaacaaaatagcacatgttctcacttataagtgggaactaaacatcatgtacatatggacataaagatgagaacaatggacactgggaatacaagtggacaggggcaggggctgaaaaacaacctattgagtactatgctcgctacctgggagacaattcattcatactcaaaacctcagtatcttgcaatatacctttgtaacaaacctgcacaggtaccccctgaacctataagaaaagttcagaaaaaaagaacaaaggaatgattaacagaaacctttggagagatgagatcggggaggggtgtgcattatatagtagcagtattctattttttgagtagtgagcatatggtatcttcttcttattattattagcaaaacactacatctatgttttgtatatctgtgtttgcatgcccttctgaatatacaaaacgtttcataatttaaaaaacaattaaaaatagaaaaagtgcttgtggatctatcaacattgtccccaaagaccatcccaagtccaagctgatgcctgcaggttttagaacatagcacacattcaagatgtggccagcatcccggaggcccaatatcattgtggggtaataggggaaactgtccaggatgcttgtggcttaaccctgggtcagctgagatgctgcagctccgagtcatcgtggtgttgctacagagtctgggtcatccaggctcccaagtatccggtggatttcgtggaaaacagagaaatcaaatggggggtaggaaggaatatctgttaaatcagtcaacacatgttcagcatcacatggactcatttggagatgctatgatgcaagcgagtggaacaacatactaccacagcacagcaacggggcagtcctgcaatggggtggggtgctgccttgacatcaggaagtctctatgctgggggtgaaggctggaaaggctggatcaagcagccagaggcccacagtgaatgagaccatttcaggggagctgacagaagacccaaccctgcttgaggttatttgctgctatcaagaagccagcgcccaggaccagagtccacatgtggagatgtccaagcctctgtggcttgagagctgaaagtcccaggaatgacaggcagagactaaagaaggcagcaaagagaaagaggagatgggggctggataggaaacatcagacgcacaggagagcccagccagggtcgtggctggagccagcaagccccatctcctgagcccttctctgaactcccacccgcaccccacacactcatgcatctcagttgcagactctgctggcccgggacccaccttgcaaaatcctgggtggtatcccttccttcccctgcccaccaccttcttatgcccctcccccccaccccgccccttgaaaacagaaagccagggaagttgcggctgatgaggaaacacctacctgaaggagcagggggcaggtaagtggagcccaggggtgctcttctgtgaggtctcacagacacttcagacccaaaggcttctgaaatgaagaaggggaaaccttttatctaaggcggagcgctgaccgcctccccagtctctaaggaagtgggc

SEQ ID NO: 9384 - DNA, 2300 bp, Homo sapien
gggaccgtgatgacatctataatcttgcccatctgccaaacgcagaacctctgagttcttcaactctgtgaaaagtgcatgcatggaaattttttttttgttttttagaggcagcatgaaacagtgggatgtgcagagagaagatctgggtccagtagctctgacactcctcagctgtagaaaccttgacaactctgcacatcagttgtacaatggaacggtattttttactcttcatgtctgaaaaggctatgataaagatcaagtaagatattccaaagaatttttaaattataaagcagtttacacatgtgaattacaagtacctctcctccaacaaaggctgtgaaaaaagactaactctcagttactacggaatacttagtacgcatcttccaccatcttttgataaggtttatttgcaagatgtcaggccagtcaagcaccacaaaagtgacttctgagtgttcaacctctttcagaggctcatgggacttgcagagaatgtcccaaggtattggtggttggaaatttcctcttatgcttttcttcccacaagaatcaccgctagctttcccacgatgctttgggcaaggggatccttcctattactttcattacaggtagagaatccatccatcagactggcaggacctctaaaggggcacttcatctgtttctcagaataaatggtccattcccaagttcaatcaaacgctatgcctctcttctgtcttttgtttaagtcttcccagaaagttgccatgatacctccataatgaactgttgcagtgcttaacaaacttcactgttggaaggttcttccttctatttaatctcagtctatttcttttaaccctattattgagttgtgaggggctggttatgatgtagtccagcatagctgtctcagaaatggttcagagaccattgcaccagcagatttgctgggctctagcactagtccttcattgattagctgagtcatgttgggcatatcacttaaactttctatgcctcaatttcccaccctttcaccttgtccctctgagccatggtttcctcctctgtaagaggcgaatagcaatatcttccctggctaaaggaggtcatcgactgctggatgattttgtgagcatttctattccagaagattatgttgtaattactatttatttatacattctcccactgcacagtgagttctaagaagagggaaccccatctttttcacctgtcctctagcagatagagcggtgcctatcacacagtcaagggaagcagagaataactttaagccaaaatttcctgtggtgagttttccgcagccatccacaattccaggtctcaggaggtagtctttatcttttcccctcacgccgatgccacggggcggggggggaaggcggaactcgggaccagggaccagggaagctgagactcagctcccttgggtgagattcgcgacaggccgggaacgtggtcagccgcggtcgctgccaaggtgatatcgggtgggagcaatgacgcaactccggtttccacttcggccccccgggatattttaccctaatctgtgggatcaggctgagcttcctggcgttctgcagcagtaacaggttggcgagcggagcccgggatttcccattcgtgcggagctagccgccggtgccagtcggcaggcgccccccagcgtcccgcggacgacgaagtcctggcctggtcagcccaggtgggggtgacgcacctggctcaggcgtccgcagcaggctgggtagaaccacggcaggaagggtggggggctgcatccccgattaacacaggctgaagcgggtatccgcacctataatcatcgacaactctgtcccacagagggcagaagcgtgccttgccctatggacgacggtcgatgaaaatttcacgagttagagtatctaaggctacagcgtggcctatagggtggttgattccaagtcaagatggttgcagcgccaacggagctcctggcaagagaggactggacctgtgggcggggcggaggggcggggcggggccggggcggggcctgaccgagaggcggggccaggtgctgggctgtctctgcttgtcaaaaggcggcagcggagccgtgtgcgccgggagcgcggaacagcttgtccacccgccggccggaccaggtgcgaacccgggagcagcgggaaagggggtctcaggatagggactcggggtcggggcgtctgggataccggggcctgagcgcccggctgcgagcattagagtctaagtctcagcggtaaact

SEQ ID NO: 9385 - DNA, 2300 bp, Homo sapien
ggggaatcgttttctgtgacccaacagatgaaaaaaaaaaaaacatttcaagaaggagaagaggtggatcagagatgtgagaggggaagtagagggtccttgttgcctcttactaaagactcagtgggctgattgtggccagtggtcaggcagatggctagacaacagcaggtacattggcattccccacaggagaaagaggaaaatacagaggtggcagaaacctgaggggtcaccagcctcagcctcactctctattgccaagtgggccccttattcatcccatttcagaatatctcctctcccctagcatcatctttaataatttcacctggttaatgtctgtactcaactcctgctgctgcaggctaagctcaacctggcagtatgaacaaagaaacccacccattaaaaagtaccctctaggccgggcacagtggctcacgcctgtaatcccagcactttgagaggccaaggtgggcagatcacctgaggtcaggggtttgaggccagcctggtcaacatggtgagacccggtctccactaaaaatacaaaaattagccaggtgtggaggtgtgcgcctgtaatcccagctacttgtgaggctgaggcaggagaatcgcttgaacccgggaggcggaggttgcagtgagctgagactgtgccactgtactccagcctggtcgacagagcaagactccatctcaaaacaaacgaacaaacaaacaaacgaacgaaaagtgctttctaacctcttacgtacgtgccttttttgtggaggtctggggaagggggggccctactaccgaatgaatctactccttggtgcctcttggcacctaattggcttgcaaagctcagctgtggggtccgttcctgcgagaagccagcaggactccccatggaaggtttcccccaggctgggcccctctgacttgtgagacttccagcagcacttttatctacagtattggaggggtctgatgaagcctctgggttcccctcctggactgaagacaggttctgatataattgccggacgggttctccttgcccgttgcccagagctgattcatcaagacaggggaattgcaatggagattttaattcatgcagagccggctgaatgagataccagagttttatcactcaaataagtctccccgataattcagagactggggttttttaaggataattcggctggtaggtatcaggcagtggggagtgctgattggtcaggttggagatgaaatcataggggggtctaagtgggttcttcttgctgttttctgttcctgggtgggattgcagaactggctgagccagataactggtctaggtactgccagctggtgcctcagaatgcagggtctgaaaaatatccccagcaccgatcttagattttacaatagtgatgttatcccttggagcaatagggaaggtttggaatcttgtgacctctgtctggatgactcctaaaccataatttctaatcttgtggctaatttgttagtcttacaaaggcagtctggtccccaggcaagaagggggtttgttttggggaagggctgttatctttgcttcgaagttcaactataaactaaattcctcccaaagttagtttggcctatacccaggaatgaacaagggcagttcggaggttagaagcaagacggaactgggtaagtcagatctctttcactgtcataattttctcacttacaatttttgcaaaggcagtttatccgaatgctccgcatgtgtgtaccctcagcgactacacagctcctgtactataaagaatatttcagaatggcttcggtagccggcagcaccttcctcctctcgcagcagagaagtgttttgctctggaaacttgactggagcctttcccagcctatctagcgaacagcagagcatcatcccgactccgcggactaccgcggcccaacagcaagggtcgcggctccccggcgctctctgccgccctctaccggaaccgagggagccagacagctgcgatattgggaaggcctccggagccgcgaagagcgcacgcgcgagcgcgcgcccgcgttctcctggcgggcttggtatttggcgcctgcgcgctgagtgcgtgccgctccgccgaccgaagaggctggtaagtcctcaagctggcaggtggtcgggggagcggccggagaggagctgccgggagttcgtgccctgcaggtctgcgacgctggcgttcgctcctgcctgggccactttggtgggctcagagcatcgctttttgccaaggggcgtgacc

SEQ ID NO: 9386 - DNA, 2300 bp, Homo sapien
tgaacccgggaggcggaggttgcagtgagctgagactgtgccactgtactccagcctggtcgacagagcaagactccatctcaaaacaaacgaacaaacaaacaaacgaacgaaaagtgctttctaacctcttacgtacgtgccttttttgtggaggtctggggaagggggggccctactaccgaatgaatctactccttggtgcctcttggcacctaattggcttgcaaagctcagctgtggggtccgttcctgcgagaagccagcaggactccccatggaaggtttcccccaggctgggcccctctgacttgtgagacttccagcagcacttttatctacagtattggaggggtctgatgaagcctctgggttcccctcctggactgaagacaggttctgatataattgccggacgggttctccttgcccgttgcccagagctgattcatcaagacaggggaattgcaatggagattttaattcatgcagagccggctgaatgagataccagagttttatcactcaaataagtctccccgataattcagagactggggttttttaaggataattcggctggtaggtatcaggcagtggggagtgctgattggtcaggttggagatgaaatcataggggggtctaagtgggttcttcttgctgttttctgttcctgggtgggattgcagaactggctgagccagataactggtctaggtactgccagctggtgcctcagaatgcagggtctgaaaaatatccccagcaccgatcttagattttacaatagtgatgttatcccttggagcaatagggaaggtttggaatcttgtgacctctgtctggatgactcctaaaccataatttctaatcttgtggctaatttgttagtcttacaaaggcagtctggtccccaggcaagaagggggtttgttttggggaagggctgttatctttgcttcgaagttcaactataaactaaattcctcccaaagttagtttggcctatacccaggaatgaacaagggcagttcggaggttagaagcaagacggaactgggtaagtcagatctctttcactgtcataattttctcacttacaatttttgcaaaggcagtttatccgaatgctccgcatgtgtgtaccctcagcgactacacagctcctgtactataaagaatatttcagaatggcttcggtagccggcagcaccttcctcctctcgcagcagagaagtgttttgctctggaaacttgactggagcctttcccagcctatctagcgaacagcagagcatcatcccgactccgcggactaccgcggcccaacagcaagggtcgcggctccccggcgctctctgccgccctctaccggaaccgagggagccagacagctgcgatattgggaaggcctccggagccgcgaagagcgcacgcgcgagcgcgcgcccgcgttctcctggcgggcttggtatttggcgcctgcgcgctgagtgcgtgccgctccgccgaccgaagaggctggtaagtcctcaagctggcaggtggtcgggggagcggccggagaggagctgccgggagttcgtgccctgcaggtctgcgacgctggcgttcgctcctgcctgggccactttggtgggctcagagcatcgctttttgccaaggggcgtgacctgagcccgcctcctggggctggggggtggagaggaatgggaatcgttaaggccggttatcaatttggtgcctgtttgttgctcgaggaggggcatagagcttacaaatagtgaagaggaaggggcgaggctggaccaggtgggagcgggggtgccccaagtcccagggcggtgaggatcgaggcaggtgcgtgaaaggcaggccccgttccccctccccacccccgccggctgtgtgtggcgggtaagaggagagtgggtagcactactacaaaatgagggtcccgatagaaatcgtacaggtgttgggaccacactcagggcggcaacttgtcatttttgcgtttttaattttcttatagaaacaagcgatttctgtcgtgattcactggggccgctaacgtgcactccctcttttcatcttaggacatgacaccagtggcatatcacggccatggggtctcagcattccgctgctgctcgcccctcctcctgcaggcgaaagcaagaagatgacagggacggtttgctggctgaacgagagcaggaagaagccattgctcagttcccatatgtggaattcaccgggagagatagcatcacctgtctcacgtgccaggggacag

SEQ ID NO: 9387 - DNA, 2300 bp, Homo sapien
agggaggagagattccaggtagatgggagaaagcaaagcaagcaggagctggagaagttggggctgtctgcccagagctgtctcacatggtgagaaggttgcagcggtagattggggttgggggggttaagctgcctgcccttagtgtggggaggtagagaagcccccagagaggaaactgctgtcactgaggccacagtgactttggcagcctggatgaggaagggtgagatgagtcctcacttcccgcattttctccttctagggcaaccctggaccccctggtccccctggtccttctggaaaagatggtcccaaaggtgctcgaggagacagcggcccccctggccgagctggtgaacccggcctccaaggtcctgctggaccccctggcgagaagggagagcctggagatgacggtccctctgtaagtccctcaccaggcccatgccaaggtccctgggagcagggtcgtgagtggcttctgagctcacagagcatggggtaggagggagcaggggccgtggggatgccagggagcggggctgcacagacagagctgtgctgagaggacagaagaggctgggccactgtcagttctcatctcctgcctctcctctctcagggtgccgaaggtccaccaggtccccagggtctggctggtcagagaggcatcgtcggtctgcctgggcaacgtggtgagagaggattccctggcttgcctggcccgtcggtgagtgtggggtatccctccctccatccaagctgggccctgcctgccaaggcttctacctccctcagcaccctcaggactgtcccttgtctgccctctccctgaagggtcagtgggccctgggcaggggtgcttaccacttgcactcatcatccttgtctctgtccctccagggtgagcccggcaagcagggtgctcctggagcatctggagacagaggtcctcctggccccgtgggtcctcctggcctgacgggtcctgcaggtgaacctggacgagaggtgagcagtgagaccccctggggtggccctgattggggagaggggccctgtgagtctctgtgctgggtcagcaaggacaagtcccagtcagggccctggagaagggggtggcagtgtcggccgacaggcctgaaagcctaggtacaatgggaaggttgtcggggagagagacgggcatagagaccaagggctgcttccggaaggaggagggaaacttggtgaggaaactttggcttcaaagtgtgagtgagttgggcagaagaggagaggcctgggcttctgagaggggctgggggagcagagggggagatgggcaggaagcagctctaagtgcattcttgtttcactttgtccagggaagccccggtgctgatggcccccctggcagagatggcgctgctggagtcaaggtgagtgtctggtgtctgtgtgtgcagtgggttggggaggacattgcctcgggcctgacaggtcagctgggggtggcaggttggaacaagtctcatctcagcctagaaggaccttctgttcctgtctcttctggaacattcttctctgagcctgagacctctctcctgacagggtgatcgtggtgagactggtgctgtgggagctcctggagcccctgggccccctggctcccctggccccgctggtccaactggcaagcaaggagacagaggagaagctgtaagtatcctgaattcagtaaaagccgccttcccctgcgcggtggggctgaggcagtccctgggtttccgcagtctctggactaaggagcagtggcctcagatgcagaggaggcccccacctgtcctggcttttctctgacgctgcgctcactctctcctcagggtgcacaaggccccatgggaccctcaggaccagctggagcccggggaatccaggtgagtatccaagtgtcctgcactgagtccccaccagggataggctgggagggcagccagcctccaggtggttcctgggcctccagccctgtgtttccggggattcctcagcttgggtgggacaggagggggctcctgtcctggccctgacctgactcaatcggtgtctgtcttgttcccagggtcctcaaggccccagaggtgacaaaggagaggctggagagcctggcgagagaggcctgaagggacaccgtggcttcactggtctgcagggtctgcccggccctcctgtgagtgtcactgcctgcgtgggacttcccgaggcctcctgccacacagagcccacttgagctccctgtgctgccaggacagcttggg

SEQ ID NO: 9388 - DNA, 2300 bp, Homo sapien
gccagaggaagaggcaacctggagtcaaccaagaggaggccttaaccaagccttaaccacagaggttaaccaagccttgaaagcgcttccccctgagcaggcaggaagcactgagtccacatggttgcctcgctgtttcatttccttacactcaattctctcagtctttaaatgatcacttggccttgaagttacggatatttggggtctgaactgaagttgaagaaaagagaaaatgatttaagctttgtttaagattaggggccaggtgcggtggctcacgcctgtaatcccagcaccttgggagcctgaggcgggtggatcacctgaggtcaggagttccagaccagcctggccaacatagcaaaacccagtctctactaaaaataacaataaaaaaaatagccaggtgtggtgacacatgcctgtaatcccagttactcaggaggctgaggcagaattgcttgaacttgagaggtggaggttgtagtgagccaagaccgcaccactgcactccagcctggcgacagagccagactccgtctcaaaaacaacaacaaaaaaagattagaagaagcccattactgccttctggccacccactcgcacagacaccaaaactgcagcccacacctcgccatcctcgtgctctgccctgggacaccccaggcacagtgtgtccttcgttttctgtaagggtgggctgggagcagggacggacagggcctgtgggcacctctcatggtcacttccttcttgctcacagggtgcccgaggcaacgatggtcagccaggccccgcagggcctccggtaagttcatttcatcctcagcaggtcattgttgctgtgctttaagtcccgttaagcagcccaaggcagtctgcagggtgtattgggtgcaaccacagcagcactctgatgtctactggaaagggggaggaaagagaagaagtttgtaaatatcaattgagcatatcgataacaagctttgaagcatgggctcattttcctcagccatcctttcagcagtctttttagaggagggaggtcaaaggagtttctgcttctcaccacagatgtagtcagaaacttgctttgccttctgaagccaggcaaagtttcctggggacgctggcaatggggacaattttcatccaaggccttttagccacaatggatatggagtgaaatcagtacagaggagggaaggagtgtgaggtgtcggggtggctcgctttggaggccagaactggcattcacctctcttctcatccgcctactctctccagggtcctgtcggtcctgctggtggtcctggcttccctggtgctcctggagccaaggtacgtgccctgttgtccagtcaggaacttctgggtgccgagaagctgtcctttccccgtaacccttgctcattgctccctcaacaaccacctgctcccttctgagaagtagctccccaccaccccacccactggcccctccatccaggcagggcaaaaagccagacactcgcagtctcacctggagggaaagtaagacagaagataaaatgtgggagatccagttacaactttggagtggggaaaggtggacagagaagaagacggggatacaccataggcctggcaggggcagaaggccaggagtggcagcacagggaagcaaacctaggggagacccaacagctgagcaagctcggggccctgacgggcactggagggaactgggcagggaaaagggcacaggcagggagcccctgctcccctctgggtttctgctttatttggggtgcctggctcttccaaaccatgttaacggagttctctggaggattactagaggccagtgggaggccagccagttcagggacaggcctcgcagcccaggaaggattccagtgtgaacgtccctgggaatgaataaggagcctccatgtgtcactggcatcaggttgcttttcccctcctgggggtttccatggcaaccagacagtgtctgaggtcccggagccgggtgaaggagacccattgtgaagagggacagcggaaggtgaggggggctgaccttttgaaaataataattaccacagtgaagcaggaatgttctgagaagaaacctgaggaggctctgccctctctccaggtcagcagccctccccagggactctgccatctagagtgggttgtaattttcaggaaaaaatgaaagtaaaagcacaagccattttgtggggagggggcttgccagaggcgcccgctaaggggaattgggctgtattgagagcagggaggggcag

SEQ ID NO: 9389 - DNA, 2300 bp, Homo sapien
ctttttttttctgttgaatttttatgacaacttgtatttgaagtcagttgtataaatgcctttatagttgtatctaaattattagtccacaggggctttcctaactcctatgtgttagaattgtgctaggcacagttcttgtccccaagcatcttccaagctcattgatgagataaagaccaatggatataaggggaaaaaattaaaactacacaaaaacatatgtagcttaggctataaatgccagggggattcagaaagccagggagacgttgtgttctagagatatcagagaaggcttctcagaggggctttaacctaggaggtcttgataaatgtgtggaatttggtcattctatcttccaggtagagaatataggaccttctgagccccaaagaggacatggggcactgatggcaagagaccagctttcttctagcagagattgggcctgaggaagagcccagagcttaatgcaagcccctgaatgggagcatggagactcagacaaggcccgtggaaggtaggggagatgctggaaactggttgaattcttccccatctccatccagactggacaaagcctagaagcatttccttcaacaatgagttctttccctttccaaccagagcacttggaactccagcctctaccaggacaagtgtcaaagcatgataggctagggatggggtcccaggacccctggtggaagcctaaggcccagaagtagcttctttcaagtgctctcagcttctagggggaaagctccagagaaacaaaactgcccaggagggcagaagttctggttaagtcagaccccaaattctgagtttcattttgcctatagttctttgggggaccatatcgctcaaaaggaaggtctgtttggggacgtttcctccctggtatgaaaggaggcaccggagaccaagagaagagaccagctaagccctgggaagaaggcagtttggctaaggtgagagagggcgctcaccggggaaggtgaggtgaggcggcaagcggagggctagggggccgactgggaaattctggcgcttctccccggctcacagaactcgccagctggatcggcctccccgatccctggccagggccgcagcagtgaccaaccgtccctggccaaagctgctctacgacggccggcagtgcccactccccgggggactcccggaccccagccaggaagagcagacaccacgtctgagcctggagctagacagtccccccacagcaggcagcttgcaccgtttagtctcggctccctccgtcctctgtggctctttcagtccccttcccagggcctgcccctgccccccacaccttcacacaggtctccttctgtgcagtaacacaccagctcttttcctggctgtcggctcaggccaacttcggcctgtgctccagaggaagccttcaacgcagagctggatgggggaggggtggagggcagtcgctgtgaacgtccaggtgggagtctggggaccaggtactgcagggaagggctaaaagataggtcggggtaacccttcagatctggctcagctagcctgtctccaagatttaggactctgaatctctgtgggctcctccctgtccccactcccaaacgcctgacgcggtgccccctcgccctccgctgctcctttctaccgctttccctcctccctcccatgtcttttccgtccttggtctagggctctcggcctgcgcctctgcaaacaccccctcccctccaactccggcagaactccgaggggaggggccggaggccacccttcccgcctgtggtcagaggggggcagcgccgcagccccgggtttggggggcaggggccatctctgcgccccgcccgatcaggccactcggcgcactaggggtggagggcgggaagcgtgactcccagagaggggggtccggcttgggcaggtgcgggcactggcagggcccaggcgggctccgggggcgggcggttcaggttacagcccagcggggggcagggggcggcccgcggtttgggcgagttcgccagcctcgaaaggggccgggcgcatataacgggcgccgcggcggggagaagacgcagagcgctgctgggctgccgggtctcccgcttccccctcctgctccaagggcctcctgcatgagggcgcggtagagacccggacccgcgccgtgctcctgccgtttcgctgcgctccgcccgggcccggctcagccaggccccgcggtgagccatgattcgcctcggggctccccagacgctggtgctgctgacgc

SEQ ID NO: 9390 - DNA, 2300 bp, Homo sapien
aggggtgaaggcaaggccagacatggaggactccttgaatgccaccgagtcaggctcagatctacgtttcttctcactttcccctcttcttcttacctcctactagctagacctttgcgggaaaagataaaggtgtctgggctttttaaaggcttacattttgaagaaatgtctgtatttttatacagaaatgatcttcccatttcactttaaaaacaaagacaacaaaagtcgtgcgaaatattgcattttcttaaggtgggtagctttctgcctttaaggagcatttgtctctctcatcagctcttgatggttctgagctctaggaagaacacaaatgcttaaatgcagagatgtttgagcactcccagcagaagttccatgtgaagcaaatggttctacagtaaaccacaaccattcccaacagccacagagcatctgttccaggcacttctcaagcaataacacaacatgggggttccaagggataccctttgagaggtcaacaacccacgagacaggtggaactctctctccccatctctctcccttccttgaactcctattgcatttgggtatggccagttctatggagttatgcctttagatcatcatccatccatctgtccatccatccatcccttcctccctcaaacatgtgaagaaatcccatgtgagtctattcacatgcctccttgagagcaggggccataacttaatacacttaacttttcccctgcaaagcctgcttggcacagtgcggtcacatagtaaatgtggtccatggaccagcggcatcaacctaccctgggatcttgttggaaaagccgaacctaccaaatcagagttggcttttactaaactctccagataactcatatgcccatgaaggctggagatgtgctggtctaaatcttggtccacggaaagttccatacgaccctggctaacagaggggtgtggtctgcatggtctgcagtcacacatgactgggctcaggcctgcactggaggcagacaaggcaaggaggagcctgagttaaaggtggcagaaaggagaagtgagttttaaggagaggaatggatggaggaccctaaaggagatgatggatgcatgactttgtaaagcctcctgcggtctttttttaaagcaggtggtgggtcacttttcctatgtcccttttttccagtaggaattgggctcagtgcaaggaagagactgacccatgattagaactggagccctggattccatggagacagtgtcagggcagagccagcaggggagcggagtcagccacctgagcctccttcccgtggtggccccttagccctgccccccagggactcctgactgatgaactcctcctaggtgggacataccaaggaaagcaaggagctaactatgatgtccctaggactagtagggtagatgccacctcagagaaagccaggcccctgcaaaccaagtttatcctgctccagtgcggggggcggggggcagtgggcctgccctctaggaagtccctgaaaagccccagggaacatacatgtggtaagtttctagtgagctcctttgccaaaaacaaccttgagagggagcaggacagtgcatgctgcccttccccatgagggcccctcagctgtccccacacccagcacctatccggaggcagccagggccccattgtgttctgcaccgccccgatctccactccagcctccaggccagctccttagctgatcacccacccactgcccttgacactctccctcccagaatcctgggtgcaaaatcttggggtcctgctcgactgtctccccttactctatcctccctcctgtcccattccccctctcattcctcggccagcatttcttcatcccctgtgttgagcacaagctatgcgccaggcacttgctaggtggtatggagggacaaaagaaagctctattagacatgaatcctacatgcaaggagatgactacctctcgggggatacacaaaaagccaaactgtaaggtaaacaagttataatatattgtgatgtcatgtggcattctatgatgtgctgtagcacaatacaatgtcatggacagaagcgctctgttctgccctttcactgaaaatagctcttcctgacacaggcttgggtagtgaaagcagcttggtcacatctgtcccatggtgtaactaatctttaggatctgcagagacctgccttcctctgcaattgtaactgtacctccaatcgtgagtttcgtctggcagcttaactgggctaccagcgaggtcctcat

SEQ ID NO: 9391 - DNA, 2300 bp, Homo sapien
ctctgtgggaggaaggggatgtggcaaggggggagggccgagggaacacaacatttctttcagaaaaggctgaggcctggggcgagggaaggcaggaggctggagcccgctccctctgagcatgctccagggtggccacaggctgacggctggagaactcaccccaacccccaggctctggagaactcgccccaatccccaggctctggagctgtcattgtagccacctgagcaacggctgaaggaccagggcctggaccttgtagggtgcacctaacttagtgtctggcacaaggagacactgggtgtgtgctagtggcttctctctagtctgtccacgtgggtgggcttcagagaagatggccttgagtgtccccaggcactgtcctttctgtgccggggaaggtctatgtgcatccccagccaggcctgctcctggaggattccgtctcctaggccaaacttgacagaggaagatgagctccacgaagagccctggagaccagaccttccagagaagagacggctgtgcgatagcccaggaataagtgctctccaactttccacagggctgttagatccaggaaagaaactcagctctcaggctcagggatcaagagattgtatgtagaaaacacctcatggtacatccataatcagccaacagatcaagcacctactccctggaaaatgagtgctgaaaggctgctcttggcaagaactaaactccaatgaaggcacagccatgcagtgtacttgctgttactgtgaatctggtactgtctgttcattcagttctcccaacaaacctgggaggaggaagatgttgctgccattgccccccataacagatgaggcaactgagtaacagagaggttaagcaattggctcaagcacacagagctggcaagcagtagttataagattagaactcgagcctgaactcgagcatgatgctgtactatctgccccacttgcagggagggggaggtttgggagcctgggagaaggtgggggagcaggaacaagtcaggccagtgggcaaatcgtgtcagcagagcagtctaagcagaggggaaaccaaagagaggagccacgccgtcctggccctgagtacactgggcctggtggagaagccaaccagggacagagacaggaaagctggatgagaagggccttgggtgctgatctgaggagctgccctgtgcctgtagacagtgtctcagtagaaaagtctggccaagtgcagactggaggggacaggcagaaccatgacccagggagccgggacaagtcactagaactctctggataaggagcaggccccctctctgaccagcccggggcaggacctccctgtgtagaacaaaattgtgtccatcagactgctgtgtccagacagctctaggtgagggctgagatcacatgcagtgttcccagatcgatttgctagatctgagggtcacctagactatgattgtttttatggtttccttaagtcaactttctcattctcttttactttactcaagtttacttgaaatgaaaactctgtaacatgggattgatattctaccttttcctccaatacttattaaaataaatctgttttacaggtttggtccctgccaaaatacatacacatgtacattaaaatatagatactatatataacactattagaatgcaaaactttcatccaagttctacctaaaatcacccagggacctttgcacttaggaaacattgtcttgtggcctatcccttgctctccagttgaagtgacctcattcaaagatttcacatttggaaaaggcaaatcagaaaatcactcagacccaagggagggaaggaggccaggcttgggctgggggcgggggctgggaggcaccctggtgggcttgagacccaggggctgggggcaggcaagtgagctgcctagggccgtgaatgaggccttgttgagagccgtggcagctcggcagtgtgcagagaccatgctgcaaatgtaaagtttccaataacttttatgggtggtttcttaataaacatctgagcagcctgtctggaccgagagctgtgttgtcccaggcgcccagagatggagctgggtgaggggctgctgtctgcagtgtcagcctctgcaccccacccacagcctcccacggcatcccctccccatctcccctttgtcttcctctgtcttcctttttacttccttttcgctgtttaatgagaacgacttccatttgctatttgttgactgagtccggcactgcattaagctctgtctacatttt

SEQ ID NO: 9392 - DNA, 2300 bp, Homo sapien
ttgcagtgagctgagatcgcgccactgtactccagcctggatgacagagcaagactgtttcaattaaaaaatatatacatatataaaatatataaaataatatataggtaatatatgttatatataaataatatatttttacataaaaatatatataatacaggtcgggcgcagtggctcacacctgtaatcccagcactttgggaggcagaggcaggtggatcacctgaggtcaggaacttgagaccggcctgaccaacatgctgaaaccctgtctctactaaaaatacaaaaattagccaggtgtggtggcaggcgcctgtaatcccagctacccaggaggctgaggcacgagaatcgcttgaacttgggaggtggaggttgcagtgagccaagatcacaccactgcactccaacctgggtgacagagtgagactttgtctcaaaaaaatatatatataatgtattttttatatataataaataatatatatgtaatgtgtaatatattaaataatatatttatatatgtaatatataatatattaaataatatatttatatatgtaatatataatatattaaataatatatttatatatgtaatatataatatattaaataatatatttatatatgtaatatataatatattaaataatatatttatatatgtaatatgtaatatattaaataatatatttatatatgtaatatgtaatatattaaataatatattatatatgtaatatgtaatatattaaataatatattatatatgtaatatgtaatatattaaataatatattatatatgtaatatgtaatatattaaataatatatatgtaatatgtaatatgttaaatatatttatatatgtaatatgtaatatattaaataatatatatgtaatatgtaatatgttaaatatatttatatatgtaatatgtaatatattaaataatatatttatatatgtaatatgtaatatattaaataatatatttatatatgtaatatgtaatatattaaataatatatttatatatgtaatatattaaataatatatttatatatgtaatatattaaataatatatttatatatgtaatatattaaataatatatttatatatgtaatatattaaataatatatttatatatgtaatatattaaataatatatttatatatgtaatatgtaatatattaaataatatatttatatatgtaatatgtaatatattaaataattatatatgtaatatgtactatattaaataattatatatgtaatatgtactatattaaatatatatgtaatatattaaataatatattatatgtaatatattaaataatatttatatatgtgatatgtaatatattaaataatattttatatatgtaatatataatacattaagtaatatataaaatatatattatatgtaaaatatatactacattttaaatatatattaaataatatatactatatattaaataatatatataaaataatatatactatatattaaataatatatataaaataatatatactatattttaaatatatattaaataatatatactgtatggtaaatatataatatatactgtatattaagtatacagtatatatttatactatattaagtatattaagttatatattaaaatatatattaaataatatatatcatgtattaaattatatattgatatattacatatattattaatatatgttatatatagtaatgtataatatataaatatattaatatttttatatattgcataatatgtaatatattaatatattataccttatacattaatatatataaatatataaaatatatattaatatgatatattttatttatatattaaataatatatattatatattcaataacgttatttaacaaaatatgtcattttagcatgtagtcaaaatactattgagatattttaccttctctttgaaatgtgctgtggattttacacttatagcacatctccggttggattagtcacatttcaagtgctcaatggtcacatttggctagtggctgccttactaaacagtatagggtaaacatccaattaaaaggcagatattggctatccttggggaggccagcaaatttccggataagggaagctggtgggcaggaaaaaggcatgcaatggccctcatgagccagaagaatagctgctgactgatgcctgggggaccaagcccataattgtggagctggagccgcactgtgtcccttgcttcagtc

SEQ ID NO: 9393 - DNA, 2300 bp, Homo sapien
ttcaagaccggcctggctaacatggtgaaaccctgtctctacgaaaaatacaaaaattagccaggtatggtggcaggcacccataatcccagctactcgggaggctgaggcaggagaatcgcttgaacccgggaggcggaggttgcagtgagacaagaccaagccattgcactccagcctgggtgacagagcgagactctgtctaaaaaaagaagaaaaaaatatatatagagagagagagagagagagacgggggggggggggggggcggagggagggagagagagagagagagagacgcaatgttagctttatccaggaccaagatgtggttagaacaatttatgatataagaagggtgtgaaagcaaccatgtgaaatcacccttttccaagttctgaaaaacaattatgtgtacaatagtttgtactatatcgtcatgtgtttgaggttctttccttctatttttacatgtaatctctcccaatcactctaacaccttaaataccttaacactctaacgccgtaaaccctaagtgttcaaattctttcatacacattcatttactgtgcaccgactacgtgcattaagaaagggtccctgccactgagcagctcactgtccagtagggaaagccagatccataaacaggtaccgcaagacagtagagctggtacaactgatagaagatgtagaagttgggaagaaaaggacaagagttccaaagccgcaatgcaagtcaacaactgcattcccttagccagaagtagcagaacctgtttttgtacccatccactccctctagacaactcattagatgagtgacatgaagaccatctttgcagttgggataattaattgaagtcagttaaaaatgaataagccttcctaaaagggactagagaggaaaaataaagggtggtagagtgtaaactggaagtaggttaagggatcatgcttatagagatgcttaaagttgcgctttaactgtaatttcaaagtcagggtaatctgtatttcaacatgagtccttaacacaaattatttttatgaagaataaagatttaggagatgatgagatctaatacatccagaataaccaattataacaaagaccctcagtcaaatagttggtagtagataaaaggctttatatgaatattacaagaatcaccaccactccaaatataataagtgtaccaaatatgaagtaaaatgactttaacaaggctgacttgaaagtgataaagaagcaagttactgctaacaagatagtggaaatactgcacaggcaccgataaacagaaatcaccaagctcaaggaaagagaaacgaggcatagatccagagatcacgttagggtacaccaagaaagagacggttcaagggaattaccaggaggcgatgagccaggtaagcaaattgtggcagttaaggggattttcataacctgagcaggagggtccagacgtttctttctgatggtggcactagcgatatcacatctcagggagataccacagagtaggagagttggagaaatgtttacgtgagacgcagaagtagtcaagaaatatcactcgggtctcaaggaaggcgggagatgaagccggtaccacagaaagccgagcttcccggtgaaaacagctctccccagagaagacccagctctggcgggaaagccccggaatcgcaaccggcctttccccaagtacggctgggcgctgggatggggcctgctgtaacggcagggagacggtctctccgcggcccaggagagagagaccagaaggaacggcctcaggtagcctaacggccaccggcggccacagcgcggccaccggacagcaggggggaggggaggtggtcccagggggcggggcagaggaaaaggcgccggccccacagtgctccccgcttccgcccagtccagcccgggccggctgaccgggtccgacacagtctcctggaccaggctccctccatcctcacccctcccccagcttcccgccgccactcaccgaaccggaaccggctgccatgcgaaggggtttccggccgggcgcggaacgcaaaacccgggaaccgccgcgaaccggaaccgccttcacagcaccggaagagtcgctaggtggctgaagaggagggggctggggcaggaggtcaaagaacagagttaaggaccagtggggcgcctgcgcggtgtggcgaggcccgagaagcgaagggagcatttaagactagtcgtaatttctcagtacccttttcagtctgggctttttcgctttctcgtactcgg

SEQ ID NO: 9394 - DNA, 2300 bp, Homo sapien
tggaagtagaagcttccccagctgagaaacaatagctttaggtcaccctcaaggtgggattctgggaagggagtgttccttactccctttcattttccctatgactctgagctgtccagggctttctttccaaaaatccagtgaaaaattagagacgcgatgtacctcaaaaagattctattcccttgacatacatgggggaaagcagaacatataactagatactttgaggtggggtggatgagaaggccatttttccttagggcttgatttatctgatagttttggagtgtcagttataatgacaataaagattcccacagatgagcccagactggtcgaagtaattcacataacaacacaataatgacaagctcatgggataaattttgttcccccctcaactctcaagtcctccttatctgcctggcatctatcacaacaaaccaggtcaaaatcttacctggaaaatacacgactcagtgatcaatattttatcaaagtgagaatgtgataaacaaggtcagttgacccctaaaatccgtatttacactagaaagcctcacatcctgtatttagacttcttgtgagagaacccattctctgtcactggagtatgatcaggagacaagggtacctgttctctgaggagtcctgactaactggcgagactgaatcacacacatgaaaaatttcagatgaaactcgtctttatgcatggctgcctcctagaaatagagacagagtttaatccaaacgaacagagctgtgaaataagatgtcagtgactgacatggaccagctacactcatgactacttggccttaggacttgacaatataatataaaagtatcagcacatgaggcaatacaaataatctactttgatgtatttgacaggggaggaaaccctgaactcagcaagctgctgagagtatcagaaaggctgggggcctccagaaactgcccttctttaagtctgagctcagactgtgcctgtggctgtgatctgggtgtaaaggacctattaagggggcatttctctaagacttctacagggcctgggtccagaggcctgccaagctgaggtgcttgacaaaaagcctgaatgaacaaacatatttcttcccattatgttctcttagaaagtatggcagattccaggttaatcaatgtgtcccaggaacaacaaagcccttcaaaggtcacaggtgattcctgggtccttctctatctctacccagaaaagcagatctctagtgggctcccaaaagctttcctcacagctctgcctgtttcaaattcctccagagttctggaaggttctacatcttgccagagtctagcctaatccgtcctcaagttgcttgtttgtttgtttgtttgcttgctgaatggtcaatcaagtatgaggtggtgcagagtacaggattgcaagttaagaaacttgtttcctagtcctagatgggccgtgcacttaaaacctttgggaaatcacttcacttctctgaacctggtaagactaaagtatctccaataacctctacaagcactaacgttctgtgattctcaataaaacacgagatagcctgagatcgatttagatctcaggtccctatctgtcgggggaagccacaggtttccgcagatttagggccaccgcgaaaagctgccatggaaactggaacgcaagcaagcaaaactcgccgggcggaaccagaaggcggcgggtaagggagcagagggaacagagaaaagcataggacgaagggctcactaacagtattccgagtacgagaaagcgaaaaagcccagactgaaaagggtactgagaaattacgactagtcttaaatgctcccttcgcttctcgggcctcgccacaccgcgcaggcgccccactggtccttaactctgttctttgacctcctgccccagccccctcctcttcagccacctagcgactcttccggtgctgtgaaggcggttccggttcgcggcggttcccgggttttgcgttccgcgcccggccggaaaccccttcgcatggcagccggttccggttcggtgagtggcggcgggaagctgggggaggggtgaggatggagggagcctggtccaggagactgtgtcggacccggtcagccggcccgggctggactgggcggaagcggggagcactgtggggccggcgccttttcctctgccccgccccctgggaccacctcccctcccccctgctgtccggtggccgcgctgtggccgccggtggccgttaggctacctgaggccgttccttctg

SEQ ID NO: 9395 - DNA, 2300 bp, Homo sapien
aaagcttttataaacattcatgtgcaggttttttgtgcagacataattttcagctcattcagctaaatacttaggagtgctattgctggatcatgtggtaagacaatatttagctttgtaaaaaactgtcaaactgtcttctacagtgactgtaccattgtgcattcccaccagcaattaatgagagttccagtggttccacattctcattagcatttggatttttgaattttaatcatttaatcattctaataggtgtgtagtggtgtctcactgttttaatttgcagttcgctaatgacatatgatgttgacatcttttcatgtttatttgccacctgtatatcttctttggtcaactcttttgcccatttttaaattgaggtattttctttttattgtcactgaaaagagtcaaactgtaaaacatttgaagagatttatcctgagccaaatacgagtgaccaatagctcccccatgacacagccctcaggagatcctgagaacatgtgttcaagatggtcgggccacaagttggttttataaattttagggagatataaggtatcaatgaatatatgtaagatgtacattcatttagtccagaaaggcgggataactggaagcagggaggggggagcggggcttccaggtcataggtagattcaaagattttctgattggaaattggtgaaaagagttaagttattgtccaaagacttaatagaaaagcaatctgtgaggaccaaggttttatcaggtggacaaagcttccaggtagcaggtttcagagaatagattgtaaatgtttcttatcagacttaaagagtctgttctatcagtaattccaaaagggaggagcatataatgaagtgtgtctggcttcccctttccatcaacgtctgaactagtttttcagattaactttggaatacccttgactgagaggaggggtctattcagatggttgaggggcttataattttatttttggtttacattcttaatgagttgcaaatgagttctttatttattctggatgccagccccttatcagatacatgatttgcaaatattttctcccattctgtgggttgtctttccactttcttgatggtataatttggagaacaaatgcttttattttgtgtagtcaaatggggttttatctcctagtcacttgcatttgtattgtttgtgccagaatgtgcagaggtagagatacaagtaagcaagaggaagagggcagtggtaaaagcaagaggagacccgactgtggagacaatgaagcaaagggaaggtgagacttgagtaatggatgcacctcttgctctgggagcatctgaccctttttccagagtggatcctgtttgctgtgaagcccaatttatatgtttgcttcactgccagaatcccgcccccatccctccccactgcaggcttgagaagtggcctcacagacacgcccttccctcttgacactttcattccaaatagctagcttttctgtactttctctgagaaaggtaatgtaaatgtaaaagaagtttttgaggctattctatagaagatgtcataattcaatgttcctcaaaggcagggactatatttattttttttaaacctctcggcacctaatgcaaaatctagcacacagactcccaagaaatgtttgcttaaagacggatagagggccacaggggcaggttttattagcagttgctgaagatgttggaatgcaaggtgtctcaggcagtctggactaggaaaaagttctgtgttgaaaacaagagaagcaacgaaataatttattattcccattaaataaagatgctgatggctctcgagatagatatgaggaccccaggactctggggagtgaaggaactaagccgctgccatatctgagctgagtacttagggggaggaggaagaggaggagaaaggcaagcaggaggaggcggagccttcttgtcagcatctgttagtggaggttgggaagcctctcctccttccccctccctctttgcctccacctggctcctccccatgttcgtccatcacccctcccccctttcccaaggacaatctgcaagaaagcagcggcggaggagagctaagactaaaaggcaagaggggccattgagtgaagagcaagggggagagctgggagtgaggtgggaaggtatgggccgggagcaggcggtagggagaactgaaaggagcagaaaggaaaagaagagatacggcatcctaagctggagccgagagggggatgggcagggcagtcgtgaaggatc

SEQ ID NO: 9396 - DNA, 2300 bp, Homo sapien
tactgaaatttgaacttaacatttttcacatgtcatgaagtactttttgcaaccactaaaaaatataaaaacctttcacagcttactgccatacaaaaatgtgagaagggctggatttggcctacaggctgttgtatgctgacccctgatctagtccaaccctcttatcagtgcgtacgaaactattaaaatgccacataaagcaggccgagcatggtggtttatgcctgttatcccagcactttgggaggcaaggtgggcggatcacctgaagtcaggagttcaagaccagcttgaccgacatggtgaaaacccgtctcaattaaaaatacaaaaattagccgggtgtggtggtgcatgtctgtaatcccagctactcgggaggctgaggcaggagaatcacttgaacctgggaggcagtgatccagtttagacaacatgtggttagaggaagtccaaaagaaggtttccttgacctgtggtaatcagtgaaggtttaataagggtacaactatcactggtcttaaatgatggaatgggatgtgaatctgtggaaagggccagggtagccacctggacaagggatgcagtgtgcccaggcactaaagtgggaagagcaaagtaatgttcaggtgacaatggagcagagaatctataggaccaacagttgaagctatatgcaagggctaaattgtagaagcttcgaatgccaacccaacaagttgggaccttatttgttagtactgattatatgtagtacgttcattaatctctgtctgttaacacaatgcatgtttgtgaatgtatgtcttcatatatgtctcattgcattattttattatttgtgtggatttgggtgtttatgtgacttatgtctctataggcagctaccctgagttctccaaatgcagggtagaagcaagcacaagctgcccgtaaaacttgggttcctgtgaatgaatacacatctccactgaagcctagggacctatgaccttcctatgaaggtttattttgtgtgtctaatagagtgaagaaaggaacacaagcacagggaaaccagctattgtagtaagcagttcaggtggaaaatggcaatgaggatagaaaggaggggatggataaaggaagataataagaagggagaataataggatttagttactgttttgaatctgagaggaagggaggagataaatttaaaataacaggttttagcctgaaaaactgggagagtgataattctactggcattttatggatacaaaaatacgtcctcttgtgtgttcctttgagagaggtgatccctaaagaataaaatatgaaggtgttcccatgtcgtatgtacacatctgtgtatatacggcagtgactttgtgttaattttctcatttcatagcatgtagtaatgtgaggggcaagacccaaagaccaaggatcaagagatgctcaggaggctgacatcctgagagggaagagccatagaaagcccctgaccattcttgagactgacaccattaatttgcctaactctgatgtgcctttatagcctcagactccagtttcaactccatatcacctaaccccattccaatagcacaattccataacacccaaccctaatcttaattataatccaacctacccttgctcttctacttctactttgctgattgtcatcagtgccctaaacctcatctgattccagccctctgcaataacctatcccttcattgaaaagggagggatcgttgaggctaactcaactttttctcctccctttctcatttctattcagtcaacttctcttttccctgaccttagtttattccccaaataggttccaattggggtgggagggatcagggaggaattaggaccttagtagtcttgggcttgattacatgacatttcagcttgtcagtctacaagggtgtggctttcctctggaagaagtccaaagctctcaggctgcaaagctcagacttggtatagtgggagagcctgactgaggtggctctagccagtctaattgccgttcctttagctagtggcatcttgattcctgctgtgtcttaactgaccattgtcttaaattctagagtggatcatgacccatgaagagcaccatgcagccaaaaccctggggattggcaaagccattgctgtcttaacctctggtggagatgcccaaggtaaggaggaggggacaaaaaacatggctggtgggacttttggaatttactgactcccttagcctatacaatagaattattcttctgtaggttcacgggaatttt

SEQ ID NO: 9397 - DNA, 2300 bp, Homo sapien
accagatgttcaacatttgcctgaaaatgaaagagtaaatcctaagcctaactgggaatggataaggttgggtataaatcatcttccacaccacacctctccaggaaggaagagacacatggaagagagttgtttacaatcctgggcctgaactgtgcctaattcctgtaagaagctcagtgtggactgaaatttaaacaatgactccaaatgagacagaactggaagagggagcactacagacagctgcagtaactgtcagtgttcagcccctcaccctctccaatctccctttccaagcctttctggttccccttgcctcagagggctgacttgtggtcacagtgtcagtgttgacactttatatctctgttttgagagagtatctctctcaaaagcagaatgacagcaagggaaatctgaaggggagacatgatgtagtaaaaagatcactgactttctcaaccacttaaaccatctgctcacttaggagtttagaaaagttttttaacctctctaaactttctatgttatatggagatagtatcttctttgcatgtctattgtgaagataaaatgcaaaaatgcccataaagggcttagcaccaggtcgcctgactcaaaatcagcattccaacaacagtagctgcggtcatgcatatgaggtgacaccagagaatgcctgcatagtgctctttctggtcttcacaggattctacagaccaatcagctcggtcctcaacttgagctctcatagttcagatcactgtggaaacagtctggagacaggggagagctatctagcaggctctgggtggccagctacctgcaggtctcgaatggtgaagggctcctcaaaaatgtaggcagcatcggccccagctgccagtccagccatggtagccaggtagccacagtagccacccatagtctcaatgataaacacccgacgcttggtgccagctgctgactgcttgatgcggtcacaggtctgcaaggacaatgggttatagttagaaagacatgatcaggggcctgattcttatcactctttaatctttgccattaattaaaccctggaactatattctccataggctagcagggcccttagagctcatcaagttcttgcatttagggtaacaggcatatttgccaacctcactgcagaacgtctctcctgggaagaaagctgtacctatcctttctactgctcagaaaattagactgcatgatctcagaaagaaaaaaaaaaacaaacaaaacatttggtattcagggtactggtgcatttctaggtgaggaaactgaacactttgtcacccaggctggagtaaagtggcacgatctctgctcactgcaacctccgcctcccaggttcaagcaattttcctgcctcagcctcccaagtagctgggattacaggcgcctaccaccacacccagctagtttttgtatttttagtagagatggggtttcaccatgttggccaggctgctcttgaactcctgaccccaagtgatctgcctgccttggcctcccaaagtgctgggattagaagtgtgagccaccatgcccagctgaagaatcattttcaaacattcccatttgcttgatataaagagtagctcactgtttgggaccacactcagtttaaggattataatcctggccaaaagggatgggaagtggtgataggctctcactgtgcagatagtattgagtgctgtgtcagccccaacgctgaagtctgagccagggacattgttggagactgtagcaggaatgaccacaaatgggatgcagagctcatcaaactgcttcctgccctccatcagttccaggccccctgtgtaagcctaagaagaagagagcacaagggcaggattggggagagggagaggaggtaggagggagagaggaagaaatggtggcaggcactcacctcaaagcccccaatgatgacaaggccctgaatgttaaacttagttatattggcactgatctgttcaaagctcttcttgggtagagtcctagttgatcagtgatggcggggaggggaaggggaattggaatttggggaagagacaggaaaattgagggggagaaaagctagagttagaggcactttatttttaatttcttgacctgtgccgccctccctagcccaccctctcagtcctatccaaggatacatactggagctctaagttgccagagctgctaaagatgttgagatgggcatgtctgccctcatggcagcaactgtgaggttgagggtggaggacccagacaacagg

SEQ ID NO: 9398 - DNA, 2300 bp, Homo sapien
ctgggttcagtcaaaatagactcttgaaactgtaagattacaactcaaagtctcccaggtagctgtggtgagaccagaggaccaagtctaaatgaagtcagtgaagagtggaggacgctcatggaaggacacagcaagggaggcacagccagtgcatctcccattatgaatgggccctcccagcagctttattggctctccagtgttttggacccttgctcatacaggctgtggaactgaatttcacagaaaagaataatttttatagcactttggcttctctcttcttgagttatttgctcttctgtgttcttggtggctgatgatagtcagattaggctctctgccattcaaagtttatctttgtacttgaaagcataagttttgtcttctttgttaatgaatatcactgtcaggcttgctccactgccctatcagcaggtactgatttgactaataaagatgagatctattgtttggggggaaaaaaagttagtttgatttctctaggggtctcttatgtgatttttagctaagtgatgggctaggttttcaatgacatgccaaatggaaataagaagatattgatcatgagtgtgacatagagtagttttctgcatatactgagttgcaggccaagtaaaataaaagtgtactcagtttttcaataaataagtaaaataacctgtattgagagcctattttatcactccctgggagactccgctcattcttacatttgtaagatgctgatggtttcccagaatttatatacttcagcatttcccaaccaagaaatttgagagatgtggtccagtgtggtgactcatgcctgtaatcccagcactttgggaggccgaggagggtggatcacctgaggtcaggagtttgagaccagcctggccaacatggtgaaaccccatctctaataaaaatacaaaaaaaaaattagccaggtgtggtggcaggtgactgtagtctcagttactcaggaggctgaggcaggagaatcacttgaacccggaaggctgaggttgcagccagccgagatcacgccattgcactccagcctgggtgagaagagcgaaactacatctcaaaaataaataatgatgatgataataataataataataataataataataaaaacattgccaacatttgcaacttggaaaaattcactttttaaaaaaaatctgtatttcagcttcttttgaaaaatggacgatctcaccatggtgcagtggcaggaagtggagggcatattcctacctggcaaaattcctttgagtctggagctcaaaggaggcccactcctcagaccaggtcatgaactttcagtttaccatcctcttactgatgtacatgatctgtctgggcctgctttaaatctctaattggttagatttggttgcttagaacaagctctggggagtaggtgtggggcactctggttaaacaggctaccgggcagaccacaactcttgcagtctgcctaaatgggctgctgcttcactccttccatgcaccaccaccatgtgctgctgacttcaaaatgtttatgctttgcacagaaagtctgtcactcagaggtgtcatcatgtttttgtgcgggaagtttcattaaccctaataagagttataaaggtcatttattcctctacatttagaatactacacctcttgggtggttgagtttgtctttgatatggtttacttgaaggagggtggacatgtacaggagggttctaaggagcatagattcgttccaccattatgaataatgctgtaagtatttttgtcaaagacacttcctactaagagtttagtctcctaagcaactgaaccattgtggatggacccctgctggcctggtccacgcaggtgcaaccatatagaatcggcccaacactcagggttcctgagcttttttatccccgctgcaggaccaagacccgaaccctgcggctgtggccgagaacgctgcactgagcctgcgcgcaaagcctctgagtaaaaggagaaagtaaccccctaactaggcctctggagggcgaaagctgctgcacaagtctgcgcaggcgcgccccgctgacgaacactcatcagtgcgcaggcgcccatcttagttggtcttctagtccggtaaacagagggcctgcccccgacagcttctgcttccgggtcacgccttgacagcggctttcaacccccacctcagcccagcaattcggtgagtgcggtccttggagtgggtctacagccaggtttcctaacccagggtaccacgcccaata

SEQ ID NO: 9399 - DNA, 2300 bp, Homo sapien
gatgtaaagtaacagacctagacagaaagtctgaaagccatgccagtcttttctggctatagcagagctctcctcggaaggatgaaagcagggttggacctataagccctgagaacatgcttgctgtagtataatcagaaacttatgctgtgtaagctcagctgttttcatgtgttctgtttctatttctagttttcctatagtttttaataaagtctctttgtaaacaccagcccacttcagctgtgcttatggaaaccaaggaaaagcatttctgtcctctcttgagccagagtttcaggagtaatctaaggtgttattaccacgtgtggggtacagagcagaggtaggagtcctaagcaaggtgagagtgctggaaatctgtagaatgaaggaagaaatgagcaagcaaatagaattgaatcattagtttcagaaaatacaatactgtgtttttaaaatttgttcatatatttgttttgggaaatcaaatttttaatggctgcataatactttatgtatcagcaattttgccttagtttatttaaacattctgctgctggtcatttaggatagtccccacttgtttctattttaaaagcagtaagattggtataggtcaagcagtcctctagtgtcacaaaactttccctgggccagcctcactcttcatcaccaagcacataaccagggaaacccaaaggtaacacatttgctgtcactgaaccgccagtctacaaaacactcacctttacgtagttcttctctatcttgaagtgatatagtttgtttctctttcccagatttattcttatgaacttcatttttggcttccgatcacttggcttccctaatttcctagggtcattattaattattgtgctctgcccaggtgctgattccttctcaatctgcaatcatctacgtatattaaagacaatttttcttcttcctccacccttcctgctccaccccttaaatagggaaagggcttgtcacaaaggttggggatactcagtgtatgtctgaacttgggcactgaaagagagagcgggaattactctaacacacagtccccccatccataccctccacacaacggtcaacagtttaccttttcacctgtgagatgatgcagactgttattcagaattagaaatagtattatagattatccagtccaattccctaacagatgaggaaaatgatgtggccaaggtcgctgaatgaataagtggcagaaacgaaactgaattcaggtctcctaaaacccactacgtttggcttggggagttctggatgagagcgtgggacttggtggtttttgttattcattcaataactatattaagcatctacatactaggtgccaggcactattttaggagctggggattccgtgatggagggtgcaggggagacaaaaatctctccccttatggagctttcattctcaaaacttaagcacttggcctccccatctgggacaaactcccagagacctgcgtaggagcggtagggtctcataaaggagggagtcccatccttcccccgctccggtgatttctatagctagagggctgatttactgcagaaacctccgtagcgccctcctcctgcctctgcaccgtcaggcccggtgggtccggctccagagcgccaccgtgccccagctcaactctgggatcattagcaacagcctctctaccctctccgctttcctgcgcatcgctggaggacagggaggcaggactcgactttagcgccatcctctgagaaaggaatgcgggctggaaaaatctttccagggcagtctcgctgggtctcataccccggctaggggagggacgatctctcccggacttggaggtttctgcagcagacggctctctcatacttccctattaaacattgcgaccacacgctctttccagccttggccgaagccactgtagcgtcccctctcctccccccaccccgctagtccagactccagagccccactgcagcttccagccatcctccctttttcttcgccacttcctggttaccatggagacacacgtcatttacgtgccgtgcgtcgccttggaaacagaggagcatccgcgacacccccgggagacccaccccagctgctgctgccacactcgcgggcgctgcccggtaatggcctgggggagtcccgagtccgacgcgccgctggcctcagcctggacgcggacccctccgcgagcgcgtctgtgacccacggaaccggcaggcgctctctgcttgtggcgcccagagggcggcgctga

SEQ ID NO: 9400 - DNA, 2300 bp, Homo sapien
cggactattaggcatcaatgtgaagtaacagattaaatattaacatctggcaacgtggatggagccaaaaaacagtgcttaggttaaacaaatataagtaatgagacaaatatctcagtaggtttgaagtacatttaataatgcatgctcacgaaataataactatgtttagaaaacacataaatggaaatatccacattaagcacattagaaaattgcctattgtagtgagaaaatgggacttgaagggtataaataaataaataaataaataaaacaagagggcctcactgtcatggtctgatgatagtatgccatgaactgaggagtatgactaactcaatcctttcaggaacaaacaaaactttaaaacatagcaaaaaaaaaaacataaatcataacaccacctgaaagatggaatgaggaaaaacttgcaaaaaagaaaactggctgggcgaggtggctcacgcctgtaatcccagcactttgggaggccggggttggggggggggcggataatctgaggtcgggagttcgagaccaccctgaccaacatggagaaaccccgtctctactaaaaatacaaaattagccgggagtggtgacgcatgcctgtaatcccagctacttgggaggctgaggcaggagaatctcttgaaccagggacgcggaggttgtggtgagccgagatcttaccattgcactccagcctgggcaacaagagcgaaactccgtctccgactcaaaaaataaataaatacataaatacataaataaataaaaagaaaagaaaactgaccgcaaaatgggctcttattttgagcatgtacaaaacacaggtaagtctgatggtctcggtacatgcgatactgttaacagttggaagaggggagaaacatttctggaggtgctaactgaagtgcttgaaatactttatgttatttaatcctcataaccacactgaagcatcgttgccctagttaagcctcttcagctaagactcttcagttgcaagaaacagaaacccatttcagacagctttaagccaaacaacaacaacaaaaacatttgttatatgggcgtaaggttatttcacagaacccaagagtgagaatgcagctgggtcttcaaggctgacccaaaccaagtgctccttgaggatctaaatatatttttcatctcctagataaaccatatttctatatgttaaactgaatatttcagaggaagtcactaataataggtgtctcgggggcttccgtgaaggttcagggctctggacattcccactccactcctatcagaacagctctgtttttatttggttaatacatcaggattctgcctaagagttcattgaggaaatagcactacagcacctcctctggccagatactgtgcaaagaattacaaaataaatcacagacgagtggagaagataggaaagtaaatacactctaaaacaataaaggagtacagtgacagaaaaacgcacagattattaagggaactcaaagaaagtctagtaagcccagaaaggggtagggcttatgggaggtttcacggagtggatacctggaaaggggaggtaaggcagctcaaaggacactgttgttcaacggagggaagcggattcaacaattatacaattcgctgagtcggggctttcactgcgaaagaacttggcttcggatccgtgatcaaggctgggagctatggaggtggatgtgattggcaaagacctctgctcaggtctgcgtcaaaccttgcttcgctcccatcccattctgcgccaatagggcgcagtatcccaaccattccactcggctaggaggggatcctaagcctcaaggtccgcatctcccgctggagggactgagcagccgcactggtgtcccagaatagatcgtgttccccagaggttgtcaggttcccgcaattcggcgcgggcgaggcggccaaagagagggcgctcattggctgccacagccccggtccgagaggccgaagaaggctgattcgtcacaggccgtcagcgcgggccacgcctatttcctctccaggttctaattaggtcaggggccctacagcctcttgggtagtttgcaagtgcgtcgcggagccggcctcggaaatatggcgacagcttcagctttcagtgtgagggagccgagggcccagccaaaccctgcgggaggcaattcctgggtacccttcccatattttcggtctttgggctgcgccgtggtaacctcagagcctggttgcgtgctcaccagcgacaagtgtctttcattggg

SEQ ID NO: 9401 - DNA, 2300 bp, Homo sapien
ccttcccaatgtcccttaactaccttttcagtcgtatctcctgctactccccttctcattgtctaccctctccctgcccctcaacacacacctgtgttttaaccagatagaactacctggaagcttcttagaaggtaaaacctctagccctatcttcagacctatgaattgcactttatgagtatcccagggtattaaatatgcacattgaagtttaagaagcactggtctggctgggcgcagtggctcatgcctataatcccagcagtttgtgaggctgaggtgggtggattgcttgaggccaggagttcgagaccagcctggccaacatggcaaaacctcgtctctaccaatatataaataaataagggccaggcgcagtggctcacgcctgtaatcccagcactttgggaggccaaggtgggtggatcacctgaggtcaggagtctgagaccagcttggccaaccagcctggtgaaaccccatctccactaaaaatactaagattagctgggcatggtagcaggaacctgtaatcctagctacttgggaggctgaggcacgagaatcacttgaacccaggaggcggaggttgcagtgagccgagattgcaccactgcactccagcctgggcaacagagtgagactttgtctcaaaaaaaaaaaaaaaaaattagctggatgtggtggcacatgcttgtaatcccagcttcttgggagggtgagacacaggaattgcttgaacccaggaggtggaggttacagtgagccaagattgtgccattacatagcctgggctgagcaagactctgtctcaaaaaaaaaaaaaaaaagcactggtctaagctacttcctggagctttgatttttaaaagaaactgtcactgtctagcctgtgactgatgaatgtatgtgattgccctctggaaaagtatgatatgcttggcaatttgaagtattcttagaataatactttaaattattcccaactaaactgtgtccaaaataggtccttgataagctaatccttacttggcccccttcatttccaaccctttgaaattcactctgctcctttctcctgatcttctggaagtttctttctgaatctagagaaactctcctcaccagagaggaatgatgtaagcaggctcaattaaatgcccgctgtgtataatgaagcatattgttaggtgcagcatgggacatagaagttcaaagactatagctcttgaggatatctttatttagttggaaatacaagacagaaacattcaaagtaaagtaaatttattccttatatttaggtagcccttgttcatctacctcttctgaaattttgcaataattctgtgatgttggtaggaagggaatgtgatgttagataagaagtcagatggccggcacatccatctgacagccacaccactgatattaagggatttgttaatgtcatatggctcctaaagagctaggatatgcatccatatcttccagctccaagtacgagtttttttctttttaaaaaatattgtgtcacattataccctctaatgccaaattcatttaaaataaagaaaaagccatataagattgcagaagtaattttggtggttgtggtagttaagaggcaagaaatcatttgaaagagtttggggagtcttcagtgaagaaggataatgtagcagtaccttgaaagatgagcaggacttatctgggcagacaaagaggatgagaaatccaagagaggggatgagatggaaaaaaacacagtatgttcaaagaataatgattagaccagtatcctcaggcgatgtgaaatctagattgtttcagtacagttgaatgcgtcatctaaatttcccaggtgtgggaatcagtgtttagggtagagggatcacacaattggttccttttttacttcatgctcttgcacagaatccactgtgtagaattagggagacatgacttcagatacctgactggtggaattaaaggtgggagtttctaatctgggttgtgtttcatggactaccccgtgtactttctacaggcagtgtgttgcttgttttggatagttgggagcagcttcgctcaccttaaggaactgtgggtagatggtttgcaggaccacatacacacacaaaatagccgactaaagaaagcggtggagatcgagatcagtaagtttgatttgggaacaaaaccctggagactctataggtaggtgactgttgggggtggacaggcgctgaagacttggattggtttagacctagaaggaagtggcatttgattgg

SEQ ID NO: 9402 - DNA, 2300 bp, Homo sapien
actccaattaacgcaccttatatttaccaccagtggtagcataagtgaaaagaacccctggacttagttccaggacccgggataaaaattctggctctactactaccccgacatatcccatgatctgctcctagaatatgctctatactcttcccaactgcgtgtctactgcattttcctctttcattagacagccctcctgactcttctctgcctcacgatttctgtcagagtggggggccttctctgacctccgtcccatacgtggtcacttctctttgcttcaagtgcagcgtacgttcctctgttttagaatctacgtttttattgcaaatatttgttgacatgtgcttccccagactgtgaatcctttaactcccagcatttagttacagtgtctggcacacgtagaaaataaatatgcattaaacgaatgattgtcacatatgaccttaagtgagtcaattattttttaagtctactaaataaaatttttgaaaattgttgtaatgatgaaataaggaatgtgaatgtgacttgtaggttataaacagattctaacagcaatgggtttactcactgtttgtaggcccttctcatcttttctagtcaaatccatcttaatgctgcaaggtagcactatccaatagaaatataatgcaagccatatttatagccacatttaaaaagttaaaaccaggtgaaattaattttaatatatttaacccaatatacccaaaatatcactttttaaattaaatcttctaaatcttggaacacatctctattcagaccagccacatttcgagagctcaggtgtcacctgcggctacggctcccgcaaatgggacagcagccgcaaggccaacttcagatagcaacctgacttcccctcaggcagaataagtgactcctcctcagtgctctctcaagccctttatcctatcgtgaaaactagagggtacgctccttgaggaattccagactgttgtctggagaaatcgctctcggcctcggtctggcctgtaacgggcggttacgcaattccaggtaattgacgaaccctgaggacagaactccgtgggaggcccagtagccagagcggaaaatggtcagtcaggcaagagtgcgggcaagtggccacagcaggctgcgattccggcgcccgccgccctccaagcgtctcgggccgcaccctccccacagcggcgggcgcggaggtcccgggttcgcgtttgggggcgcctgagccgcagccccgccccctcccgtccctccctccctccctccctcccactcctctccctcccactcctctccctcccactccccgcacctccgccgccgcagagccccggaagcgggcggggatttcctgtgcccgccccgccccgcccgcgcctgccgggccgccgtctccgcctgtcgctggctccgccggccgccggctcccagacgcaagcggagggcggaggggaggggcaggcggcgcccgggagggaggcaccgggccgcgggccaagcctaccgggggtgagtggagccgggccggagggagctgcggctggagggagggacgcctggcttcccggggcggctggtgggggctcggtcacccataggggctgggaggaggatcggcgcgtcttccgggttgctgcctttcccgggggtctgccccgctgacattctgtgcccgcctctcgccctgtctccccgtgcccatcgcaactgtcaggccctgcgggctcccgccgctgtcactcgcgcacaggttaccccgtggctccctttctcttcacttgctcatgccccagctcatgggaaacctgttttctgacctcacttcccctgctccagttctgccttgctcggattctctgaaatctgaccctttccaggggcactgtgacaagaagaagggaagaagcaaccttacccctgagcaggctcccgtcccgcccatgccctacccgtggcaggggccagggttctctgatggacggagccaactcgtccgtgtgcccttgggctactcatttttataacatggccccttttctgttcatcagcactggctgcagaaacttccttttgcaggtcccttgctacccatatgtgtgaagaaaagggggaaatgaaagccctagaacccacactgcagtgggcatgggatcatcctggaaccaggagaaacgaggttagggctaccaccttaaccgcccaggtgctggctctgcgtgaatatcttaggaaatgcaagctgaggacaggtacccatcccatcctttgctgagatt

SEQ ID NO: 9403 - DNA, 2300 bp, Homo sapien
agctagagacagggtttcactatgttggccaggctggttttgaactcctgaccttgtgatccgcccgcctctacctcccaaagtgctgggattacaggcatgagacactgcacctggctttttttattttttggaaacaatctcacactgatttgtttcccaaaacagtcgaggagagtttgggctattataatatctatcagttctttccaaacattcttttcaggtaaagtcaggtttacgtacttggttatgttcaatttaactctgtgtgacgaggcaatgctgtgtccagcagcgcccatttccttttccatgaggcacacattctttacttcccagccacccttctgggtagggccatgtgaccatgcgcatgagttctggctaagggaatggggtgaaaatgatacacaccacttccaggactggcccctaatatctctgacaagttaaccacggccagcctcccttatctgagggccacagatttgactacattaccaaggcctcggcatgggagaaccaccaaatgcaagaagcctggtccttcaatgaattcaagaagtacagaccccaccctctggccccaaccaacttgttaccacactgtgacttgtatgaacataagcctttatggagttaagccccgagatactggttttgctagcctactccaattaacgcaccttatatttaccaccagtggtagcataagtgaaaagaacccctggacttagttccaggacccgggataaaaattctggctctactactaccccgacatatcccatgatctgctcctagaatatgctctatactcttcccaactgcgtgtctactgcattttcctctttcattagacagccctcctgactcttctctgcctcacgatttctgtcagagtggggggccttctctgacctccgtcccatacgtggtcacttctctttgcttcaagtgcagcgtacgttcctctgttttagaatctacgtttttattgcaaatatttgttgacatgtgcttccccagactgtgaatcctttaactcccagcatttagttacagtgtctggcacacgtagaaaataaatatgcattaaacgaatgattgtcacatatgaccttaagtgagtcaattattttttaagtctactaaataaaatttttgaaaattgttgtaatgatgaaataaggaatgtgaatgtgacttgtaggttataaacagattctaacagcaatgggtttactcactgtttgtaggcccttctcatcttttctagtcaaatccatcttaatgctgcaaggtagcactatccaatagaaatataatgcaagccatatttatagccacatttaaaaagttaaaaccaggtgaaattaattttaatatatttaacccaatatacccaaaatatcactttttaaattaaatcttctaaatcttggaacacatctctattcagaccagccacatttcgagagctcaggtgtcacctgcggctacggctcccgcaaatgggacagcagccgcaaggccaacttcagatagcaacctgacttcccctcaggcagaataagtgactcctcctcagtgctctctcaagccctttatcctatcgtgaaaactagagggtacgctccttgaggaattccagactgttgtctggagaaatcgctctcggcctcggtctggcctgtaacgggcggttacgcaattccaggtaattgacgaaccctgaggacagaactccgtgggaggcccagtagccagagcggaaaatggtcagtcaggcaagagtgcgggcaagtggccacagcaggctgcgattccggcgcccgccgccctccaagcgtctcgggccgcaccctccccacagcggcgggcgcggaggtcccgggttcgcgtttgggggcgcctgagccgcagccccgccccctcccgtccctccctccctccctccctcccactcctctccctcccactcctctccctcccactccccgcacctccgccgccgcagagccccggaagcgggcggggatttcctgtgcccgccccgccccgcccgcgcctgccgggccgccgtctccgcctgtcgctggctccgccggccgccggctcccagacgcaagcggagggcggaggggaggggcaggcggcgcccgggagggaggcaccgggccgcgggccaagcctaccgggggtgagtggagccgggccggagggagctgcggctggagggagggacgcctggcttcccggggcggctggtgggggctcggtcacccataggggct

SEQ ID NO: 9404 - DNA, 2300 bp, Homo sapien
agatctttgtcagatgcatagtttgcaaatattttctcccattctgtaggtagtctgtttactgatggcttctttggctgtgcagaatctctttagtttaattaggtcccactggtccatttttttttgtttttgttgcaattgcttttggggacttagccaaaaattctttgccaaggttgatgtcaacaagggcatttcctaggttttcttctagaatttgttttcaatttttatgtttatttattcttttttaattttttaaaattttgtgggtgcatattagatatatatacttatggcgtacatgggatgttttgatacaggcatgcaatgtgaaataagcacatcatggataatggagtatccatccccagaagcatttatctttcaagttacaaataatgcaattacactctttaaattatttttaaatgtacaattaagttatttttattatagtcaccctgttgtgctatcaaatagtaggtcttattcattctttttatttttttgtacccattaaccatcctcatctccccccaacagcccccactacacttcccagcccctcctccatgagttctattgttttgatttttagatcccacaaataagtgagaacatgcaatgtttgtctttctgtgcctggcttatttcacttaacataataaactccagttccattcatgttgttgcaagtgactggatctcattatttttatggctgacgagtactccattgtgtatatgcaccacattttctttatccatccatctgctgatggacatttaggttgcttccaaatcttagtaaacagtgctggaaccaacataggagtgcagatatctcttctatatactaatttcctttctttggggcatattttctaggatttttataggttgaagtcttgcatttaaaactttaatccatcttcagttagtttttatgtatggtgaaaggtaagggtctggtttcattcttctgcatatggctagccagttatcccagcaccatttattgaaaagaaagtcctttccccattgcttgtttttcttggtcttgtcaaagatcagatatttttaagtgtaaggctttatttcagaagtttctattctgttccatttgtctatgtgtctgtttttgtgtcgataccatgctgttttggttactatagctttataggatagtttgaagtcaggtagtgtgatgtctctggctttgttctttttacttggggctacttttgctattcaggctattttttggttccacgtgaattcagagtagtttttttctaattctgtgatggatgacattggtaatttgatagaaatagtgttgaatctgtaagccactttggggaatatgaccgttttaataatattgatcttacaattcatgaacatgggatgtttttccacttatttgtgccatctctggtttctttgagcagtgatttgtagttctccttgtagaaatttttcacctctccttggttagctgtattcctaggtatttcattttctttgtggctattgtaaatggggttgtgttcttgatttattctcagcttgaatactattggtgtatagaaatgctactagttttgtatattgattttgtatcctgaaatcttactaaaactgtttatcagctctattaaccttttggcagagtctttagggttttctgcattttaaaatgagcattctggctgctgcaggaagataagaatgatctagttaggaggctttgacaacagtccgtgagatatatactatggcgtggcctagagatgatgagaagtgatcagatttaggatacactgtaaaggtacagccaatacatctatctgatgtaaaatagaaaaatagaggaagtagtcattattctaaggttttggagcaactgggtgaatgatagcacaatttaatgtgatgggagataatagattttgggtgtgtttggaattaagaatttactttcggagaacccagcagagctggttgagctttcaaatgtgcggttgtgggttcggggtttattggttgaattccgctggctcaggagcctctgcagagaaagcgtgagagatggagatgggcaaatggattcatttagagctgcggaacaggacgccctccgatgtgaaagaacttttcctggacaacagtcagtcaaatgaaggcaaattggaaggcctcacagatgaatttgaagaactggaattattaaatacaatcaacataggcctcacctcaattgcaaacttgccaaagttaaacaaacttaa

SEQ ID NO: 9405 - DNA, 2300 bp, Homo sapien
agcaatatatccttgtaacaaacctacatgtgtatcctctgaatccaaaataaaaatagagttttttttttaaaaaaaatgacttttggatagcaaaagacttggggtggtttgagagaggtaggaattgagttggattatgagatacatctggccatgaaagggtaaaagtccctgtgatgtgagatgataaagggaggagcttagactccttatggaaactgaggtaaataaaaaggtagattatgatggaaatggccctgctggtctcttagagggtgggagagagtaacctctaatcagagtctaatttgaagcacttcatgatagtaagaaggtggtgtgcagagagggtccatggtggtctcactagtagcacctggagctctaaaatcaaaacaagggatgggacagtatgcctttcctttaaagtctgctaaagacaggtggagcgccgagccaatgttgacacctccatctgttgtacataccctggcattttgtcgcaggttgcatgatttgtgagtcctctttagattttagccctctccttctccactctgcatttctgcatgaggagttttcccaccatcacctgggcaggctatgggacctgaaaggtactatctcaggtcctgtctgcctaaacacgctataccacaattcccacttcaccacgacctccccatgtaggcacagtgctctctctgaggctgctcctccaggggtctagtttcaagggagaagctggcccttggttccttctgttcttagatttctagacatattgggatattttatatgcaccatcaccaaaaggaagcaggtcccagagttgcacacctacacctaatgcctcttccctaattttcacttcctgcctccgtattaaaaccctatactttcttcagaaaaactgttttcatcccttctaaatctaaatggttttaaatccatgatcattcacaaatctttggtgattttctaggtcaaagactttgggaattcacaacaaaaccatttctctctgaaggacctagctcttgaaattgaaagccagatttctcagacctgattttgaaattcaaagtaaaaactggattcttctggcctcattcctttcatctctaagaatcaatggatttccaatgcaatgggtagaaggcaatgaagaagcaaaaattcccagaaattaaaattaaaatcccacaacattatccctccattttaccattatcgtttggattgaatggagcctagtgtgtggctgggagggaaagcaagttgtccgtctatgaggtcacagctgaagtcacaaagtattgaaaatggcaaggttgatatgggaacaggaggctgttgtgagatggggctcaaataggaaaaagtctaggggtgaaggagtggggcaaagtgtaatttggggaaccaagcagggtaagtttctaggcataattgacctcgttcttgactggggcttggaggccaagaagggtgggagtgggaaaagtgggagggaaacttctcaaaggaggatttgtctcctgtctgggccactgcctatgagcccttcttctctacaaagcactttaaggctggagctgatggccctccatcctgaaactcctctatccttagttaaccatgaaaattctgactgaggtgggagggggtggggtatttgacaatcttgcattcactctacactatttcctgtccttgcctgaactcaaagaccctttggccaatcccccatccccaatctcagccaacttatttttcacttagattctctctttttttttttcgtctacttcctcactgcaatttctgttgttactgacaaagactataggaagattttacccagggcaaatacttccttcctcttaccctcctcttaccttcatctttccttatgcatatgtacatgcatatgcacacatacatgcacatatatgcaagcacacacatgcacatgcacactcacccattcaaaatacaaatgctccattaactgctggtagttctccactgaataagcgcttttcttctcaccatgtacctgccttctccgcatattcatttatgcctctccagggcctggagctatctccatcttcagctccagagtccttggtttctgtctgagaacaaatggcacagcatccctgccaggatcaggaacaaaaggtagaaatgacctccaagcagcagagaaggtaatggggctaatgatgaccctcaaacatccttagattgctatactctatgggagaagaaccagggcctcctgtctt

SEQ ID NO: 9406 - DNA, 2300 bp, Homo sapien
aaatgagaggactgacactacctaacttcaagacttactataaagctataaatatccagatagtgtggtattggacaaagggacaaatagacaaatagattactggaatagaatatatatatacagcccagacatagatccacataaatatggtcaaccgatctttgacaaaggagcaaaggcaatgcaatggagaaaacataatcttttcaacaaatgattttggaacaactggacatctacatgcaataaaatgaatctagacacaggctttatgcccttcacaaaaattaacctaaaaatgaatcaaatgcctaaatgttaaagacaaaactctaaaactcctagaatataacacaggagaaagtctaaatgatttggggtatggagataactttttagatgcaacatcaaaggcatgatccatggacataatcattgatcagctagacttcattaaaattcagaatttctcctttcagaaagatgttgtcaagggaatgagaagacaaaccacagactgggagaaaatatttgcaaaagacatattccataagggactattatccaaaatatacaaagaacaataagaaaatgaacaatgcaatttaaaaatgggcaaaaggacagacacctcactaaaaaataaatacagatggaaaataatcatctaaaaagatgctccatataaatgtcattaggtaattgcaaattaaaacaacaatgagataccactacacacctgttagaatagccaaagtccaaaatactgacaacaccaaattcttgtgaggatgtgaagcaacggaaattctcattcactgctggtggggatgcaaaatggtatggtcactttggaagatagtttgtcagtttcttaaaaaactaaacatactcttaccatataatcatttgggtatttactcaaattagtcaaaagtgtatatccacacaaaaccttgcacatggacgtttatagccactttattcatagttgccaaaaattggaatcaaacaagatgaccttcagttgagaagtagataaactgtcatacatctaaacaacagaatattattcaaccctaacactaaaaagaaatgagcaatcaagacataaaaacacatgaaggaaacttaaacgcatattaccaggcaaaagaagctactctggaaagggttcatagaggatggttccaactatatgacactctagaaaagacaaaactatggagacagtgaaaagatcaatggttgccaggggttgtggggagggagggatgagtaggcagagcacagaggatttttagggcagtgacaacattttgtatgatgttataatggcagatacatgtcagtatacatttgtcaaaatcatagaatgtacaccaagaatgaatcttaatgtaaactatagattttgggtgataataatgtatcaatgtatgttaattaattataatgaaaggaccactctagtgtgggatattgatagttggggaggctgtgcatgtttagggacagaggtatatgagaactttatacaatttcagctcaattttgctatgtgttgggagaaaagctgaggcaagacttgctagtctgacataatataaaaagagtcttggaacatgtcctgggtccagagtttaaaacctcttgtgccctatggaacaccaagctctgtgcttaagggtggaaggctgccctgctgcattacaacctaagcccagggcataaaacccctcatggcttgaatggaatccagggctcagggcataaaaccccccatggcctctggaatgtgtctagacttgctggctccttgcttctagcagttccagtcacatagattgattgcatcttaaactagaagaacatgtttcccgttatctccatatgcttcagagaaaatgctaaaccatcacagctgtagatcacgcacttgatgaatcactacctttcaacccccacatcctcaccacctgtttctttgtttgatcaccaataaatagcgtggggtcccagagctcggggccttcacagcctccatactagcattggctcctggaccaacactatgtactctttaacttgtcttgtgtcattcctttgactccaccggacttcatagcccccatggcctggtgttgggtctgatcaccccaacatccctggtgcccaatgtggggcgacgaagattctggcaatggaatgctagagcgtgtggaagtggaggacgcatcatcagaggacacccgaggacgactgaaggaagctcagcaggtaagctgggtgctcag

SEQ ID NO: 9407 - DNA, 2300 bp, Homo sapien
taaataaaaatcctgcagccaagttggagagaagattgccgtactggacaggatgtacaggcaatctgtatttggggcatgggaaggattttgaggctgagtttctagattaagatttaattagtaaagattcagatgtcccccttggctgggctttgaactcatcaggaatagccaggaccaggaaactgatggggacatcataatgagtcctatgggtgacccaaggtcagacttaggatgtaaggccaaagctgggagttatgagtaaacattcactgttcaaggaaatagagcactgttgtaacccagacctgaagactcatgaaatacatacttgagggccatgagggagaacacattctggccataagggagaaatctggccataagggagaaatgatcagagaatagtgggacaggacatccccctgtaaggtagggattaccagcagcaggcatttccagcagaaactagatgctcagagtccaactttgcagtcctacaagatgaattcccaacttttttcctattgtctgagacagtggtccagaatctgcagtactgcacagaatcctggctgttgctacaccctatatacccactcatgtattcctgtatcatgaaatcctttcaagtcttcctcttgcttacttgtccagagattccaggcattcctgggatacacatcttccctagtaattatatcgaagattcccctaggtgtctacatgagtcccaaccaacttctctcccacttgtcatgtctggagtctgctagcaatacctattaggaggaattacatgccctcctttctgaatgacagcatccacagtaactgcaaagtggcttatctcttaaaaaaaaaaaaaaagcctccacaccaaaataattcctcacctcctgtttttcttctaattgaggtaatgagcaggagtgggcttctaccagtaatgatttcaatgtgattttcttactaaaggcacaaagtaagaataacaacagcagcattagcagaaacaactttgatttttgatagtgcttcaccctataggagaatttatctgagttttatctagacttacaaacttaataaataattttaataataacaaatgtcaatgaacagttaggagtaggtagtttgaagcgccttatatataatctcatacttaatcctcaaaaccttacatagtactattatatgcattttatatgctaagaaattgagatacagagctttgtgtatattgtacaagtcatatagctaattaatagtacagctggaatgtgaacgtagtctgacacaggagtccacttagccattgatctgtgtggctcaattatactctaagcatcagcttttcagaactacccatgttttactgaacatgacttgatttttcctcagtcttgagtgttcgaacacattcttcatgccaattaattgtctctttgatatttattttcctaggtcaatcatatgcttgctttctctttttttttttttttttttttttgagacagagtttcgctcttgttgcccagactggagtacaatggcacaatctcagctcaccacaacctccacctcccaggttcaagtgattctcctgcctcagcctcccaagtagctgggattacaggcgtgagccaccacgctcagctaattttgtatttttagtagagacagggtttctccatgttggtcaggctggtctcgaactccggacctcaggtgacccacccgcctcggcctcccaaagtgctgggattacaggcatgagccaccgcgcccggccaatcatatgctttctttaaaaatgtgttcaaatttcttcaatgtattatcattactgacccctatataaatcaaaatttgagctctcttcatattaattacactgttacaatttcttgttttcacatccatgttcttcagtggaccatttaaagagcaaagactacacctcaatcacctttatgttccatgtgaccgatatgaaaagagaatcagtaccatgagaaaactgtctggagtaatcttgacttggctgctatgattttacgagttatttctagggagtagcctttgtaaatggccttggggaatcacagcaccatcaccgagttcctcctccttgggctgtctgccgaccccaacatccgggctctgctctttgtgctgttcctggggatttacctcctgaccataatggaaaacctgatgctgctgctcatgatcagggctgattcttgtctccataagcccatgtatttcttcctgagtcacctctc

SEQ ID NO: 9408 - DNA, 2300 bp, Homo sapien
agggcaggaggcattttacacaagactccactattggaaggactagtcctcaggactagcttttcttatctttccctctcacacatggttcaaggtcactctcagccatattctcaacaaagcttagagtgatagaattcccattcctgtcgtgtacccttgcagtgcctctgggtggaatgcggagaaatggagtggctccacttctgttgtgtttctgaacatgtatctcttgctatcagaactttctgctcatcccttctggcacaccaagatcctccacattcccttcactcatgccacttcatatactggttatccatggtacagaagacaggatttaactgagaggacttttccctgactctgaatacatgtaggagataacgatatggaagaccttcagtatgtaagtcttaaatagattggttgggataaatgttccctgaaacataagaaacagcgcagcggctcctgtctgtaatcctagcactttgggaggccgaggcccaggcaggcaaattgcctgagctcagaagtttgagaccagcctggccaacatgcagaaactccgtctctactaaaaatacataaattaaccgggcatggtaacacgtgcctgtagtcccagctactcgggaggctgaggcaggagaatcacttgagcctgggaggcagaggttgcagtgagccaagatcgcgccactgcattccagcctgggcaacagagtgagacttggtcaaaaaaaaaaaaaaaaaaggaagaagaagaagaaatcaggtttagagatgaggacaaagaagacgaatggtggcatgaaggagctaagagctacttgtcaccatgacatgaagcttcatgccagcaaattaaaggagctattcagaactagtatcctcaactctacttgctcaggggcactgaccttatagagattccagacataagcttgttcagccttaaagtccaatctttccactggcttgggtccttcccactttctgtggccaactctgaggttgtctacaagttattggtcttagatttatgtaatgtctcaatgccagtgtagtatttggttatttacggtaggagtggttaggggtggggaatctgataatagctcgtaggatagctagattctttttttttttttttttttttaaagatagggtctcactttgtctcccaggatggatggagtgcagtggagtgaacatggctcactgcagcctcgacctcctgtgctcaagtgttcctcctgcctcagcccctcaagtagctgggactacaggcacatgtcaccatgcccagctaattttttttgtagagatgggattttaccatgttgcccaggctggtctcgagctcctgggctcaagtgatccaccagactcggcctcccaaaatgccgggattacaggtgtgagccactgtgcctggcctagatgctttcatacaggcttttcaattatgcattttccttaagtaggaagtcttaagatccaagttatatcggattgttgtagtctacgttcccatattctattcctatttctgagccttcagtcatgagctaccatattaaagaactaattctgggccttgttacatggctggattggttggacaagtgccagctctgatcctgggactgtggcatgtgatgacatacaccccctctccacattctgcatgtctctaggggggaagggggaagctcggtatagaactttattgtattttctgattgcctcacttcttatattgcccccatgcccttctttgttcctcaagtaaccagagacagtgcttcccagaaccaaccctacaagaaacaaagggctaaacaaagccaaatgggaagcaggatcatggtttgaactctttctggccagagaacaatacctgctatggactagatactgggagagggaaaggaaaagtagggtgaattatggaaggaagctggcaggctcagcgtttctgtcttggcatgaccagtctctcttcattctcttcctagatgtagggcttggtaccagagcccctgaggctttctgcatgaatataaataaatgaaactgagtgatgcttccatttcaggttcttgggggtagccaaaatgaggttctttgtccctctgttcctggtgggcatcctgttccctgccatcctggccaagcaattcacaaaatgtgagctgtcccagctgctgaaagacatagatggttatggaggcatcgctttgcctgaatgtgagttccctgcctctgtgtttcatccattcctcatacgc

SEQ ID NO: 9409 - DNA, 2300 bp, Homo sapien
acactcctaacaatgggtgatgtgtcactgataaatgactagggactgggagcagggaaagatagaaaataggttcttggaaaggtatgtgattattctccagccttctttttgtcacttttccttcttcaccaggttactggggcccaactgagctggctgaggagtaacccctgcccctttacagtgcctcatccgtcacaggttgtttctcctccacctttccacctctgtgctttctttccctctcatctcccctttccactctcacctcacttcccccgcttctcatcttccccccactgtctccgagtgtagggagatttccccaaccttagaggtcccctcaagagggtactgtctccctagtcccctcttgtcactgcagccatggtggcctatgcagacttgggccagaggggacagacagatcctggtctgaaggcagacttttccccagactacagtaaaactgactgttgcaccatgcttcagctttgtgtccagcattttttctgcagctgaagacagtgacaacaagctagtaatgctaaaaatttaactcaacaaatatttgtgacctgcctgccttccttccttccttctttccttctttctttccttctttctttctttccttctttccttctttctttccttctttctttccttctttctctttctctctctctctttctctctctctctctttctttctttttcttcggtctccctctgttgccgaggctggactgtactgccgtgatctcggctcactgcaacctccctgcctcgggctcccgtgattctcctgcctcggcctgccgagtgcctgggattgcaggcacgtgccgccacgcctgactggtttttgtatttttggtggagacggggtttcgccttgttggccgggctggtctccagctcctgacttcgagtgatctgcccgcctcggcctcccgaggtgctgggattgcagatggagtctcgctcactcaatgctcaatgttgcccaggctggagtgcagtggcgtgatctcggctcactacaacctccacctcccagccgcctgccttgtcctcccaaagtgctaagattacagcctctgcccggctgccaccccatctaggaagtgaggaacatctctgcctggccgcccatcgtctgggatgtgagaagcccctctgcccggccgccccgtctgggaagtgaggagcgcctcttcccggccgccaccccatctaggaagtgaggagcatctctgcctggccgccccatctgggatgtgaggagcgctgctgcccggccaccccgtctgggaagtgaggagcgcctctgcccggtcgccctgtctgggaggtgaggagcgcctctgcccggccgccaccccgtctgggaggtgaggagtgtctctgcccggccaccaccctgtctaggaagtgaggagtgcctctgcccggccgccaccccgtctgggaagtgagaagtgcctctgcccggccaccaacccgtctgggatgtgaggagcgtctctgcctggccgccccgtctgggaagtgaggagcgcctctgcccggatgccccgtctgggaggtgaggagcgcctctgcccggccgccccgtctgggatgtgaggagtgcctctgcctggccgccccgtctgggatgtgaagagcgcctctgcccagccaccaccccgtctgggatgtgaggagcacctctgcccggccaccaccccgtctgggaagtgaggagcgcctctgcccggccgccccgtctgggaggtgaggagcacctctgcccggccgcccattgtctgggaggtggggagcgcctctgcccggccgcccatcgtctgggaggtggggagctcctctacccggccgccaacccgtctgagaggtgaggagcacctctgcccggccgccaccccatctgggaagtgaggagcgcctctgcccagccgccccgtctgggaggtgaggagcacctctgcctggccgctgtgcaatcttccaagtgtgaagtgacagcctttctgcaggtgtacccaacagctctgaagagacagcaaccatcgagaacgggccatgatgacgatggcagttttgtcgaaaagaaaagggggaaatgtggggaaaagaaagagagatcagattgttactgtgtctgtgtagaaagaagtagacataggagattccaaaaaaaaaaaaaaagttgtgagcattggccatatacatagctaccaggaattcattatttatcaaggataagaccaatgccatcacagttctggcac

SEQ ID NO: 9410 - DNA, 2300 bp, Homo sapien
atttatttatttatttgagatgaggtgtctccatattgcccaggctgggatcgaactcctgagctcaggtgatcttcccacctcagcttttcaaagtgctgggattacagtggtgaaccatgacgcccagccttagtgtttttcttgagggctgtggaatctttatgttcacttccactgggactcatgctcacttgctcgttaggcatggataaaacatctttcttaaactgacagtgaggagataagagatgctggaaagcaaaaaatgtctagaagggttatgggaagaaagctaggaatcatttctacaagtggtggagatgacagaaagatgcttttaaactaaaaatccttaaaggatggtatgattggtattgtgtctgtcatttttatgatacctgcattatttagcatggaattttaaagacagggcacacagttatgagaagcagccctaaactagaacaaatatttccttattctcagtccaatgctctttactatataagaggcaataagggataaagaatgcgggctgggttcaaattcgtcttcctttcccatttaatagctatggtcccattctgttcctcagtcctcttatctgtaaaatggacataatactaacctgtacctcttagggttgctttgaaaaattcaatgactttatacatgtaattcccagaatcagtaaacacccaaaaaatgtttctcagtgttctctataccaaatgttcagtacatgtattgaactgttcacaaaagaaagctaaagactttttatgtgtaaacagtgatcctccagcctctgtctgatttattttttatttatatatttttttgagacggagtttcgctcttgttgcccaggctggagtgcaatggcgcgatatcggctcaccgcaatctccgcctcccaggttcaagagattctcctgtctcagcctcccgagtagctggaattacaggcgtgcaccaccacgcccggctaattttgtatttttagtagagacggcgtttctccatgttgctcaggctggactcgagctcccgacctcaggtgatctgccagcctcagcctcccaaagtgttgggattacaggcgtgagccaccgcgcccggcctgtctgtctgattttatactagctgtgtacagtggtgagggaacagcagcctaggaccacagactgagggtccaaaagtagccggaaaacgagccacgctgcaaggtggaaaaatattagctggcaacccgccccgcagcccgctctccgcccccttccccggctcactctcctccgggcggagttgctgacagacagtctgtcttagccaccccaacctcgcattttctcagcgctccgccctcccagacacgataggtagttggtctcggccaatggcgacatcctgtcatacgagcggtagccaatgagtagccaggagtccggaaaggggcgaggccgatctgagagccgctggcgccactagagaagggcgagcggcgcggcagagtgcggcgcagcgcagctcctgaggtaagatggcggtgctctttcctctaagctcttgcggttgggctgctatttcgctctttttgtcagctcagagctgctactccgcctcaaagcagtgtcagagtcagtctccttcctgcaggcttccaggagccaggatctccggtgactggagccgtaggacaaaatggcgctcgcataggcttccgaggccaggcccagtcgtgcgctctgaggcaggccgggacaaaggcggcgtgcggggaggcggcgtggccgccgcgtggggctggtgttgtcgcttcccttcgtgctgcagctgtgcgagtcctgaagatacattcagcgtggtgtggttcggggtggggccgggcatggagggacacgctaaagggaggcaaagccacagatgcctgtggagacttggggagggcggcggggacttacggagcgtaccttacggggacgacttctgcatgtcctttggaaactgtccgcgcgatctgtgtggagcaggaattttcgggaagggtaagggctttttggtctttcgtttgaccccgcaggttttggttatgaacaggattcggattcacgtcttgccaaccaatcgggggaggatcactccagtgcccaggtctcaggaacctctgtcttgtgcattcactcatcgtccatgctctcaccctcgtctggaggggcaggagttttgcattaagcatatccttgaagacaagaatgcacccttcaagcagtgtagttatatatcgacgaagaatg

SEQ ID NO: 9411 - DNA, 2300 bp, Homo sapien
cccgctaaaaaaaaaaaaaaaaaaaagaagtggttctaaatagtaatgttttgtctgtcttggacttacaagaaggattcttttttcaactaagaccttcagtaaattcattgaaagaaagtcttttgtttcttccccatctattcctgtgtctcttcatattgttcactacagtagttttaatgttgctttttgatattactacatttggttgcagattcggattcccaaattttctgtgacatgactgcctctggctgttttttaattatagggtgtttataacaaaacatcttttttcgtactcctgagggttggtctgtttgcttatgtatataaatcattgttattaatattatgtttgtattgcatccataatccaaagctatcctagaatgttcactccaagagagcagggttatcttccttgttctctcctggcacttaggtgctcaataaatattcgttgaatgaatgaatttcaggccttcttctagggctgctctagtctctggaaacagcacaacccccaaggtttttttttttttttaataatttatcggtcctatagtgtatttatttatttatttatttatttatttatttatttatttgagatgaggtgtctccatattgcccaggctgggatcgaactcctgagctcaggtgatcttcccacctcagcttttcaaagtgctgggattacagtggtgaaccatgacgcccagccttagtgtttttcttgagggctgtggaatctttatgttcacttccactgggactcatgctcacttgctcgttaggcatggataaaacatctttcttaaactgacagtgaggagataagagatgctggaaagcaaaaaatgtctagaagggttatgggaagaaagctaggaatcatttctacaagtggtggagatgacagaaagatgcttttaaactaaaaatccttaaaggatggtatgattggtattgtgtctgtcatttttatgatacctgcattatttagcatggaattttaaagacagggcacacagttatgagaagcagccctaaactagaacaaatatttccttattctcagtccaatgctctttactatataagaggcaataagggataaagaatgcgggctgggttcaaattcgtcttcctttcccatttaatagctatggtcccattctgttcctcagtcctcttatctgtaaaatggacataatactaacctgtacctcttagggttgctttgaaaaattcaatgactttatacatgtaattcccagaatcagtaaacacccaaaaaatgtttctcagtgttctctataccaaatgttcagtacatgtattgaactgttcacaaaagaaagctaaagactttttatgtgtaaacagtgatcctccagcctctgtctgatttattttttatttatatatttttttgagacggagtttcgctcttgttgcccaggctggagtgcaatggcgcgatatcggctcaccgcaatctccgcctcccaggttcaagagattctcctgtctcagcctcccgagtagctggaattacaggcgtgcaccaccacgcccggctaattttgtatttttagtagagacggcgtttctccatgttgctcaggctggactcgagctcccgacctcaggtgatctgccagcctcagcctcccaaagtgttgggattacaggcgtgagccaccgcgcccggcctgtctgtctgattttatactagctgtgtacagtggtgagggaacagcagcctaggaccacagactgagggtccaaaagtagccggaaaacgagccacgctgcaaggtggaaaaatattagctggcaacccgccccgcagcccgctctccgcccccttccccggctcactctcctccgggcggagttgctgacagacagtctgtcttagccaccccaacctcgcattttctcagcgctccgccctcccagacacgataggtagttggtctcggccaatggcgacatcctgtcatacgagcggtagccaatgagtagccaggagtccggaaaggggcgaggccgatctgagagccgctggcgccactagagaagggcgagcggcgcggcagagtgcggcgcagcgcagctcctgaggtaagatggcggtgctctttcctctaagctcttgcggttgggctgctatttcgctctttttgtcagctcagagctgctactccgcctcaaagcagtgtcagagtcagtctccttcctgcaggcttccaggagccaggatctccggtgactggagccgtagg

SEQ ID NO: 9412 - DNA, 2300 bp, Homo sapien
ttttaaaatcttctcttgatggtaatatttattggattacatgttaggatagcctcctgcctgtggcctatccagaacttccagtgttgctgcaagtacaatctactcatctcagtgtttttttatttagtaaattacctaagtaaagagatgctatttgcttcattgcaggcatgcgaggctgccaagaaaacaaaagcagatgaccgaggaacagatgaaaagacttcagagcagacaatcctcaatatgatttcccagagctcttcagacacaaccattgcaggtttaatgagcatgtcaacttctaccacaagtgcagtgccttccctgccagtctccgaagagtcatccagcaacttaaccagtgtggagatgttgccgggcaagcgttggctgtcctcccaaccttctttcaaactagaacctactcagggtcatcggactagtgagaatttagcacttacaggagttgatcattccttaccacaggatggttcaaatgcatttatttcccagaagcagaatagtaagagtgtgccatcagctaaagtgtcactgaaagaataccgcgcgaagcatgcagaagaattggctgcccagaagaggcaactggagaacatggaagccaatgtgaagtcacaatatgcatatgctgcccagaatctcctttctcatcatgatagccattcttcagtcattctaaaaatgcccatagagggttcagaaaaccccgagcggccttttctggaaaaggctgacaaaacagctctcaaaatgagaatcccagtggcaggtggagataaagctgcgtcttcaaaaccagaggagataaaaatgcgcataaaagtccatgctgcagctgataagcacaattctgtagaggacagtgttacaaagagccgagagcacaaagaaaagcacaagactcacccatctaatcatcatcatcatcataatcaccactcacacaagcactctcattcccaacttccagttggtactgggaacaaacgtcctggtgatccaaaacatagtagccagacaagcaacttagcacataaaacctatagcttgtctagttctttttcctcttccagttctactcgtaaaaggggaccctctgaagagactggaggggctgtgtttgatcatccagccaagattgccaagagtactaaatcctcttccctaaatttctccttcccttcacttcctacaatgggtcagatgcctgggcatagctcagacacaagtggcctttccttttcacagcccagctgtaaaactcgtgtccctcattcgaaactggataaagggcccactggggccaatggtcacaacacgacccagacaatagactatcaagacactgtgaatatgcttcactccctgctcagtgcccagggtgttcagcccactcagcccactgcatttgaatttgttcgtccttatagtgactatctgaatcctcggtctggtggaatctcctcgagatctggcaatacagacaaaccccggccaccacctctgccatcagaacctcctccaccacttccaccccttcctaagtaaaaaaagaaaaagaagaggagaaaaaaacttctttaaaaaaacacataatttttcttttttttttttggactaagaaaattacttatgaaatatgtcatccttggactagggaataaattgatattgagacatagttaggagggtggtagaaggccttggctatatatctgctgtctcatgcatttaactattttcttacagtttttactggtattagagaggtgttgaagctgtgaaggattaaggacacattctgaattcttggcctctccaccatctaattaggttgattggagttgatatcttccctcttcttgccagagctgaaaaatggagggtttcttgtatcagacaattgtggatcctttcggtgtttaatatatcagaagagaggaagtatttaaacgtcaaatcttttaatagacttaataatttaaagaaagtaagttatctgtttagtttttttatataattgggaaggggatagggattttgctgtgtgtatatgatacatagcagtaactcctggtgggtgggattggagggtgggaatgtgtgagggtgggtgggaggctaggtttttggctaggagttctgaaataggctcaggccacttttttcagacttttaagtgtgtatgtaagtgtgggtatgtgtgtttttaagtgtgtgtgtttaaaaataatgttttatcttccctccctgttccttaccgttttcatttt

SEQ ID NO: 9413 - DNA, 2300 bp, Homo sapien
cttgggtttgtctttatcagcagcgtgaaaatggactaacacagctgttcaaaagataacatacatgactacataactgaaaaagtgcttattctactaaaaaatctattttgtaagtgcttattctcttaatagtaaagagtctgtgagggaagaaatttgaaatcccaagttcttttactttataactagaagtaagtcatttaaatcttcctgaacctcaatttctccagggtaaaatggagctaatactaactacaggcagtatatggcagaggtgacctgaatggaaagaaatacttctgagaatgaatgacaatcaagcatagtaagatcacccatgcctagaaatgacaaaacccaaaatattatcaaagcaagatgaaggattctaatattatccaaatctatctaaaattacccatatttaatcaaggtaaactgaatatggttccagaaaagcaggaatacagcttgcgtgaatggaaagatcaatggaattagatttaagatctacacttattagtggtgtagtgagggcaaactcccaaagcctcagtttctgtattgtgggtgttttgcacatttatctgacaaagatttatggactatttactagggccagggctttactaggtaagtgccatacaaaaatgaaggcattgctcttgccttcaatttcaatacaatgtaacaaatattataacaataagggctactgaatattttctaagtactaggtactattataaatactttttactcattaaatctttactccctttcactatctaaaacataggtattatcacagaaaagaggcatagagaagttaactatcttgcccagcaccaaacagttatcagaggctggagctgggatgtatctttttttttttttttttttttgagaaggagtctcgcaatgttgcccaggctggagtgcagtggcgcgatttcggcccactgcaacttctgcctcccgggttcaaatgattctcctgcctcagcctcccgagtagctgggagtacaggcgtgcgccaccacgcctggctaatttttgtattttcagtagagatgaggtttcaccatgttggccaggctggtctcgaactcccgacttcaggtgatccacccgccttggcctcccaaagtgctgggattataggcttgagccaccgcgcccggcaaaggagctgggaaatattttgacagagggcaagaacttgctaatctgtgcaagtgaggggtagtggtggaggctttccacactcaaggggcagttttagttcacccattcgcaaacgtacttaaaaattacctcttagagttgtgctgaataaatgaaacagtatatttaagtcagtattgtgcctgggacatgtaagctcttaattaatgttattaatttcattttattcctttaagttggatcactggcgaacaacgtgagaatgttttcatgcctttggctacacattaaagcgacctctccaaatgggttgtcgcattttacattgctaccaacaatgtaacagccttctagttgctttatgctccgatatacgaaagagccccaccatttgattctgtttttcagtttctgacagcctcacctactttctctttcaagttcatctgccacatttttacttattttatttttttgagacggagtctcgctttctcacccaggctggaggctggggtgcagtggcgtgatctcggctcactgcgatctccgcctcccgggttcaagcgattctcctgcctcagcttcccgagtagctgggactacaggcgcgcgacaccacgccggctaattttgtatttttagtagagacgggggtttcaccatattggccaggctggtctcgaactcctgacctcgtgatccgcccgcttcgggctcccaaagtgctgggattacaggcgtgaaccaccgcgcccggcccatctgccccattttacatcaccactgccgtcacaaacaaagttctcgtaagaaccgccaagcggcgcgtgggcggccgccccatcccactataattgcggcctcgcagcctgacccggggcgccaacgctcaatccggttctcgcgggaagatacacggtttttaagaaagaacttctaaccccactccaccgcccaacggtcacgtgacgcgcctgcgtcctcgcctcaaggttttttctggtcgcatattggctgttaactcggctacggggtgtagcgaggtgcattccggaagtaggtcctttgacttttgcttcctctacggaggcaagtaacaacccgg

SEQ ID NO: 9414 - DNA, 2300 bp, Homo sapien
gatgtgctttgttaaacagatgcttgaaggcagcatgctcgttaagagtcatcaccactccctaatctcaagtacccagggacacaaacactgaggaaggccgcagggtcctctgcctaggaaaaccagagacctttgttcacttgtttatctgctgaccttccctccactattgtcctatgaccctgccaaatccccctctgcgagaaacacccaagaatgatcaataaaaaaataaaaataaaaaaataaaataaaaaattagttaggcaaggtggcagacacctgtaatcccagctactcagggggctgaggcagaagaattgcttgaacccaggaggcggaggttgcagtgagctgaaaacgtgcccctgcactccagcctgggcgacagagtgagactccatctcaaaaaagacaaatcaagcatcagaaccagactcacatatggcagaaattttggaattatcagactgagattttaaaataactattaacatgttaaggacactaatggaaaaagaggacaacattcaagaacaaaggatggaaaaagaggacaacattcaagaacaaagggcaacgtaagcagagagatgaaaactctaaagaatcaaaaggaaatgctagaaataaaaaacactgtaacagaaatgcagaatgcctttggtgggctcatcagtagactgggcatgacaaaggaaaaaaatcagtgagcttgaaaatatgtcaataggaaacttcccaaacggaaaaacaaagagaaaaacgaatgaaaaaagagtggaatatccagatgcaatggaagtaaataaactcatgagcatagataagagtaaaataatcaggaagagatgacttgttagtatttactacttttattttattttatgacaagatctggctctattgccagtctggagtgcaatggcacaatctcagctcactgcaacctccaccacacaggctcaagccatcctcccacctcagcctcccaagtagctgagactacagtcacgtaccacacccaactaatttctgtgggttttatttttttgtagagacagggtttcaccatggtgcccagcctgatttcaaacttgtgagctcaagagatccatctgtctcggcctcccaaagtggtgggattacaggtgtgagacaccacacccgatgtactacctttatttttaatataacattcaattgtaagtttagttaatttgatttttaataatgccttgtttaacaaccaattcacaaaatcaatgaaaatttaacaagctttcaaaagtcactatggattggcacaccactgctgaaacaaagactcattgaaagtatcctattcagatttcttttttttcctgaatataaggctggataactattaacatttaaatactggtggggcgtggtggctcacacctgtaatcccagcactttgggaggccgaggagggcagatcacttgaggtcagcagttcaagaccaggctggtcaaccctgtctctaccaaaaatacaaaaattagccaggtgtagtggcgcgcccctgtaatcccagctactcggaaggctgaggcatgaggatctcttgaaacctggaggcagaggttgcagtgagccgagaaagcgccattgcgctccagcctgggcaacagagggagactcttaaaaaaaaaaaaaaaaaaaaaatttaagtttccattatgtgttgaacaccgttctaaggaaatatgcatatattatctcatttgattctcataactgtcagatattgtcattgtcatttttttaatttaaaattgaaaatggaggcttagttaatctattcaaagtcagacacctagaatatggcataactaagatatgagcccaggtcggtgctctttctactcactgccttctgaagcttacactggaagactaggtcaagaaaaggtgtactgacaattgattcctccattttcctgaagttatttagcccactcccactccagctccactgtgaacctataaatcctgtgcctcattagacaaagggagtgtcagttgtggtaattcttaggacattaccatggttaccaggcacagagtccagtgccccaacctggacgttccagaagaggccagggaggatctgagatggccttcttcaacttgtatctattgggatatcaaaattcctttcagaacaagaaaaggaacacaactgaagaaacaagtaaggggaatatagggtagagggttagaagggccacttctttacctagatgcttcatagccacttcctagctat

SEQ ID NO: 9415 - DNA, 2300 bp, Homo sapien
cgatctcggctcaccacaagctctgcctcccgggttcatgccattctcctgcctcagcctcccgagtagctgggactacaggcgcctgccaccatgcccggctaattttttgtatttttagtagagacagggtttcaccgtgttagctagaatggtctcgatctcctgacctcatgatccgcccacctcggcctcccaaagtgctgggattacaggcgtgagccaccccgcccagctttttttttttttttttttttttttttttgagacggaatcttgctctgtcgcccaggctggagtgcaatggtgcgatctcggctcactgcaacctctgcctcccaggttcaagcgattctcctgtctcagcctcctaagtagctgggattacaggcacccgccaccatgcctggctaatttttgtatttttagtagagacgaggtttcaccatattggtcaggctggtcttgaactcctgacctcaggtgatccacctgcctcggcctcccaaagtgctggaattacgggcgtgagccactgcatccggctcttataacattcttaaaatgacaagattacagaaatgaagaacagatcactgatttccaaagcggggcagtgggggagggtggctataaaatgccagctccaggatgggtggtgatggaactgttctgtatcaatatattcaatatattaatatcatgttgtggtagtgtcccatagttttgtaagctgtaaccattgtggggaagagtaaaaggtacacatgatttccctgtttttgtttttgtttttaatagagacagggtcttgctatgttgcccaggctggtcttgaactcctgggctcaagtgatcctcccaaagtgctgggattacaggcatgagccactgcacctggtttccccgtattattcattacaactgtatgtgaacctataattataacaaaattaaagtttaaaacctaaaatactttcagaaatcaaaacaggcacatgtggaaagaggggtagtaagttatttctaatagcaaaactttaacatttttccatttttatctattcgagacagaatcttgctctgttgcccaggctggagtgcagtggcacaatcatggctcactgcagcctcaacaacctcccaggctcaaacgatccttcccacctcagcttcctgagcagctggtactacaggcgtgcaccatcacactgggctaatttttgtattttttgtagaaatggggtttcaacatgttgcctgggctggttctggaagtcctgggctggagtgatccatctgcctcttaaagtgctgggattacaggtgtgagccactgcacccagcctctaatagcaaaactttttaatagcttattattaattaatagaaaaataagccaaaaatgtaacatctactcaatgaattattagggattttaaaaaaattattataaacactatatagcaatccagaatattaggctataattctaagttttaaaaatatacaaattttatactggtagaattagacttatccaaataaatagtaaaagtactttttttttttttttttgagacagtctcgctctgtcgccctggctggagtgcagtggcacgatctcagctcactgcaacctccatctctcgggttcaagcaattctcctgcctcatcctactgagtagctgcgattacaggcaccccccacgatgccctgctaatttttgtatttttagtagagatgggtttcaccatgttggccaggctggtctcaaacttctgacctcaagtaatccacctgcctcggcctctaaaagtgccgggattacaggcatgagccacctcactcggccaaaagtacttttttttttttttgagatggagtttccctcttattgccccagctggagtgcagtggcacaatcttggctcaccgcaacctctgcctcctgggttcaagtgattctcctgcctcagcctcctgagtagctgggattacaggcatgcaccaccacgcccggctaatttttgtatttttttttttagtagagacggggtttctccatgttggtcaggctggtctcgaactcccgacctcaggtgatctgcctgcctcggcctcccaaagtgctggaattacaggcgtgagccaccgtgcccagcccaaaagtactttttcaaacagcatcaaagtctgatattattacaaaaatttaagaatatttaataccacatttagaacataataggcactagataaattacatctattaatagcatctaaatgtgaggtggt

SEQ ID NO: 9416 - DNA, 2300 bp, Homo sapien
gtgtctgcttcaagcgctgcccatctggcttgagctctcattctatggccacctggggcaagtgctgagtattcctccatcctgtccccgagtgagtacaaatgtcagtgctgctagctcagcaggtttaattacaagggacccctcagggtactctgtgagcatagaggagtgtggccctggtggggacacaggcatgcatggatgacagtgctgtcagcctcatcttattctgacctgggctcagccaggagtcacattaaaggtatcatcatggagtcctcccacctcagttcatgacatttcctccaggaaatgtgggatctgggactgatttggttaccatgatctctataacttgggccagccatataaaactgccatggacctcagtttttgtttatatatatttttcctttcaaatttgtcttgtgccccagggggcaacaggaccagtttctcagggttttggtgaagatcagatggaattagggatgtgaaaagatcttgaacagtttaaagcatagagaaagtgcatggagtatcattcgtccatccatccagtcatccatctactcaatgaacatttattattattattttattttttgagatggagtttcgctcttattgcccaagctggagcgcaatggtgtgatctcagctcactgcaacctctgcctcctggatttaagtgattctctcacctcagcctcccgaatagctgggattacaggcatgcgccaccatgcctggctaattttgtgtttttagtagaaatggggtttcaccatgttggtccggctggtctcgaactcctgacctcaggtgatccactcacctcggcttcccaaagtgctgggattacaagtgtgggccaccatacctggcctcaatgaacacttgtttaggtccttctaagggttgtggatacagcagtgagcacagcaggtcaaaatccttgccttcataaggctgacattccagtcaggagagacagaaaatgaacacataagaaaaatatatagaatggcagttgctgattagagctatggagaaaaagcataaagctgggaaaaagatagagagctccaggaaagggggttgctattttaatagggtggtcagagggagcctcactgataaggggacatttgggatgtgacctggaggagctcttgttccagacagagggaacagcaggcactgaggtcccaggctggcctgtgcggggtgtgttgggaaacagcaaagaggttcttgtgactggggtgcagtgaggaagctgaagagccttaggattatcactgttagctggtggcagatcatgaggtcaggagatcgagaccatcctagctaacacagtgaaactccgtctctactaaaaaatagaaaaaatttccctgggcatggtggcaggcgcctgtagtcccagctatttgggaggctgaatggtgtgaacccgggaggcggagcttgcagtgagccaagatcgtgccactgcactccagcctgggtgacagagtgagactccgtctcaaaaaaaaaaaaaaaaaaaaaaaaactccagattttttcttctgcttctgttgagaaaaatcagatcgggacccactgggacccagtggcaacagtctacagctgctgggtggtgcctgccccatgcacagggtatgaactcttttcctcccagttctgaaccataagctgcttcactcattgacttgggcacttgagtttgtgaccaccaacaaacagtgccttttagggaaattttcaagtatactggctttggggtcagacaaatctggtttagaatcgtggttctctcacttatgtggctgctggatctttgggcaactctttcttcttttcttttctttgtattttattttattttattttattttatttccctcccttccctcccttccttccctctctccctccctccctccttttttccttccttccttttttttttttttttcaggctatggctattgcccaggctagagttcagtggtgcacaatcctggctcactgcagcctccaccaccagggcccaagcaatcctcctgccttagcctcctgaatggcccggtctataggtgcataccaccacaccaggctaatttttttttttttgagacggagtctcactctgtcacccaggctggagtgcaatggcgcgatctttgctcactgcaacctctgccacccgggttcaagcaattctcctgcctcagctcctgagtagctgggattacaggcgcccgccaccacgcccggctaatttt

SEQ ID NO: 9417 - DNA, 2300 bp, Homo sapien
gaccttgtgatccgcccgcctcagcctcccaaagtgctgggattacaggcatgagccaccgcacccggcctaaaatttcattttttaacgcatatttatctcaattgttttttgcattttccccatgtggctcatgagcacattattctaagcgtaagtggtagataacctgattcaggtattttgaagaggaaattttgatagcaaaaacaattttttttttttgagacggcgtctcgctctgtctcccaggctggagtgcaatggcgtgatctcggctcactgcaacctccgcctcccgggttcaagcgattctcctgcctcagcctctcgagtagctgggactacaggtgcccgccaccacgcccagctaatttttaatagagacggggtttcaccatgttggccagaatggtctcgatttcttgaccttgtgatccacccgcctcggcctcccaaagtgctgggattacaggcgtgagccaccgcgcccggccagcaaaaacaatttttaaggaaattttgaagtgagaagtcaggcaaagaggccccaaagatcaaattgcaggccaggcctgcacaactgagaaatgagaaagtaccactttcccattttcaaacattataacaaacatttctctatctgattctgaaaaccctgtaagaaagacaaggcagatggttttattcccatttcaagagattgatgatttacccaaggtatatagtttgcaggtacacgtggctgataaatgttggaaactggctttcccaactcttcttttccttgcctgaagctctgtcctggacttaggaatcccagtggtgatttggagtggacaagacttgagtcttgaaggacaggactgcagggagggctggtcctgaggaggaagcatcttcagatacctaggtcttgggatcttgggtggggaataggctgcttggggaagggctgaattggaaggaggagctagaggtctgactgagggaatggagagggggcctcaaaaggaagccaggcaggctgccttcttcccagctccagaatggcaccccctctaaagtcacactcacctacgtacatcctggagtgaaactccttctcctttctgcttccaccattactctaatcctcaaagggttaaccagctttcacacgattttcccatctcccaggtaacttgggcagctgctccgtgctggaaataactaaagacccagtttctcagttcgtgcacttagcaatgcaccccagtagcccctccaacccccagcagagaagcacagccctttgggtaaaagatgcctgggggtgaggctgcaagttggcaggtgcgggggaggggctcccagagagtagggcggggggttgtgggggcggcagggagagtgccccttccctgggtccctccactgggccccgaggttcgcctcggggccgctgccccagagactggggggaagaggaaagaagtggtgtgcgggcaagcaggccgcacacacctggcgccttgtggaatgagagcttaattaattattaaactgagttcccgcgggagggcgcagggccgtgacaggcagggcgggaatggctaggtgggggctggggctggggcaggggcagggaggaattggggatgaagagtgggcgcggggcgccggcccaacccctgggaccctgacaggaaggaaggcgaccctcggtgggcggggcgggggatgtagccgtgaggggtgggtttgcgggcgcgctcggggacccccggggtgagggcgggagaggaatgccggaggaggcggccggggtgaagggaaggggaccgggctgcgaggtcccctccccgcggggtcttgatcccagaacagtagctgcttgtcttcccaggactgggggaggaagcggccggaggagaggagggggcgcgcggagggaggggtcccattatttggcctcctccgcccctaccccgctgctaggaaggggagtgggcaactcggcccccacttctggggagggggagggggatgcccagacaaaaggagcttgtgcctttaaggcggggagtccgggagccagcggggaggggacttctggatccggggtagagggcggctgcgctggacagctcgggagggggcgagggccgggcggacggcggacggcggacggcgggcgggacggccaggacgcgcgggctcggaggaccgcgggacggccggccggccggccggagcccgcgggggcggcggggcgggggcccagggcaggcgcggagccgggccggcaggtgagcgcg

SEQ ID NO: 9418 - DNA, 2300 bp, Homo sapien
cccctgtgcacctcagatttcctgtgataggctcatggaggagtaattttttttttttgagacagagactctgtcccccagagtctggagcgcagtagggcgatctcggcctgtctcctgagttcaagcaattctctgcctcagcctcccaagtagctgggaccacaggtgtgcactgccatgcccggctaatttttatattgtttgcagagatgggatttcaccacgttggccaagctggtcttgaactcctagcctcaagtgatctgcccgcctcggcctgccaaagtgctgggattataggcgtgagcctcggcgccaacctcagggagaagtaactgatatttctattttaaagtggaaggtgggccgggcaccgtggctcacgcctgtaatcccaacactttgggaggccgaggcgggcagatcgcttgagatcaggagttggagaccagcctggccaacatggtgaaacctcgtctttactaaaaatacaaaaattagcctggtgtggtggcgtgcctgtagccccagctactcgggaggaggagaatctcttgaacccgggaggcggaggttgctgtgggccgagatcgccaccgcactgcgacctaggcgacagagtgagactccgtctcaaaaataaataaataaataaataaaaataaagtggaaggtggagagatggtttctatgctatagtttcaggcagagaatgtggagggagggaaggagagaaggttgcgggaagccagggacaactgcttgcctgggccaacatcccctctctccccacctcccttctcctatggaaacttaagctgccgcagggcccagcggagctagtccattagctgtggtcagcaggggagtgtaggtggggagggccctctctccctccaggtcttcttgccaaatgaaaggcaaagcgtttgctccctctactagagtcaaaacaaaacaaaaccataaaaacctccacacgcatttttaacacacacaaataacataacttctttcctctgaatggtcgaagctgagcaacttggaggtgggtgggtggtaggggctccgtgacccactagactagactacagagggagtgggggaggaggtgccttctcaaagcactttccaggttaaatccagcctcgggaggagggagtggagagagaatttactctcccccaacttacctccctcagaaatgggggcaagtggagggtcagctgagcagagagggaggaacagtctcccgagatcccggggatgggaggattgaggggaggggtcccggaaactcccaggggaagtgggttaaaagaagggccgggaagaagggtgggacgccctccactggaaaggggagagcgttctagttaatgctgaggggaagttggggacctgggtcaatcggagtcagcgtgtgtctgtctccatgaaggggggtccgtctctccccgccccaggcgccgtctttggtctggagaagggtccagcctggggtcgttgggggtgtgaagggaccaatgagcggtctgtccgctcagaagggtccagagagagagccaactggaactacacccccgctcccccttcccccgccagaacttgggcttgtcctgtttgacgcacccgcagaaaggggcgggaggggtactgacccgaggagcggtcccgcgactctgtactccctgctgcccagtcccggccaggacgctgcccggcttagctggggcgcccctcgagaccaggatggaggtagggacgggctagggtcccggaagggcgcgggtgtctcgaaggagccccacggggtgggaataagtagagcgcagcctggggtctcctactgggggtctcgagctgggactgcagttcctggagaaaggagggggagaggggttcgtcctgggcttgggcggtgtctggatccggggtgcgtcccccctgctctggcctgggcagcgccgcctgctggcagggccggaccctgcggccccgggaccggacaccaggcggtgccgccacctggagggcgcgtgtagccgccgggccagcgagcccaaggggcgctgcagcgggtcgagaaggagccgcgtcgcttcgcctcgcccttccccttcgcggagctgagacccgctgcaccagaacccaggagaggggggagacggcagagactccgcgggcgcggggcgatcccagctgggctctctccacagggatgccgatccctctggagacacagagccgagccggggacgggtggatgggcgccttgacgcttgggcgggcgagca

SEQ ID NO: 9419 - DNA, 2300 bp, Homo sapien
agcttgaacccatctcctggggatggttggcatggcaacacatgcctcaggagcagacttagacaaccttgtcgcaggagattacaaggagtgtgaggaaggagtgctgccgatggcagatccgctgttacctacagccccaggaccttctgtgggtggagagagtcccaaaaggagaggccaggagagtggatgcagggatgggaagagaaacagctgcctccaccactgctttcttcactagagccatctcccaggagaagagcaccttgagggtcttactctttgacacctctccaggcccctgaaagaaggaattgaagagaaaggatgaaagagggggatacaaggaatactgcgtaactgggtgagggcacaaaagtgggcagtgtctgggaacttccaatacagaagaatccagtatatgaccaaaccccagttggtgctggactcaggagaggagacagtcccttcagccacaggggctgcaacaaagttgtttgtcaaacccagcatgaggaaggtgctgggcagggctgctctgggccacccacagtagacagactaaagatgtcagtctgaagatgcagctcttctttgtcttgccaagataacaccgataagtgacccaggtgggaagccacttggtttgggtgggctttctctctcccatgcacagtgctttctaccatagatcttactaagccatgtcagagttttggatttctgattctcctcaagccaaggagggatgagcagattgctgaactcccgggtgtgagaaattgggaaggaaaaggactgagctcagggccaagagcatgggcaccaggaggcctccaagtgtaacccctgtctacgcacatcctcctcgtggggcacaaaggtaggcagtcaaaaatcaaagaaggaattttgctcaggagatgaaaaaaggaaagagctcaaatgggtggatctttggggaaagtttcctcaagataagggctgcggctctcttaccccaaatctcaatgctcctgtaaaggagactgagtggtgcagagtggtacaagcccttctgctaaggggagaatctggccttaccctagtgactccgaggagactggccctttcctctcccaacccgagtgtagccaggatcccacccacaactatccccctacctccaccctctggcttctttccccttccctttaggctcacctaaaacagcccctttctgccccagttcccacggatgccttggcactgtctggcacaatccttggcagggaagtggggaagggaacccccatcctggcaggactaagacaaaatctatccgtgcaacaggtgtggggaggcctacccagctcacggaaagttccccccttctcaagggttgggcaacaccgcctttgccgcagcgtccccgtactgagggggccgggcacctgttggggcaggagctgccgtcctgtcattagcctgggggcaccaagcccattcctccccgggaccactgcggggtttgctttcggagcctccgggacgcacgggcccagacccgccctgctgtcgcctgggacccctcccccgtctgccgctcgttcccgcgcctcttctgtctcccacggtctccccattttcctgtcctctccgtcctccctctgcctctctctctccggtttcctcgacacctgcgccctctccagtctccgcccgggtcgcgtctccctcgcggtctcagcgccccctccctcccccgccgcagccctttgtttcccggcggagtagttcctgggttgccgagcgtctctgtctccgcatctctcctcgccccgcctcctccctgcctggatccgccctgcccgcagcctctcctccccttcctccccgccgccacggccccgtaggtgctcggggacccaccttccacctagcacgggttcgttcccctctcccggcctggcccgggctccccggtggccgccgccccctcgccgcccccgccttctcccggggagggggtcaggtgggcgggcactattgttgtaggagccggcgccagattcctcagccgcgctcggggtgggaccggctgggtttgggggggtggggtggggggagcggtgatctgagctccgagcagctggtcttcgcggctcgctccctccttcgcgctctctcgctccctgccgccgcccgcagggctgcggggctcggtggcatctcccgggcgcggcccgcagtccttgcccctgcctccgggccgctcccgcccccggcgccgctcgctcccccgacccggactcccc

SEQ ID NO: 9420 - DNA, 2300 bp, Homo sapien
tacttgggaggttgaagcaggagaatcgcttgaaccagggaggtggagattgcagtgagccgagattgcaccactgcactccagcttggcgacagagcgagactccatctcaaaaataaataaataaataaaataaaataaaaatacaaacaaataagaaaacaaagattcatgtttgtgagagaactagtggggcaagacaaataacaagtatccttgaagcccaatgtcttacatgtgtcatgagatgtgcgcacaagtactagaggaactctgccactatgaactgggacaagctttatcaccctccaggagctcaatttaaagagagttgagatggcagcctgaaaatggggaaaggtaatggactctgaagttaaatgaacctgaattttggctccattcttttcttttcttttttctttctttcttttttttttttttccagtcagggttttgctctgtcacccaggctgtagtgcagtggcacgagcatggctcactgcgacctcgacctcctgggctcaagcagtcctcctgtcttggcctcccaaagtgctgagatacaagcatgagccacctcacctggcccattcttttaactatgtggcctttgaaggcataattactctttctgggccacaatctccttaccagtaaaatggagatagcactcatctcatactgctatgagaactaagtaaaacaaataaggtaggttaagtgtccagcccagagctgagcacttagaagattctcaataaaaagtggctgcagtttttgaagattctggcctaccatggttggtctgattcttagtttaatctgtgaatctgtgagtcgagcgccctctcgtgcttttgtggtgaattacacctaacagatctcagagctctcttctttcccttgcgttctctctggagtagaagctgggaggtgaaaggctgcaggttctaagagaagtgtgtgtctccgagggttactttgggccattgtacgtgatgctcagggctttaggattacttgggtctatcctgaggctctgcttgagagcttgggcatattcagagagaaaaggcagacctacagccatgtggaattgaagcaacaaacctgctgctggcaaaatgggaagggaggtccgagatacttctggttatctaaaccgtttccgcaactgcaatgttttgttttgttttgagggaaagagttatgaacccataagaccaaagagaaacacaaagtgaacttacgatttgaggttaaaacaacaacaacaacatcaacaacaacaacaacagcaacaacaaaactcagtggaagactgaagtaggggaatctgggggaagaaagaagcaaaaataccaagatagctcaacaattggtcacattccaaagggcaagaaattgaggaaaccagggttccatctggaatgttgagaaaacaggtgctagagcccaggagataccatccttccgggaggactttagagcccattgtgtgggctcatttggagctgtaacaataactgggggttgttatggcattcacccggctgcaggggccaaggttgctaaaacgtcctcctaagcctgggatagttccacacacaatggagaactgcatcaccctccttgtgaacctactccggtaacctgatctttagtttgtccaactgtaaaatggggctagccccattctcacagaattattataaaaaccgcttttccacgaatggtatttattgttactgcggttgttagctataattacgtactacagatatctcaggaagcccttaaattcctccactgtaagccacgggcaaggacagtcatagaccgtagtttctaggaagaccagccgattccaagaagggtgctcggcgggagaacctaatgccgaaagcctattggcgaaaaactcttccttcccggacgctaacgtctggcaaaccacattgcccggcagaccccgcagcctggggccggcgctcaagtcatgcattctgggattggtagtttccaggcctcagtgtcggcctgtgccgcccagctccaggaactcgccttcccagcttgcctcgcggccgggggggtggggggtgttcatctccgcgaccaggaaacgggaaagatggcgacggctccgcgacgttgaggccgcgttgggcggttcagactcagggtggtgagtcccgggcggtggaggcggttcccacgagcttacagaaagggctagagtcagggcacggcggtggcccctgcctcctggatgaggcgggaaagaacgcctcaga

SEQ ID NO: 9421 - DNA, 2300 bp, Homo sapien
ggagaatcgattgaacccggcgggcacagtttgcagtgagccgagattgtggcactgcattccagcctgggtgaaagagcaagactctgtataaaaaaaaaaaaaaagtaaagctcagatgaaacaaggcccaggagacactgggcttgacaagggaaagggactactctcaattttgcccaaagttggtcttccttcaatcacaaatctccaggagcccttatttgtacggtcttgattcctggacaatcagtggtttatttaagctgtggacagcccatagttctgtctagtagaggctccccaaaatacaggggccccatcagtcagggctgttaagaagttatgaagctcggctgggcgcggtggctcacgcctgtaatcccagcactttgggaggccgatgtgggtggatcacttaaggtcaggagtttgagaccagcctgaccaatatggtgaaaccctgtctctactgaaaatacaaaaattagccaggcatggtgacgtgcgcctgtagtctcagctactcgggaggctgagacaggagaattgcttgaacccgggaggcagaggttgcagtgaactgagatcaagccactgcactccagcccgggtaacagagcgagactccatctcaaaaaaaaaaaaaaaaaaaatttatgtagttcatctcaaccttagattgtcctccagcttctaatcccaaaatcctgggcccagtctggactttaaccaggtgacacacattagtgcgtcagtttcagtgggcgttaacatggaactggacctgtgcctgattcatccaggaagctgagcctaggccgcagaacaaacacccctaagcagcttctgctaggcatgggtgagaggctgtctggccaaacagtgactgtgtttgctttgtcttcttcctctctcccacccccacttgccagagtccctcatttctctctgcccatcactgggtcaggtgctgtgtgttttttttatggatgactctagaaagttttctctttctctttctctctctctgtctttggtggtgaaggtgattcttgaagaagagaaggctttaaaaggggcacaggccgggcacggtggctgacgcctataatcccagcactttgggaggccaaggcgggcggatcgcctgaggtcgggagttcgagaccagcctgaccaacatggagaaaccccgtctctactaaaaatacaacattagctgggcatggtggtgcatgcctgtaatcccagctactcgggaggctgaggcaggagaatcgcttgaatccgggagatggaggttgcagtgagctgagatcgtgccattgcactccagcctgggcaacaagagcgaaactccatctcaaaataaataaataaataaataaataaataaataaataaataaataaataaataaaagaggtacagcaggagctgatattgggaggggaaataaagggaagtaagaactggtttggatgggaattagaaaaaacaaaaaagtcagacatcaggccaggcgctgtggctcatgtctgtagtcccagcactttgggaggctgagacaggcggattgcttgagcccagaagttcaagaccagcctggataacatggtgagacccctgtctctatttaaaacaaaagatgtaaggaaaaaaaagaaaaaaaatgtcagagaagttctgggccacctcccccatcccctactcctccaaaacacacacacacacacacacctgtctatagtctaagcaggtcctgcttttgtaacccacccgggacagtccctgcaactccagcctgacctcacttcctgcttccatagctagtttgtttttctgacacttattggtagacactccagatcatttcattttgcttccagtaccctttccacttcctaatacaaatgcaaaacaacctgggaatcccctttcagggggaaacaacggtgcagctttaagagaaagagaagggaggaagggggcgctgactcagatcctcagatccattggctgctggagggaatcccacctcagggattgggcgtaacagagtccgcctcctcttgtgattggctcagccagaaaaataaaaggcggctgtgccggcctcctcctcagttggagggaggcagggaatctggcttgattggcgtgctgagacgcacctggcgcaaccctcccttctgaatcgaagttcaagtcccgcggacactgcaaccatgaaggagagacgggccccccagccagtcgtggccagatgtaagctcgttctggtcggggacgtgcag

SEQ ID NO: 9422 - DNA, 2300 bp, Homo sapien
ctgtaatcccagctacttgggaagctgaggcaggagaatcacttgaacctgggaggtgcaggttgcagtgagccgagactgtgccacctcactccagcctgggcaacagagaaagactcagtcaaaaaaggagagagagagggagagggagagagaaagagagaaagaaaggaagggaagggaagggagaagaaaagaaagtaatctactttctgtctttatagcttggccttttccggatatttcatataaatggaaccatacaatatgtaatcacttgtgtctggcttatttcactgagcataggggtttttttggccgaacatggtggctcacgcctgtaatcccagcactttgggaggccgaggttggtggatcatttgaggtcaggagtttgagaccaacctggccaagatgatgaaaccccgtctctactaaaaatacaaaaattaggcaggcatggtggtgacacctgtagtccagctactcgggaggctgaggcaggagaatttcttgaacccgggcggtggaggttgcagtgagccgagatcacgcactgcactccagcctgggtgacagagtgagactccagtcttaaaaaaaaaaaaagggtttgtttgttttgtttttgttgttgtttctttttgatacagggctgctctgtcacccaactggagtgcagtggcttgactatggcttgacctctggggctcaggtgatcttctcacctcagcctcctggggtagctgggacaacaggtacgcaccaccacgcccagctaacttcttttgtattttttgtggagaaggggtttcgccacattgctcaagctagtctcgatctcttgggctaaaacgatcctcccgcctcggcctcccaaagtgctgggattacaggtgtgaggcacagcgcccagcctgcatattctttttgaggttcatccacattgtagctggtatccatagtttgttctgaataatattccattgtatggacatagcatattttgtctactcattcacatgttaatggacatttaggttgtctccaatttttccaactgggctattatgagtgagacagataagaaaattcctgtgcaagtttttgtgtgtatacatgctttcatttctcttaggcagatccctaagagtgaaattattgggtcacatggtaaatttatgtttaacattttaaaaaattgccaaactgttttccaaagtggctacaccattttacatttctaccaccaatatatgagggttctcgtttctccacattctctccaacacttatctttttaaaaaaggtttttgttgttgttgttgtttgcagtttttacagttttatttaaacagaaaacatacacatgagctgtctactcattttctttgctgcgcagcctgggattggggttggtgactctgacggccagctgggcagctcttttccacgatggctttgcggttcttggaggaaacattgtgagcgatctcagcacagtaagatttgttgcacaacagcagcacttccagctccttgacgtgtggaccaggaatttccggaagccactgggcagcatgtgctttgttttcttgttgctcccataatcaatgttgggcatcaagatctaacccttgaaccttccacgaaccctgttgtcaatacctctgggtttccgccggttacgcttaattttgacatatcggtcagactggtgccggataaacttcttggttctctttttgacgatcttgggcttcccaagggttctgaggacggtttataaaagtgcactgaggggaggctgagacaggagaattgcttgaacccgggaggcggaggttgcagtgagccgagatcgtgcccatcctaggcgacagagagagactctatgtcaaaaataaataaataaataaataaataaataaataaataaataaataaaatgcactgaggagacagatttttgagagttaaaaggaccctctcaaaaaccgaccgcggtcctccactgggtagggggcgctccaagacagggactcttctagcctgttgcctctccatgttagcgatatcctcgttgctaggagactagacgcgtcttacagtgggagagctcagcctcactgatagccggggatctctcctgttcgagggctgagatctccggtcccacaaccgcccacaaccaggggcacttctggaagtcccctttctagggacatttttcttctaagctctgtaacgcgggccgaggcagaccgaggcttctttcccggatccaatcccctgccccc

SEQ ID NO: 9423 - DNA, 2300 bp, Homo sapien
cctctgcctcccgggttcaagcaattttcctgcctcagtgtccccagtagctgggattacaggtgcgtgccaccacacctggctatgttattgttttacttttttaaataacttttttttcttctttttaaatttaactcctcaaattccttttaccaactacccactttctttcttttttttttttttttattgatcattcttgggtgtttctcacagagggggatttggcagggtcacaggacaatagtggagggaaggtcagcagataaacaagtgaacaaaggtctctggttttcctaggcagaggaccctgcggccttccacagcgtttgtgtccctgggtacttgagattagggagtggtgatgactcttaatgagcatgctgccttcaagcatctgtttaacaaagcacatcttgcaccgcccttaatccacttaactctgagtggacacagcacatgtttcagagagcacagggttgggggtaaggtcacagatcaacaggatcccaaggcagaagaatttttcttagtacagaacaaaatgaaaagtctcccatgtctacttctttctacacagacacggcaaccatccgatttctcaatcttttccccacctttcccccctttctattccgcaaagccgccattgtcatcctggcccgttctcaatgagctgttgggcacacctcccagacggggtggtggccgggcagaggggctcctcacttcccagtaggggcggccgggcagaggggctcctcacttcccagtaggggcggccgggcagaggcacccctcacctcccggatggggcggctggccgggcggggggctgacccccccacctccctcccggacggggtggctgccgggcggagaggctcctcacttctcagacggggcagctgccgggcggagggtctcctcacttctcagacggggcggctgggcagagacgctcctcacctcccagacggggtggcggccgggcagaggcgctcctcacatcccagacagggcggcggggcagaggcactccccacatcccagacgatgggcggccgggcagagacgctcctcacttcctagatgtgatggcggccgggaagaggcgctcctcacttcccagatgggatggcggccaggcagagacgctcctcactttccagactgggcagccaggcagaggggctcctcacatcccagacgatgggcggccaggcagagacgctcctcacttcccagacggggtggcggccgggcagaggctgcaatctcggcacttcgggaggccaaggcaggcggctgggaggtggaggttgtagcgagccgagatcacgccactgcactccagcctgggcgccattgagcactgagtgaaccagactccgtctgcaatcccggcacctcgggaggccgaggctggcggatcactcgcggttaggagctggagaccagcccggccaacacagcgaaaccccgtctccaccaaaaaaatacgaaaaccagtcaggcgtggaggcgcgcgcctgcaatcgcaggcactcggcaggctgaggcaggagaatcaggcagggaggttgcagtgagccgagatggcagcagtatagtccagcttcggctcggcatgagagggagaccgtggaaagagagggagagggagaccatggggagagggagaccatggggagagggagagggagagggagagggaccaactacccactttcaactatcaaaatcctacccatttggcagggaacagggatgggagagagacttctcactgtaaccttttgtactttttttgtatcacatgaatgtattacccattcagaaatcaaaataaaataaccttactcattctttctagccctaaaaagagtaaagccttccctctctcttttctccatcagtacctaagagtttgtaccattcacatagattacatactgctttgaattgtcattattggtcaatatcctgtatccctcagagcagggacagtgtcttgtctcctacaggaagacaattattgaccaacatgagaaagagattcactatctgcaagatatcttcatggccatggagcagaactatatagattctgagtatgaaagcaagctggagttccagagcatgtggaatgatctcaaaaacatggtacggagggagagtagataggcaagaagtgggaggaggtgatagaaaaatgctcaaggaggctgggcacagtggctcacacctgtaatcccagcaccttggtaggccaaggcaggaggatcacttgagac

SEQ ID NO: 9424 - DNA, 2300 bp, Homo sapien
cacttgaggttgggaattcgagaccagcctgacagacatggagaaaccctgtctttactaaaaattcaaaatcagctgggcatggtggcgcatgcctgtagtcccagctactcgggagcagaggttgcggtgagccaagatcgcgccattgcactccagcctgggcaacaggagcaaaactcctccccctcaaaaaaaaaaaaaaaaaaagaaatctggtggctcacgcctgtaatcctagcactttgagagaccgaggcaggcggatcacctgacatcaggagtttgagaccagcctggccaacatggtgaaaccccttatctactaaaaatacaaaaattagccgggcgtggtggcgggtgtaatcccagctacttgggaggctgaggcaggagaatcgcttgaacctgggaggcggaggttgcagtgagtggagatggcaccactgcactccagcctgggccacagagcgagactccatctcaaaaaaaaaaaaaaaaaaaaaagtgaagtctttacataaatggattacgtgtgctgccctttgagaagtttgttgatgaaaggagaaaggaaatagtagcaccagaggaaaagatcagggatttaccctgttcttacaggataacagctccttgctcttttcagctagcttttcaaaggacagggataggacagccccctgccttatttcggatacttggatctataacctccagaaattcaagctgaagtagctggaggtcggagaggaatgagaactgcctgggtggggtctgccagccagacactgccaggatagccacaaggagacgacttggaagaacagacagcaaccacgttggactcaggcagtcctgggtttgaatcctgtctctgtcaccacctagcctgatgaccttgggcacatcctgagcaccctgtgccttatctgtaaaatggaaacaatcatgccgacctttcagggtggttttgaggattagagactagctcctgacacacagtaggtaatcgtaaatgggtgctattgtttggcccgacccacgttataggacagaacgtctaacggatgcgtcagaacctgcgccctccggatcttggagggtacagagggcgcccctcggcctcctccctttcggaggtggggacaaggtggaggaagggctgcaggaggaggagctctagcatcgcgacccgccccgtcccgtccagtctggcctgggcgccgcgggaacgctgtcctggctgccgccacccgaacagcctgtcctggtgccccggctccctgccccgcgcccagtcatgaccctgcgcccctcactcctcccgctccatctgctgctgctgctgctgctcagtgcggcggtgtgccgggctgaggctgggctcgaaaccgaaagtcccgtccggaccctccaagtggagaccctggtgaggagatagtcccgaccctcagcccccgtgggccgagccttgttgggtggtaatactggggtctcagcgaacctgggagccgggaggagaggaagtgcgggaactgagttgggggtggtgccgggtctaggggcgagaacgggatctttggaagagcatccgtgacccctgtagtccgatcgtaggtggagcccccagaaccatgtgccgagcccgctgcttttggagacacgcttcacatacactacacggtgaggggtctggggggccggggcggggcctgggagggggcggcgccctgctgaaacacgtcagctttggcttggacacgtggcaagcggttcgggagaagaaactcggggctctggggtcgtcgagcacgtggcgaggggagagacgttgctcttccgtgcctcttttccctccttgcttttctgccagttcctacctggcacggagaagtgcagggtggagagatctccgagaagcgccagccttctggggcttcctgttccttacagcggtaaggggaacgctaggctgccgcactaagggggctgccgccgcccagcggtccaggtgtgtgttgcgcgcctgctgggagggagagggtgctagatgtatgctcttgatgctctctccccccagggaagcttggtagatggacgtattattgacacctccctgaccagagaccctctggttatagaacttggccaaaagcaggtgattccaggtatgtgacctgtgcctcccattccacctcttcccaacctaagccctttcttagcctcttcggctccaaagctgccctggaaatcccccctgaaatgagtaagaccctagggctctacgagttacctcc

SEQ ID NO: 9425 - DNA, 2300 bp, Homo sapien
ttctgtttatgttctcttggccagaacttagtcaactggccatatccagctttaagggagacttggagttttgtggtttttttgtttaacttaaaaaatatcttgatacgtaattcgcaaacagtgaaatgcacagattgtaagtatacagtttgataagttctgacaaatgcatacacccatgtaacccacatccttctgaaaatatagagcatttcatcacccctagaaattccctcctgctgaggggactttttttttttaaacaatacaaatgagagataatgaaggcttcttatcctgaggtgggagggttgtagctatgggaatggaagggaagagctggagagactttggaaggagaatccagagtagacccgttggatgtgggagatgagagaagaacgaatgctggtagcagagccactaacagaaacaggagatagggaggaagtctaggttgttgcaggtggattggaagaatgagtacagttaagactgttggctgggcgcattggctcacgcctgtaatcccagcacttcgggatgctgaggctggcggatcacgaggtcagcagtttgagagcagtctggccaacatggcgaaaccccatctctactaaaaatacaaaaattagccaggcgtggtggtgggtgcctataatcccagctactcgggaggctgagagaaaagaatcgcttgaacccgggaggtggaggttgcagtgagccaagatcgtgccattgcactccagcctgggcgacaagagtgaaactccgtctcaacaaacaacaacaacaaaaacttttaaaaagtgggctgggcgtggtggctcatacctgtaatcccagcactttggaaggccgaggtgggtggatcacttgaggttgggaattcgagaccagcctgacagacatggagaaaccctgtctttactaaaaattcaaaatcagctgggcatggtggcgcatgcctgtagtcccagctactcgggagcagaggttgcggtgagccaagatcgcgccattgcactccagcctgggcaacaggagcaaaactcctccccctcaaaaaaaaaaaaaaaaaaagaaatctggtggctcacgcctgtaatcctagcactttgagagaccgaggcaggcggatcacctgacatcaggagtttgagaccagcctggccaacatggtgaaaccccttatctactaaaaatacaaaaattagccgggcgtggtggcgggtgtaatcccagctacttgggaggctgaggcaggagaatcgcttgaacctgggaggcggaggttgcagtgagtggagatggcaccactgcactccagcctgggccacagagcgagactccatctcaaaaaaaaaaaaaaaaaaaaaagtgaagtctttacataaatggattacgtgtgctgccctttgagaagtttgttgatgaaaggagaaaggaaatagtagcaccagaggaaaagatcagggatttaccctgttcttacaggataacagctccttgctcttttcagctagcttttcaaaggacagggataggacagccccctgccttatttcggatacttggatctataacctccagaaattcaagctgaagtagctggaggtcggagaggaatgagaactgcctgggtggggtctgccagccagacactgccaggatagccacaaggagacgacttggaagaacagacagcaaccacgttggactcaggcagtcctgggtttgaatcctgtctctgtcaccacctagcctgatgaccttgggcacatcctgagcaccctgtgccttatctgtaaaatggaaacaatcatgccgacctttcagggtggttttgaggattagagactagctcctgacacacagtaggtaatcgtaaatgggtgctattgtttggcccgacccacgttataggacagaacgtctaacggatgcgtcagaacctgcgccctccggatcttggagggtacagagggcgcccctcggcctcctccctttcggaggtggggacaaggtggaggaagggctgcaggaggaggagctctagcatcgcgacccgccccgtcccgtccagtctggcctgggcgccgcgggaacgctgtcctggctgccgccacccgaacagcctgtcctggtgccccggctccctgccccgcgcccagtcatgaccctgcgcccctcactcctcccgctccatctgctgctgctgctgctgctcagtgcggcggtgtgccgggctgaggctgggctcgaaaccgaaagtcccgtccggaccctccaag

SEQ ID NO: 9426 - DNA, 2300 bp, Homo sapien
ctgggaggtggaggctgcagtgagccaagatcacagcattacactccagcctgggcaagacagagtgagactttgtctcaaataaatagacaaataataaatacacaaaaattagccagatatgctcgcttgaactcaggaggcggaggttgcagtgagccgagatcataccactgcactccagcctaggcaacagagcgagactcggtcaaaagaaaaaaaaaaaggtgagctgggcgtggtgactgatgcctgtaatcccagcactttaagaagccgaagggggcagatcacttgactccaggagttcgagaccagtctgggcaatatggcgaaaccccatctctacaaaaaatttaaaaattagccgggtgtggtggcatgcctctgtggtcccagctacttgggaggctgaggcaggaaaatcacttgagcccaggaggcagaggttgcagtgagccaagattacacaactatactccagcctggatgacagagacccccatctcaaaaaaaaaaaaaaaaaaaaaaggtatctggcagctggtctgaagataggcatctcaattgttcacggccagttacagattgaactactctttcccccttctcactactgcacttgactagtcttttttttttcccccacaaagaatggggcttcagatagaactgaaaaataaaagtgtctggtggtaggcaatccagagctggcatggtggctctgcaattaacaaggacttatgcttctttttgcttcaccatcctagcgtgcagcttccatcctcatggtcatctcatggtctaatatggcttctagagcttaattcatctcatctgcattccagatagcagacagaaggaaggaaagatgattagggggagagagagcagcacagaaggacgctttctagttaactctttaaagggccttcttggaagtccaggacaatacttccaacacttctgtttatgttctcttggccagaacttagtcaactggccatatccagctttaagggagacttggagttttgtggtttttttgtttaacttaaaaaatatcttgatacgtaattcgcaaacagtgaaatgcacagattgtaagtatacagtttgataagttctgacaaatgcatacacccatgtaacccacatccttctgaaaatatagagcatttcatcacccctagaaattccctcctgctgaggggactttttttttttaaacaatacaaatgagagataatgaaggcttcttatcctgaggtgggagggttgtagctatgggaatggaagggaagagctggagagactttggaaggagaatccagagtagacccgttggatgtgggagatgagagaagaacgaatgctggtagcagagccactaacagaaacaggagatagggaggaagtctaggttgttgcaggtggattggaagaatgagtacagttaagactgttggctgggcgcattggctcacgcctgtaatcccagcacttcgggatgctgaggctggcggatcacgaggtcagcagtttgagagcagtctggccaacatggcgaaaccccatctctactaaaaatacaaaaattagccaggcgtggtggtgggtgcctataatcccagctactcgggaggctgagagaaaagaatcgcttgaacccgggaggtggaggttgcagtgagccaagatcgtgccattgcactccagcctgggcgacaagagtgaaactccgtctcaacaaacaacaacaacaaaaacttttaaaaagtgggctgggcgtggtggctcatacctgtaatcccagcactttggaaggccgaggtgggtggatcacttgaggttgggaattcgagaccagcctgacagacatggagaaaccctgtctttactaaaaattcaaaatcagctgggcatggtggcgcatgcctgtagtcccagctactcgggagcagaggttgcggtgagccaagatcgcgccattgcactccagcctgggcaacaggagcaaaactcctccccctcaaaaaaaaaaaaaaaaaaagaaatctggtggctcacgcctgtaatcctagcactttgagagaccgaggcaggcggatcacctgacatcaggagtttgagaccagcctggccaacatggtgaaaccccttatctactaaaaatacaaaaattagccgggcgtggtggcgggtgtaatcccagctacttgggaggctgaggcaggagaatcgcttgaacctgggaggcggaggttgcagtgagtggagatggcaccactgcactccag

SEQ ID NO: 9427 - DNA, 2300 bp, Homo sapien
acccaggaattcaagactgaagtgtgctatgatcgctcctgtgaatagccactgcactccagcctgggcaacatagtgagaccccgtatcttaaaaaaacacagagatgtggctcacgcctgtaatcccagcactttgggaggctgaggcaggcagatcacgaggtcaggagattgagatcatcctggctaacacagtgaaaccctgtctctactaaaaaaacaaaaaattggccgggcatggtggcacacacctgtagtcccagctactcgcgaggctgaggcaggagaatcgcttgaacctgggaggcggaggttgcagtgagctgagattgcaccactgcactccagcctgggtgacagagcgagactccatctcaaaaacaaacaaacaaacaaacaaacaaacacacacacaaaaacaaaaacaacccacagagattagcagggcagcagcccttaatagcagtgcccaggacagatataattccttgttataaacaggttccttgtcatccatctcatcccttaccatcttaaattaaggtccccttagcttgacattctagggtcatgttatcaggttaacataagagagagaacagactgggttaagggactgtaagtgcatacaccagggattgatgaggacaaggagatcgacatatatggcacctaccagctttttttttttttttctttgagacaaagtcttactctgtcgcccaggctggagtgcagtggtacgatcttggctcactgcaacttccgcctcccaggttcaagcgattctctggcctcagttcaagtagctgggattacaggtatgtgccaccatgcccggctaatttttgtattttctggtagagacagggtttcaccatattggccaggatggtctcaaactcctgaccttaagtgatctgcccacttcagcctgccaaagtgctgggattacaagtgtgaacacagggcctggccccagcttagttcttcttggaagcaaggaaacaaacaaacaaaatcaaccaaggcaataaattcataagagcaacaatttgggctcaagccttagggaagagccatgtgttcattcccttatactgctgtaaatgaggagagagggcacttagagaaccttctattggccgggcgcggtggctcacgcctgtaatcccagctactcaggaggctgaggcaggagaatcgcttgaacccgggaggcagaggttgcagtgagccaagatggtgccattgcactccagcctgggcgacagagtgagactcttgtctcaaaaaaaaaaaaaaaaaaaggaaccttctgttcttagcattactagtgcccttctatcacagctatttttgtttcaaggcagttctgcatgtctagaccaggtgcaaaacggagtgtgagggaagtaggagtgggtaggaagcaagaaatatgggtgcaaagtccttcacctttccttgggatactaaaatccctactcatctaggcacacttcctcaaaccacacttctgaatattaggtttccactctccgtctttcaagttccaacttaactggctcagagtccagctgttttcctttagcctcttaagttcatcactctccttcctcttccttatgggaaaggatctcttgattcagaccccacagtaatctagtctcaggaatagtgagcaacaacaatggtgcggtgagggctttcaggggatggcagctagcccagattaagaaataaagatgaagtctggctgggtaaggcatgccacagcaacgactgttcacccatatcccgatgctggctttgcccaaggagcccctgggccccgcagcccagcccgtctcctacgcagccaacttgccgcctcagtccttaaattccaggcacaaccctggagcttgggattgtcacctcagtcctcactgtctcatccccattcacggctcccgcctccgccgcccacagcccccacacctgcccccgccctgactccagctccagcgcccggccgccggtgctgcagccgctgccatggtgatgggtctcgcgagaactgccgctagctaccgcgcagctatcgcgcgatcggggaggtgggaagtatcccgggctgggggtgggggtacgccgcacagctccagtcgccgtcgcggcttccggtgctaggtggagggaaggaaggagggagccggggagtgggccagggcagcagccgggctgaagtcggcttggggagccagagggagcggagcggaacctgcggggcagaggcggcggccgcagcggcgc

SEQ ID NO: 9428 - DNA, 2300 bp, Homo sapien
agtccctccctgcagtgatgaaagccccccactttccccctcctgtcattggccctgacccacgtcaaggtctctctggttcccgtccctcccctttcttggagctggccgcgtgcttggggtattaggcaatgggtgtgcacccacagccctctccaggccccgcctgtcccaccgccctctagccgcctgcgggtcagtgctcaggccagccggtcgggctgagggcactgcgggccagctcaggccacccagtctgccggcctgtggcctcttgtcccagagttgggcttcagtagagagaaggagcaggactctgggtccttggatttggaacagtcctgcttggggagacctagggtcaccaggaagttgaaacctattgtagtagttctgcccctcgccccttcttggcacctggctgtatgctggagcctgacaagggtagaatcagaaggcaaaaaataatcccaaacctaagggggacccagagacacatggagaaatacaaatgtccatgaggtccccatggagaagagaggcttaggcaacctcattcccctcttccaaggacctggcaggaatcccagggtgactgcaagaaaaaggataaggacactggtggggatcatgaatccaggtgtaaggatgaaaactatgagatggggcttgcagattctggtgacctccaaaaccacacatggtttggctcttgtcctctaaatgggaaggagggtcaggaactctagtgctcccacttccccatcccagaggtagggaatcagagaaaagcagtctggtccaggctgtccagtgtcagggaccatggcactttcacctccccagactgctcacagcctggcacgtaaaggtgatctgtaaatatcccaacagatgtaagtttgctcgatctcctgtctcagactgctgtgcccgctatccaacagtgacccctgcagcacgggcaggacctccagcagcacagactggaggctggctgcccagcagagctgcaacgccaccaccaaggaagaggtgactgtggttgtgggtatcatccctgttcctctgcttgcttgggggcagtctgagtcaatgtgcctggggcgcgtggggccagccgtgccttgggctgcggtctggcaggggcggggggcggctggaaagcctggggcccctctctggcaaaaatagcccacagtggttagagcttcgagggtgagtcaggcgggagcacggtggcgcctaacccgttcgctgccactgggtctccctaaggcggtttgcctttgcctgtgcaccccaagaccaggctctttcccggctgcccttgggcttggctcaattttggatcccaaggccctcctcatcccataagaagcaagtctacagcttggagcaggaatccaggccacccaaagtgcagaccgggggaatcccgagaagggtaggatacctctgttggcaagcatccctgccaggcaaggaagcatcggggcaggctgacaatctttggtgctacttgaacctctgctagggccaaactctgaggccaaagctgtcccctccaaaggggcaggcgcagggcttggaggagggtgggaaccaagctgcccagacgtgtgcttctcctgcccgctctgagtaccccgggtgcgctcaggctgtgggtgccacatgtgactgtcccacaccgagaagcccaaagactgtctggctccatcctcatcttgtcaaaggcaccttccagccaccctgatcttggtggagaaactgacgcaaagaggagtgatgaaagatgtggccatctgggccccattctggctccctaggaaggttactacaccctccctgcagccttggcgaccccagatcaggtgagaggaactctggccacctccttcttcagtggggccaagcctgaacccaggcgtcgggggagagggtgtgtgagagagagagagtgtgtgtgtgtgtgtgtgtgtgtgtgtgtgtgtgtgcgcgcgcgcgcgcgcgcgcgcgcgctgggaggagggggaggctgcattcgcctggtcaaggctgggagtggagggtagggtggggaagccccaggctcggggaggggctgcagctccgtcagcccggcagagccaccctgagctcggtgagagcaaagccagagcccccagtcctttgctcgccggcttgctagctctctcgatcactccctcccttcctccctcccttcctcccggcggccgcggcggcgctggggaagcggtgaagaggagtggcccggccctggaagaatgcggctc

SEQ ID NO: 9429 - DNA, 2300 bp, Homo sapien
ggcagaaaggcccaaaaaattatttttacccatcaattttgagaagggttcccagcctgtaattgctgcacactggcaagcagctggtaaggtcgaaagagcatgggctttgagtcaaattggtctgggttttaatctggctctaccattgattcatttattagacgtggaccttggacaagtgcctgatctatttttaattctgcaaaatggggagagagaagagatcttccctccttccaggggccatgtgtgtggtggtggggcatgataaccaggctggcagtgccccctattccccatatagggaaaagcagccactttttttttttttttcagatgaagtcttgctctgtagcccagactggagtgcaatggcgtgatctcggctcactgcaatctccacctcccgggttcaagccattctcctgcctcagcctcctgagtagctgggactacaggtgtgcgccaccacactcagctaatttttgtatttttattagagatgggattccactatgttggccaggatggtctcgatctcctgacctcatgatccacctgcctcggcctcccaaagtgcggggattataggcatgagccaccgcgcccagcctgtcacttcttcaataggaggcctaaatggccttgaagctgagtaggagtccctgggagagaagagaaaagtgtacaatggatgagatggtcacaggcactctgggtatcccagtgtggtgggaactagagctttagggaaagacagaaacttggcagaaacatccaaagagaagcaaacacatggaggcacaagtttcctcatctaggttcaatgtagccagcaacccttgtcttcccagtcctctccatcaccatacatacagtggacatccgcaccatttcccatcctttctgagcctaggcctcagagacttagccactccaggctgggttcacctcaataccatcttggttgtaggctcggctctctcccccaatgacatgcactggttgacacataccacagtgtgacacgccataggatgccacgaggtacaaagggcaacagaatgacgcatacacacatatttaatcttcccatgcacatgctcatccacccactccacacacagtccagacactctgcatccctcaatcatgcttctgagtctcctgtcgacagttgccacctccttcctgacacactgccccaggcggtgactgtgacaaggtgactccatgaccttttctgacttgagctaaattccaaaattctttggaaagtttcctaacatccttcgtcagaacaaggagtttctgcacgtaccaacacacaggaggatgcaccctcagaacacagcacattctcactcccacccatattcacgttgttccacttcacacacacacacacacacacacacacacacagccacttgtgcgcttcttctggcgcacatgagcaaactgcctgttgctttaggtttctctccaccgctaggctccttttggttagctcacccccacaactcatccccgggatttccctgaccacagccgcactcacgcccccgtctcccctttttccttctctgtccagccatcgggggttcctgggcggttaagcatctccccggagtcgctgcccagaaccacagctttccttccgacactcaggatgggggagagaggggacgtcggaggggcccggggtgacgtcgaggggacaaccccaccgcgggcggcgaggcgggctgggcccctggcgggctctccccgcagcacactctcgccgcgccccctggcggatgctagtcctcgacgggctccggacgctcagctgagtgaggcgggcgcgcgtgggagggtgtcccaaggggaggggtccgcggccagtgcaggcccggaggcgggggccaccgggcagggggcgggggtgagccccgacggccaacccgtcagctctcggctcagacgggcgggaaccacagccccgctcgctgcccattgtctgcgcccctaaccggtgcgccctggtgccacagtgcggcccggaggggcagcctcctcccgtcacttcagccagcgccgcaactataagaggcggtgccgcccgccgtggccgcctcagcccaccagccgggaccgcgagccatgctgtccgccgcccgcccccagggttgttaaagccagactgcgaactctcgccactgccgccaccgccgcgtcccgtcccaccgtcgcgggcaacaaccaaagtcgccgcaactgcagcacagagcgggcaaagccaggcaggccat

SEQ ID NO: 9430 - DNA, 2300 bp, Homo sapien
cctccttctgctttgttggttgttgctggacctatgcctcttctcccaagaacccctctgtcatctgatcactctgtcaccaggtccaaagcctctccttcactttttccctcctcctcagaggccctaccctaccctgccctcctatggctgccaccatccctgccctcctgcctgatcctggttaggcctctctgctcagctccacacccagtgcatcagcccctgcgaagagctcacccttgtgccctgaacataacagacattaattaaatctgctcattctcacctctcctgaaacaaaatcattaatgggcatatgcttcccttcctttcatttatatttcaaggatgagaacaggtatgggtaaagatacaaggaaaagagaagcaaaggaagtctgtggggaagaatggggaccagtggacccaaggatggatgcgttggggacacaaatacaagaaggggcctctcactgcctcttcctatttccctgttgggtccctctgatgtccctcaccccgaagaggacctcctcggtttggcttatgacatctaggatctccccgacactgtcgctcagttccgctgtcttcccatcttcctctggcgaactgtttccaacctcgggcagggtcctctcattccgccaggaggcgcccggggcttctgtgtcgcttccatcagaggagccgctatggacgctgagctcctcagcttcgtccgtgtccgagtcaggggctgtgtggcggcggatacgggacacggcttctcgcagggccccggcgtagggccctggggtccgcgcccagccccggccggcgcgccgctggaccaccgccacttccgacccctcggctctgccctgggctcccgaagctgctgggcctaaggcttggtgctctgggctacctggctgcgtgggggcgtcccgcaggtttacttcgggggccgggagccccaagatgcggaaagtgcgctcctccagtgtggagtcccccggcctcccgccctcagcttcgcccccgcggcccccgccgggctggtgtaaaaggcgactgctcgacagccgcttttgacaaggggaaggaaagaccgtggccccttcaccctcctccttgccgggcttcgattggctgggggaatcccccaccacgcgtgtcaccccagagggcaaaagctgcacctgctgggttcggggggttggaacatattgggatcgtatcactacgcacgtggcgtcaatgacaaagacgccttccccacgggacaggccctgggaactgcggggcaaggtgtgggcacggcgggtcgccttccaaccctccagggtctccggtcctgccccctctccaagacccagagattctctccatccggtgcctccgggagcccagggtctggggagtgtctggctatggcggggcggctgctttttaggggagggaatccagcatttgggaaaccagatctgttctccttctttcccttccctcgagcccttgaggtggtgcctggatctgggagcgggatgcggggcacagggagccgcagttgcagaccccgcaggagctatctcggtgcctgcgctccctgtagctttggcttggggatggctgtcgctaccactgttcaggtcagcagcagccagccccaggcttttctccacgacccccttgccgggctctggccttgctctggccgctccacagcctggggatccccccaagagaccttgcccctgtcggagaccccaagccccgaggacgtcccggtagatccgaggatccagcctcttctttgtgcgccctccgtctgtcctggctggagtcgcagctggggctgatgaagtgggcacctgagagttcccggggcctctcttagtccccaaggtcctatgggggccttcgtaagaaggtggagccacgtagggtggcggccggtcccagcggcgtcgtggggcggtcccggcagaacctctcagcagcaggtgagcctcgtagcttgggggcccgggccgccgacctccccagggccccgcccacgccgaccctgggtcgctctgcggctgcgcggatggacggggcgctcgccccacaggcgccaggcgctccggccgcaagggagcagggagccctgccagctgggccacccgaggggcgttgcggggctccgggcggggtcgacccggggggctccgtcgggccccaccagccttgcgcctttttcgctcggtctccttggcctcccgctcctgcgacgccgctttccttttctcttgctcccgagctcggacctc

SEQ ID NO: 9431 - DNA, 2300 bp, Homo sapien
ttcccatccaagccaggagcaatttcggagtcattccttgcccctgccccacagtgcctaacccctctgataaccctccagccagggcatactgggttctcctgatggaacacagggaaaagcatcaaggccctcatcagattcgacctgaggaagcttattttaaaaaaagaaggtggccctcatcagagctcagctttcagtgttgcatcatggctgtggaggagcccctgcttctgccttcacccctttacagctctcacagcacattctcaaccttgggggaggaaggcttccaagttattagaattagagtatgtttatgtgtcaggagggtaagcacatggtggaaaggacagatggccccttatgtcacattccctcattaaggaagatttgcctagggaggaggcaagggctttaaaaagcctcaggactctagtgggacctagggtggaaggaagcatcttcgagtcaagtcatcagtgcagctggcaggtgtgtggaatcaaggggggtagggtggatgggacgggatgtttgcgttctctctaaaggtttgtgttagggagcagagacctggttttgttgagttgtttctcagtctgtcagtctctgccccacaacctttctggttgttccccatccccttaaaaggaagggtctggacccaaagggctccatgtacattagtggaaaactaattgggaactcttgcttctcccatttccctctaaaacccaacctatccgtctcagtgtgaggatgaagctgagggagagacaagggatgaaatttgggagactcacaagcttctattcttacctattcctctccagagaggcaaattatcccttcttcccgaggaaccatgccccacacactctcccctctctctgcactgctcccctccactgaagctgctgccatggttgccaggcatggttgctaagtctctgcatggaagggttggcgtgggctgtgctgccactaacattaccatggtgaatcaggggacacctggtataagcttaggaggagggatcatgtggatataagcaacagccccccaggacagaggcagcccaaaaggtgagcatctggagcaccacttaaggtggggactgagtgaactaggcattgtggtggtggtgagggggagttctacattgaaaaaaataaaggccacttttatcatttcagttgctaggggattagttttgccaagcaaacacatcatttctcctccatccccctctggaagggtgagagtgcataagcacttactctgtcctccataaagctgggcaggctgtgtgggcacagaacaatataacccccaaatcctggcttctggattggaggtgaaagcctgctgctgtgggagggctccctggctgcccaaggacaaacatgtagaatggaactggtagggcagcttgggtggccaaggcagacgcctgtgtcctgctgtaccagcagtcctaggctgcagcactgagctgacaaggagatacgggtgtaggggtcaccctttttgagcttagggaaggcagctctccctcagagtcgcacaaaagcttggtaaaagccaccgcctcctctctccaccgcatgggagctggttactcatctcatctctgcacccgaacagccactgccgctaaaaatagccccccagccgtgggccagcccctcctgcaccccagccccatggaaaccagcagagtggcaggcagagaccttgagttccaatctcatcactctatgttggggaaactgaaatctgaggcaggaagccaggggcagaaccctggtggtcaggcaacctgacaagcaggagagtaaagggttaaaacggcaggaaggttgaagaaataggggcgggggagggggcactgtcagcttggcaagaatcataagtccctcccccgcccactcgtgcgatcccatcaggcttgggggacaacagcagtgggaaggggcgtccaatcccgggccccagggggcggccgtgcacatgggggaggtagcagcgcggagcagtccgcgcggtgtcacatgcgcgcgcacacacagagacaggcacacacacgtgtgcccgggtatatatagttcccagtccccgggcccgcggctctgcagtgggcgccggctccctgggctgggagggggctcctggggcgggtgggagggtggggggccggggtggggtggggcaggatgctggatggcccactgttctccgaggggcctgacagcccccgggagctccaggatgaggagtctggcagctgcct

SEQ ID NO: 9432 - DNA, 2300 bp, Homo sapien
atgatgatgaagattggggatgactggcccctagttgctctaggacttccttctccatctggacatgggggcaggagggagctaaacctaggaccaggatatctccctcctgttttcccaacctcatcatgagcctgtttgccctccagcccctggacgggttgggtggggggtagggtgagggctatccctgagtggcatgcccatacctagtgaggcagggtgtggcccggagctcccactttccctcagtcaccaaactgctgctggtctggtgggaaggggtggtgatgtgggggtgggggagcttagtgtcagcgcggggagggtggggggtatttatctatttatacatgggattgtacatagtcttgtggggcatgggggagccggctggaggtgagaaccctcccctctccccccaccccccggggagagcaaatgtaaaactactaatttttgtgctttatatattctatataaatatatctattttctttttacaaaaccagtttataaatggtaggggggtgtggggcggacacatggagctccccttgtgggggggccccctccattacccgacctaccgcccttttcctcaccccccaccccactccccaccccctggctgtgactgctgtaagatgggggtatagaggctgggcaattcccaccccctgttgtatagttggactatgttataacgcacaaaagagagctgaccccagggggagccagagggtgatgggttccttgcctccctttccttcccctttctgcccaagcttgtgctgcagttgaacctcttcctgggggtgggagtaggtaaggggtgggtgaggccccaaacccctctctggtagggaaccgtggggatgaagatgaagcttatatgcagttctcttctaggggctgtgggcaaagggcattttgtaattaatattttcaagaatcagatgtctggagtgtaggggtgggcttggtggtggtggacgggcgggcctgctggagggggagcttggtcgctgttgtgattttaggtttgtttttgttttgttttgaatttggggggttgtggattgttgggggtagggagattttttttttttaaagctgcttcctcaactgtttcaagctgcaaatgtttaagagaataacagcccccactcccacaggaaccgctgtaattaaatcagacagtaggaagactgggctgctgccctcaaagccacagcccttggatgttccttttccgagagcagaaggtctaggctacagggagggggagattggctcccgtgagtcaggctgtgtttggggcttgggccctgggattgggaaaaggggatggggcagactttgtaagcatatgctaggtatccgatagtcctgtagaatttagtgaagaaaccttatacagtttttaatttttatataaactataactcagacccaagctacaaggttggaattttggttggttttttttttaagtaccctgcctgtataattgcatcagaatcccccaccccaccccccgcccccgtgtttgtattttgggttggtttacactcgcacatactcagttttcagttttcccctttacagtcttctcccctcacctccaggaccctccccctttttaaaaaataaatcgctgacaagtgtgaatcccgtgaagactttattttgtgttgtgtgtatcctgtacagcaaggttggtccttcgtaacaacggatgaaatggttcccttttttaaagcgccctctctccctccaccctcagcgcccctgtccttggcatgttttgtatcagcgatcattctgaactgtacatatttatgttgcgagaggcaaagggcaagttttggattttgcttcttccaagtttgtttttaaacgacaaataaaaaaagaacattttaaatacaagcggctccgtcccatgaccctcgccgtcagccggatccgtgcggtccgcgaggacccgggggagggcggttaccgaggcccgccaccgccggaagggtgggttccttgccttccgccccagtctggcgactgccatgacgtgggcggaagtggcgtcgccgcaccggatgtggggcggggcctgccccaagagagtttcctaaagcgaggaaaccaagccgggcgcctcttgcaatggagacggtgaggagtgcaggagggcggtcgggggcgctgtggagcctaagacacccccccaacccttaggagaccgggagggccgggcaggggctggcgctggtgtctagcaaacaaaaagcagccgg

SEQ ID NO: 9433 - DNA, 2300 bp, Homo sapien
gtagtcccatggtaaagacagacaagtcaacaactaaggagcacctgtgtgtgtaatgacacaggtactacatgacagcattgccccagtcatgtttggtgggactctgtcagctgttttgaaaatattaacgggcttttgtggtcaaagaaagttggaaaacacagttaaaatgacaatatgggtttctttactacaagagtcctcaggtccttttaatttgctaacgtgtatcatgagcctccaagtcatggatagagcatgcatcatttcctaaacgtagttgatgtagttcccttttcgtggagctcccgtcagtgcccacagcagtttgggaaaggctgctgtgagggaagtgtatgaaaagagctgggtgacataggatagaactaccctggggagtgggttctaggtgtccttgtccccacccagctggtagtagagctcacctcagacacttggctgatatgtttcttccatcccttccctggccctggcagaacctgaatggcgtgatggtggcagtggcggagctgctgagcatgaagatccccaactcctatgaggtgctgttcccagagagccccgcccgggcaggcactgagccaaagaagggggaagctgagggtcctggtgagtgtggcagggaagccctttgggacttgaggggagtgattctggtgggaggctctgatccactcctttctgcaggtgggaaggaaaagggtctggaaggcaagagcccagacactggccctgattggctgaagcagtttgatgcagtgttgcctggctataccctgaagagccaactagacatcttgagcctcctgaaacaggtaggtctgggggagaaaaaggggtgggtgttagaaaaaaggggctgccggccaggcgcggtggctcacatctgtaatcccagtgctttgggaggcaaggcgagtgaatcactttaggccaggagtttgagaccagcctggccaacatggcgaaaccccgtctctactaaaaacaaaaacaaaacagtagccaggcgtgatggtgcgtgcctgtaatcccagctactcgaaaggctgaggcatgagaatcccttgaacccaggaggcagaggttgcagtgagccaagattgtgccactggatccagcctgggcaacagagcaagactgtgtctcaaaaaaaaaagaaaagaaaagaaaaaagaggctgtctagggcaaagaatgtggaggccttttgggagggtggcatatgggtgaggggaaggagggagctagttagatgaggagctggcactaatgatacagggcaccctcctacaggagagccccgccccagagccacccactcagcacagctatacctacaatgtctccaatctggatgtgcgacagctctcggccccacctcctgaagaaccctccccgcccccttcccccttggcaccttctcctgccagtccccctactgagcccttggttgaacttcccaccgaacccttggctgagccacccgtcccctcacctctgccactggcctcatcccctgaatcagcccgacccaagccccgtgcccggccccctgaagaaggtgaagattcccgtcctcctcgcctcaagaaatggaaaggagtgcgctggaagcggcttcggctgctgctgaccatccagaagggcagtgggcggcaggaggatgagcgggaagtggcagagtttatggagcagcttggcacagccttgcgacctgacaaggtaccgcgagacatgcgtcgctgctgtttctgtcatgaggagggtgacggggccactgatgggcctgcccgtctgctgaacctggacctggacctgtgggtgcacctcaactgtgccctttggtccacggaggtgtatgagacccagggcggggcactgatgaatgtggaggttgccctgcaccgaggactgctaaccaagtgctccctgtgccagcgaactggtgccaccagcagctgcaatcgcatgcgttgccccaatgtctaccattttgcttgtgccatccgtgccaagtgcatgttcttcaaggacaagaccatgctgtgtccaatgcataagatcaaggggccctgtgagcaagagctgagctcttttgctgtcttccggcgggtctacattgagcgggacgaggtgaagcaaatcgctagcatcattcagcggggagaacggctgcacatgttccgtgtggggggccttgtgttccacgccatcggacagctgctgcctcaccagatggctgactttcatagtgccactgccctctatcccgtg

SEQ ID NO: 9434 - DNA, 2300 bp, Homo sapien
gggggagggctgaggaatttgcccctctggccttgtgtgaggcagccctcctcctacccactgtattatcattgttgccttttacttcttgatgtttgtgactcttttggcctcaactttgagaccagagcgggtagaggatctttaggggtatgtagtggtaagatatagtaagatgcaaagaattagaaaactttaagggccccttggaccttccgggtgtggccaggccttgaatgactgaatggaagaggggcctggctgctgccctcatctccacctcccacttcccatggtagcttctaaggactccttgaagttctggagcagcttttgtacgagccggccagatgacccaccctgctttcctttcgaatgtggttgtgtggcaggtttgggaaagatggcttgggaatggagatgatgtgtatcaggtgatgctttactttatccagtgagttctgagagtgttaggggaaaaaggaagtttctttcctgtgacatgtctccagaggggcatagccactatctggaaataaagggtgagttcagggcaggaagagtgatattgtagttcttagggaattgatttactgatttggggcacctttgagggttccccctgtctcatctgtcccagtcattcaaccgtaagtggctgactggggtatttgccttccagtttgggaggacgggctgtccttgctaagggtggtgtggtcactctggttagtcaagaagagtggaaaaggcgagagatgaatttctcaaacttttattgtttgagttctgttttagggatttcccccacctcaccaccactttctctaggaacactgtataccttctctgattaagagaaagggtctacatttcccactacaagctgctaacacttaccactttctccctccttctatagaatccctttcctattcttcgtgtctgtaattattgttcttttttttttcccactgtgcttaattccctctgagatctaggaaaataatgcccaaaggtgtaagtctcaacttttttaggtataactttagtgtgtttcatttggctctgatacaggcacgcatttcttagaagaagggacaagggaccgttattccccacccccatgtatgtgtgtggaaaccctgcttgagggaagaggaaggaagctactccgctgtgctgtgctatgtcctgccctgtttagaactcctctgagtggctctatgcttcctgagactacaactcccagcatgcttagcctcaggcctggctacacatgctcagtaactctcaaggtccacttctgttaactactagggatatctgaagaggaagggcagttggtgttgctaagggcaatgacctgagaccttcaggctgggtgagaccctgagctcagttagggcatgggccgggggttggtctgagctggatttgggttggaagtgggtggaaattagggagtttcttcttttgtaatggtgatgtcctcgtagaaacaagtggcggtgggggagatccatccatagctaggctgtagttccagtagtgtgttacatctcttgcagtgcctcagactctgcctctgggagagggatttttgctggactcaggcttcctgggtcatgactacccctgggttggcacagactggcctctagaatgggagcttacttgagacttgagggaaaggtgtgggaatagggctcaccaaaagccaaaaacccagaggcaagccaaagagcagtattagatacaaatggatatgcttctagttggatgctatggccccaggaactcttacagaggagcctggaagtgggaaagtcaaatggatcccctgagaatctctccagagtgtgagaagagcgtatgtgtttatctggggaggaagtgaccctacaggttagggagaatgactttcttgtcagtataggagtttgtagtatggctttgctctgatgtctggagggtctggatgccttcttcccaggattctgggaaaaatgcttcttgggaagacttagtaggcatatagatctctttcttggcaccaacaggtctccccgagagggccctgcccagtcggagagagggatggacagccagaagctggctggtgaggataaagattcagaaccggcaggtgagtaggacaaattgtttgtttgcttttagatttcattggcaaccttacatttctggtcctggcacaaggacatgagctaagtctatgtagcagataagtaatggaacaactttgttctttgggacaacagttgaaatatcatcactct

SEQ ID NO: 9435 - DNA, 2300 bp, Homo sapien
tttttaagatggagtctcactctgtctcccaggctggagtgcagagtacaatggtgcaatcccggctcactgcaacctctgcctcccgtgttcaaacgattctcctgcctcagcctcctgagtagctggaattacaggcatgcaccatcacgcacggctaatttttgtatttttagtagagacggggtttcactatgttggacaggctggtctcgaactcccgacctcaagcgatccgtccacctcagcctcccaaagtgctgggattacaggcatgagccaccatgcccggcctagggcttttgtgaatattaaatgagataacaataaaatgcacctggcacatagtatagtcgaactctctataaatctaggtgatttccttcctttcttccctcctctaccaatccttccacaagtcattttaaccttagcttcagaatatcctgaattctcaacttcattcaacatgatcactctagtcaagcgctctcatctctcacctggactacaggtaacagtttcctcgccaatctccctgcttccttttgctcctgttaccctcaaaccccaatctattcactacagccagggagattttttagaaagacaatttagatcatgtcatgccccagcttaaataccttcaagtacttagaattagcccagactcctttatgtggcctggcctctgccattctcttagacttcatctgctttaggctaactggctttctttttttcttcccctcttcctggaatttacccaatttatttccatcttaacgccttagcattggtggattcttcttgtgaaatctcctagttggttccttcagatcttagtttaaatggggtttcctatgagagaaagtatcactaaagtggtcatctcagccaggctcggtggctcacgtctgtaatcccagcactttgggaggccgggtcaggtggatcacttgaggctaggcgttcgagaccagcctgggcaacatagcaaaaccccatctctccccaaaatacaaaaattagccagtctcataaccctgtctcaaaataaataaagaaaaaaaattaaaaatgctgtattgtctttaaaaaataaagtggtcggccgggcgcggtggctcacgcctgtaatcccatcactttgggaggccgaggcgggcggatcacgaggtcaggagatggaggccatgctggctaacacggtgaaaccccgtctctactaaaaatacaaaaaattagccgggcgcggtggcgggcgcctgtagtcccagctactctggaggctgaggcaggaaaatggcgtgaacccgggaggcggagcttgcagtgagccgagatagagccactgccctccggcctggtagaaagagcgagattccgtctcaaaaaaaataaaaataaaaataaaaaaataaaaaaaataaagtggtcatctttcatcacaccatcttctacagcacttaacactctctgatatttccttgttgtatgtttgtttctcccttcataagagcagacacattgtctgtgatgtccatgttctgaccccaaagctggagcaatgcctgaaacatgtagtatatactcagtatttgttgaaaaatgaatatttgaggatcatgatgatgaagaagaaacctcagactacttgatcataaattctagcaatttctgcaagaataagaattgcagtttgaaattagatgctggaagactggaaaccttgataggtctggggctgaaggctgggggaagcagaaggaatatactagaactttggcggttttctccctatctaaggaccccagagaccatgcaaaagggagggctagaatcttatgaccggaaaccacaaaacgggtattttccatccataattcttcgaagccacttcagctaggctgtaaatgcgcaaacgcctttaggaccccgggttcctttctgtttctttatgaatgaaccggctccagtctgcgcacgcgcagctcccagttctcccgctccacgtgaggcccacccttccctcctgctggcggcaccgcccttacccattctaatggaccaatggcgagcggcctggggggcggagcccggcgcggcgcggctcagtagttccccgggcgcccggctccctggcgttagacgtgctgtgttgtgatcacgtgggcagctccgggcgcggcgcttgttttggtttccttctaacttgcccacggcagcttcggggtgagcgactttcctgcaccagctgccgcgcctgctcacaccctgacctcgttttcgggctctct

SEQ ID NO: 9436 - DNA, 2300 bp, Homo sapien
cctccttatattcatggccttgtttctgtaccttgagtattgggggtaggacatgggcataggagtaggctaacctccccgatacactcataccttcagccctatcctccctggcttaactattggatatagagtaaaataagtggctggctgacaaggattttcatttcctacctgagagaagaatctagctttttactagaggccatcagtttcttgaaaagcccatgtgctatgttgggagtaagagcgcaaaacttaggcttatacagattgtgtattgcacagcttccagggacaccattcacctcatagtcattgtgtggatagttactatgatagttttctaataaatgtcagtcatcttgaggaaggggtgctttttttttcttttttcttcttcttttttttttttttttttttgtgagacaaggtctggctctatcaccctggctggagtgcagtggtgcaatctcagctcactgcaacctccgcattctgggctcaagccattcttccagctcaggctccagaatagctaggacaacagacacatgctaccatgcctggctaatttttgtatttttagtagagatggggttttgccatgttgcctgggctggtcttgaactcctgagctcaagtgatccacctaccttggactccccaaatgatggaattacaggggttagccacaacacccagccatcttttttttgggggggggggtcctcactctgtcacccaggttagagtgcagtggcatgatcttagctcactctacagccttgaactcttgcacccaagtgatcctccttcctcagcctcctgagtacctaagactacaggcatgtaccactacctcccactaattaattttttttttttgaaacggggtgtcactatgttgaccaagttggtcttcaactcatggcctcaagcagtccttgcctcgcccccaaagtgttgggattacaggagtgagccactgtgcctggcctggttttttctgatgtacacaaagttgctatgagtactagccatagagtgtggtgaggggagggtgaatatgaaacacaaagtgtagattccacaaatgcttgcaaagcacccttctgtagagtaggcacttaaccttggagatacatgataaatatgtgtgtgcttaagattgctttgtctagtaaggtgccagataattctaatactgttctaacactgcagttaagtaatggttctcgagggaacacaggtgggcagtgttgggacatcaaggaaggcttcttagaagaaatgacttctaaacaaaagaaattggacgtggtgcctctgagatgagatctgagtggctgaaaatggagccccgggagtccagagagggagaaagctggagaggtgcctagatggacggttaagggaagtgatcctcacctcttacaaagacttttgagtgtccactgcccttcagcagcttccaactgagaagtcattcatttgaaaaacagcagctattagatgcctggcaaagaagagaaggggaaaaaagttggaagtcctaaatgagacaataagtaccaagctctgttcctggttctggggaagttccaaaggagactgcaaagttagtagagaaatgggcccctggtatcctcacctcccagtcctgcttaatgctgaatgtgaggagagatggaagtcggggagatctggggaggactacagagaagggaggctctggttgtatgcccaaagggcttggctggtcttgggcagaaattggaacccatacttcctggatgacagcggagggcatggcctgccagggtaggctttgagagagtaaaaattccaattcaagtatcagaggagggtggtttggttccaagtttaagcttggaggtagaaggatgtttaggcagccaaggactgtaaagctacaagtatttcctaggcaggtgtctgcctggtttccaggatgggacacacttcagtcgcaaaatggaccagcagtgaccggctagatcccccgcccgggtgggagggggtgggacggtcttgggagaagggcggagggcggggccaggggccacttaaggcggagtccggagtccgggcgttctggcagcaccagagtcctgcagcagagacgggctgggctggcactcacccacgaccccccttccctgctatgatggtttgtcagtagcaggtcctagacaccccccgcccgctcccggggcacgtgggcagagctagcagcagccaggtgcacggagccacaagagctctagggcactctg

SEQ ID NO: 9437 - DNA, 2300 bp, Homo sapien
acattgtgtaattgggggtgggggcacacttgccccagttcctagctccagcctttcctcctcttaggatggctcaggatgagtcccccctcaacaaggcagctacccaagagtaattcccctggggactttctgtgtgaatctccccttccccctcctctcttttccctttcctggacccagccactgatgtaaccaacctcacagactagttgtttattatattaatagtttgagcatataaagaggaacttgtgatgggagagatctagggaggagtaaagaagtataggaatgtctggcctgtattctcttcacctgggaccactgatttttaagctgccaccttggctggagaacaggctatggagttcataatgtgtggtctcctggagcctcctgttcagctctgccttctttgagggggcagggatggggcagggagcacattgtaatactaacggcctcagagctgccccctgatgtcctcctgcctgttccccgtgcctctgtctcttacagtggatgatgaagatgccaccgtcaacaagattgcgtaagtgtccctgcctcagcacctaacatcagtggtctttaggaactgggatctagggaggcctggagctggagggagaagggggaagtctcacacagtgaagagagagtttctgtttccaccccatttctggcttccggctttacctcaccctggggatgctcagaaaagctgctgttcctgtcttcctggttaggccaggagcttgtgggagcctcatggccaggaacgtccgctggggcctgagtcaccggaaatggctccagcttggcttcacctcccagcgaccaatagggagggagtggagtggggatgcacattgatggaaaaagagcagggtgtggggaaggtgggaacccctgagggaggggcatgcttggttctgggagaaaggcccatattccaggctgccagtgttcactggtacatacagaaaaagatagagatatgactcctttgagtcaatagatcagaaggcagccctccacccttgatggaccaaagagctagaagtgcccatcttcaatatatgcagcccggggcatagaccttggctatgaagctaggtttcagttccctcttgtcctcctttgccctcatgcctttgtgcagggcatagccatatgggatgaccctgtgcttatctgggctaaaagaggtaagctcagaaatccatatccctgaccaaagaagagaagccaggtcccctagttttggcatcatacctggcataactgataggcatgtatgggaggaccacattcctggggacagcctgggtatgtgacatggcaggtgaccaggttcccatgaatgcccgaggctgtgcccatcccatgagctggggcttccctggaggtaaagagctagggtggggtggcagtgggtagaaccccagctggacagctccttccttagctctgtgattgctacagctggttctggaagccacaggcgccctcaggacaaatggggcttcttcagcacagggtagtgagtgctgagctaagcaaggacactgtccccttctctgcccaggctcgagctgtgcacctttaccctggcaattgccctgggtgctgtcctgctcctgcccttctccatcatcagcaatgaggtgctgctctccctgcctcggaactactacatccagtggctcaacggctccctcatccatggtgtgtggctcctggaagctgcttggggtagggatagggagcagagagcagatagagttgggtggactcaggcagccgtgcgccaagcagtcatatgtcgcaccttcccactctgcttctcctgcaaatggtcagtctcctgtgggttgcccctccccttactgaccacttctgctcttccttttttgctctaggcctctggaaccttgtttttctcttctccaacctgtccctcatcttcctcatgccctttgcatatttcttcactgagtctgagggctttgctggctccagaaaggtaagtaggggatatgtatccaggcaggaaacggaattccacacacatggttcagctgaagagattttaataaagaggctatttgcagaggtttagttaacggaagtttgaggctctagtgacagtaggaagtcattaccacccttaggcctgtagggacaaagggaggaaatggtttctagaacccactaatagctgaagccagggatgtgaagctgcccagagaggagctgttgtcttagtgtcataatcactgccaaaaccatgg

SEQ ID NO: 9438 - DNA, 2300 bp, Homo sapien
agggatactttcagttaatctaatatctatagaaacaatgctaatgactggcttgctgttgggtaaatctctgttcctggctctcagctctgaaggctgtgagacccctgatttcccacttcacatctctatatttctgtgtgtctttaattcctctagtgccgctgggttagggtctccccgaccgagctgctctcagcacctgacttcaggtaatccacccgtctcggcctcccaaagtgctaggattacaggcatgagtcaccgcgcccggtcttatggccaatttctttttcttttcttttttttttttttttgagatggagtctcgctctgtcacccaggctggagtgcagtggcgcgatctcggctcactgcaagctccgcctcccgggttcacgccattctcctccctcagcctcccgagtagctgggactacaggcacctgccaccacgcccggctaattttttatgttttaagtagagatggggtttcaccgtgttaggcaggatggtctcgatctcctgacctcttgatccgcccgcttcagcctcccaaagtactgggattgcaggcgtgagccaccgcgcgcggctaatggccaatttttaactgctcactgaactatgcagctggatgttgctttaagaatttagaggaggtcgggtctgttggctcacgcctgtaatccctgcactttgggaggtcaaggcaggccgacagcttgggcccaggagttcaagaccagactgagcaacatggcagaatcagctaagtgtgctggtgcctgcctgtgatcccagctgctcaagagactgagatgggaagatcacttgagccttggagttggaggctacagtgagtcgtgatcgcaccactgcacaccagcctgggcgacagagtgagactgtctcaaaaataaataacttaaaagaaaatctcccttcgtctaaatcctgtctacttccaagacacacacacacacacacacacacacacacacacacacacacacacacacacacacacacaaaatcttggccggacgtggtggctcacgcctgtaatcccagcactttgggaagccgaggcgggcggatcaactaaggttgggagttcaagatgagcctgaccaacatggagaaaccacgtctttactaaaaatacaaaattagctgggcgcggtggcgcatgcctgtaatcccagttacttgggaggctgaggaaggagaatcgcttgaacccgggaggcggaggttgcagtgagccgaaatcacaccattgcactgcagcctgggcaataagagcgaaactccgtctcaaaaataaataaagaaataaaagctgaatcacaacatcttcctctgaagtgttgttgtgacgttaaaaatgagataataggctgggtgggtcacgccttgtaatcccagtactttgggaggcccatcactttgagactaggagtccgagatcagcctgggtaacatggctgagataacgactataaagtgaatggcacatagtaagtggttagctaatgtttgactcagccccactcttcagtgatccttgtgggcatttcttcacaaagttgcaaggtatttctgtagtcctctctccagtatttttcagtatttgttctagcacacactaggtcttccacaaaaatgattgaatgaaaactcctggcagcgggaaagcggggtggggatgtggggaggggcaccccaacacaaacacacagaaaatgctactacagaacatcggttactgggcagcggtacatttcagaacccctagggtgccctcacatcctgcctggctggcctgcttcaaacggttcatttaaccaaggtcatactaaaatgttggctgctactaaaatccaggaaccttcacttttcccagataagagagacagttgctctattagtatgggcagcggtaggcccaaaagatcccgccttcctccacagggcgagcctatcagcgctcctccagcgatgaacgacagctctccaggagccaatgagttcctccccctggaaggaacccgcccatcccttgtgtcgtcactagatctcttaaaaagatggaccctcagcggcgcttcctcgtagcgagcctagtggcgggtgtttgcattgaaacgtgagcgcgacccgaccttaaagagtggggagcaaagggaggacagagccctttaaaacgaggcgggtggtgcctgcccctttaagggcggggcgtccggacgactgtatctgagccccagactgccccgagtttctgtcgcaggct

SEQ ID NO: 9439 - DNA, 2300 bp, Homo sapien
gaactccagcttggacttcttgccataatcaactgagagacgttccatgagcagggaggtgaacccagaaccagttcccccaccaaagctgtggaaaaccaagaagccctgaagaccggtgcactggtcagcctgtaggggaataaaaaaatgtaatattttaatgccaggacacattatcttagaatttctatttcaactttttagattacgaaccatatctcactgatgtaagcacaaggaattggcaaaacagacatatccacaaactgtccataacctagggactatctgatttagaagtccaattaatatagcaagcagcctattccacattttggtaggtgccaaagaatgaatgatgtcagtcactccacccaacttgcactggaactatcacaccacattaaatgcatatttatatgtggtgcttaccagcttgcgaattcggtccaacacaaggtcaatgatctccttgccaatggtgtagtgccctcgggcatagttattggcagcatcttccttgcctgtgatgagctgctcagggtggaagagctggcggtaggtgccagtgcgaacttcatctggaggagggagagaaggacggagggagtgagtgagtgacaagagaagcccctggacagacctcctgtcccagcatcctgggatctcaggttactgaggtcaactcaccaatgactgtgggttccaagtctacaaacacagcccggggcacgtgcttgccagcgcccgtctcactgaagaaggtgttgaaggagtcatctcctcccccaatggtcttgtcacttggcatctggccatcgggctggatgccgtgttccaggcagtagagctcccagcaggcattgccaatctggacaccagcctggccaacgtggatggagatgcactcacgctgcgggaaggaaaaaagatatcacaatttaaaccaatctattgatgactgtcaagtggaacaaaatactcatgcaatctttatttttttagagataaggtctgtcgcccaggcttgagtgcagtgatgccatctaggctcactgcagcctaggctccagtcatccccccacctcagcctctggagcagctgggaccacaggcacagaccaccaagctggctaattttttcattttttttgtggagatgaggtctggctgtgttacctaggctactcacgtaatctgaaaacgaatttccttttctaaagcgatcttttctaaagatccttttctaagatgtactacttttgagaacagctacactatagtctacgttgcttttaatgaatgttaccttcccatcctaaaccgggaaggcctccttccagaccaagacagctcagtcacagcttcctcctttggaggaccaagacaggaaggtgggcatccatccagcgctcaggccccagaagcccactttagactaggtggtcacatttccgggcagctcctagcacaggaagcacgtggccagaccagcgcagaagaaatgtctgtccgcagggacaaggggcggggctctgcggcacaggatgaatgagcaattccgggcgcgcgctcttgcgccccccggcggtgctgcagaggcacgaaatggccacgtctgcaaaggcgctgcccaagccgcccatcctcccttgcctgccggcatcgggctcagcctaacacctccacagcagtctgagcgcagtaggagattatcggcggcccagatctgggtcaagatccgatttccgttccctcaaaatcccttactgccaccacctgctcccctgaattcctaacgcagcagggagagacaggtggcctctacagactgttgtgtacgaactgtcgtaatacactggtgtagagcggtacattgacagggagctcttccgcagtcctcttattgctttcatcaaaaaaagaacactcaggttaacaggagacacgccctgtagccctagtcgcgtcgcgacccagagcgcatgcgcaaagcgcagtggcggtttcccgcccaggagcggcgggaaggtaacggtcgcgcgtgcgcgcttttgtctccagctgcttcccacccccgcttttcgcgctcaagaggaagtgagggctggaagagtccgcgcgcgcgtccacccaaggcggagtaagggcatgcgctggaaaggactgcggggactcgagggaccgcacccaggacacagttacgcgacaaaagagagctccggatacggcggagggcagcccgagccccccatcccttccagagtccgagaagaaatcctggcgcccctcgacct

SEQ ID NO: 9440 - DNA, 2300 bp, Homo sapien
gggacaaaataagtgagaacaatattcaaatatattcctgcctcctctatccagttggaaaaatgtatgcaaatttggattttgaatcaaatgcctttaacaagactaccaaaactatcggaaataaacaagaacctcttggtttgcaggtcaggttcagatgggtggagacacacatatatagatatatataactccttacaaaatacacttataaaccatatagatttgttatttgtctaaaatgaaggatgaaggctgtaccaaatcttcataggctaataactgaatatgaactatgaatttttagtgttttaggtttaacctttttcttcctcgtatactgggcagatattctgaatagtaacatcaatacgtttctgttaggaccattttaaagccacattttaaacctaaccaccttctgcatttccaaggattagcaatgtggtttatggtcttgaaatagattttccaggggcggggcggagggagaactagtctactcctataatgtgggcctccaagcactaagctataaccaattgatgtatcttgacacaaggccaagccgtcttatttacaaaactcttaagttgcacaaggaatccctacttcctaacatccttcagtgtcaaactatttcctccctatccaagtctttcctcacttcttcaactcagctaccacctctgaaatgtgtttttaaatctccttttcaaaaagcccttaggactgttccataaagttgatggcttagatctaaaattggggcctactttgcccttttaacagcttcaatgttaaatgcttgggcactactcttcgaatgactgaaatactatttgcttccagcgtttggtactcttactttggagaacaagtcattacagtaaaccatgtacacctattcggttttctaaagctcgcgtttttcacattatcaggtaagtaccgaatgcactgcctttaaaggaactgagaaaataaaaaggcaaaactcactgacaaactgtggcaacatgaaattaatcagctgagctatccgaaccacaactttctgcatttcacggtgcttcgtctttcaaattgtatggctctctcaagtcctgggtttcctccgaattaaggcaagcctcgtcgcccattccctggtcggtgtctttccgactcgcgcccgcccctcggcaggccctcgcagccatgcgccgcacactgcagtactggcgcgcgttgcccgcaggcgcggcagaccccaccccgcggccgcgcgaggggagggggctcggggctcggagcccgcctctgcggcggccaggccgggcgcggagtgggcgcgcggggccggaggaggggccagcgaccgcggcaccgcctgtgcccgcccgcccctccgcagccgctacttaagaggctccagcgccggccccgccctagtgcgttacttacctcgactcttagcttgtcggggacggtaaccgggacccggtgtctgctcctgtcgccttcgcctcctaatccctagccactatggtgagtaagccgtgcggctcccggctgctttcagggaagcagggaaaagcgagccggcggggcgctggggccctgtatacagccgggaagggctggcctcagagccgtccgtttggagggcggaaaacgaggcgagaggccagggcgggagtggtgagacctcggtgtgtgtaaatagcgggggcccggaaaggtcgaggggcgccaggatttcttctcggactctggaagggatggggggctcgggctgccctccgccgtatccggagctctcttttgtcgcgtaactgtgtcctgggtgcggtccctcgagtccccgcagtcctttccagcgcatgcccttactccgccttgggtggacgcgcgcgcggactcttccagccctcacttcctcttgagcgcgaaaagcgggggtgggaagcagctggagacaaaagcgcgcacgcgcgaccgttaccttcccgccgctcctgggcgggaaaccgccactgcgctttgcgcatgcgctctgggtcgcgacgcgactagggctacagggcgtgtctcctgttaacctgagtgttctttttttgatgaaagcaataagaggactgcggaagagctccctgtcaatgtaccgctctacaccagtgtattacgacagttcgtacacaacagtctgtagaggccacctgtctctccctgctgcgttaggaattcaggggagcaggtggtggcagtaagggattttgagggaacggaaatcggatcttgacccagatctgggc

SEQ ID NO: 9441 - DNA, 2300 bp, Homo sapien
catggtcataagatgtttacagctaaggaagcagtttattaatgctggcaaggacaaactcctatgacaacaaaatgttcggatgtcccaatatcacataacaatatacccttttttttttttggagatggagtttcggtcaaaaaaataaaatgaaataaaaaagaagttttcttttagtttgattactctgtgaaacctgaggtatttattatcaagaacctaaaaaaacaagccctcaaatacttccccattcacaacaggggaatacacagacagataaaagctaatagttttaggaaggtatctggggagacatataggcccacgggagcaaatccctgcagtggcggctctgataatctgcagagagctagaagggaggttctcccctcccccagaaaaatctatcccaaaaccataaactacatcgccaatccttggaaatacataaggtggttagggttaaagggtggcttcaaaatggttctagcagaaacctattgcggttactgaactattcaaaatatttgtccagagatagcttttctggataaaatagctttattcagagccgacagcaaaatggagttcagcagggtggttccctaacattcattcttcccgttaaagcaagctaattattttcagattcgttttaggaataagagtgggggtggtccaatggtagtgggttatcagaacttattaacattagtatcactaaaattgatatgcaacccccactgctaaaattgacaggcttaatttttttttaaagaataagaagagggacaaaataagtgagaacaatattcaaatatattcctgcctcctctatccagttggaaaaatgtatgcaaatttggattttgaatcaaatgcctttaacaagactaccaaaactatcggaaataaacaagaacctcttggtttgcaggtcaggttcagatgggtggagacacacatatatagatatatataactccttacaaaatacacttataaaccatatagatttgttatttgtctaaaatgaaggatgaaggctgtaccaaatcttcataggctaataactgaatatgaactatgaatttttagtgttttaggtttaacctttttcttcctcgtatactgggcagatattctgaatagtaacatcaatacgtttctgttaggaccattttaaagccacattttaaacctaaccaccttctgcatttccaaggattagcaatgtggtttatggtcttgaaatagattttccaggggcggggcggagggagaactagtctactcctataatgtgggcctccaagcactaagctataaccaattgatgtatcttgacacaaggccaagccgtcttatttacaaaactcttaagttgcacaaggaatccctacttcctaacatccttcagtgtcaaactatttcctccctatccaagtctttcctcacttcttcaactcagctaccacctctgaaatgtgtttttaaatctccttttcaaaaagcccttaggactgttccataaagttgatggcttagatctaaaattggggcctactttgcccttttaacagcttcaatgttaaatgcttgggcactactcttcgaatgactgaaatactatttgcttccagcgtttggtactcttactttggagaacaagtcattacagtaaaccatgtacacctattcggttttctaaagctcgcgtttttcacattatcaggtaagtaccgaatgcactgcctttaaaggaactgagaaaataaaaaggcaaaactcactgacaaactgtggcaacatgaaattaatcagctgagctatccgaaccacaactttctgcatttcacggtgcttcgtctttcaaattgtatggctctctcaagtcctgggtttcctccgaattaaggcaagcctcgtcgcccattccctggtcggtgtctttccgactcgcgcccgcccctcggcaggccctcgcagccatgcgccgcacactgcagtactggcgcgcgttgcccgcaggcgcggcagaccccaccccgcggccgcgcgaggggagggggctcggggctcggagcccgcctctgcggcggccaggccgggcgcggagtgggcgcgcggggccggaggaggggccagcgaccgcggcaccgcctgtgcccgcccgcccctccgcagccgctacttaagaggctccagcgccggccccgccctagtgcgttacttacctcgactcttagcttgtcggggacggtaaccgggacccggtgtctgctcctgtcgccttc

SEQ ID NO: 9442 - DNA, 2300 bp, Homo sapien
acagaatggctctgagatagaatttcaaagaatcaaccacgtgaaccctcctctcttttatttaatcctttggaaattgcataaagaactgagactattggataagtgacatatttcttaattaatctttttatattgtaaagaaaataatgttcaaactctgcttctcattccaaaaagacttgtacatgttactatagtccaatagtgtctgatatattttattattaaaattgtgaaagtattttgaatgagctacttattaatccttatgcttccttatgccatttaattcttatttttgttaaatatatttctgggttctgaaagaagcattcaaatacctaatcctcctgtctcttctgaaatatactttttttttttttttgctaaagaagtggagataagatgatgttgaggattattttttcctaggaaatatacaataagtagataaaatgatttttgcattttggatattattttttttccagagaatattactgaagcaaaattgatcaagtaaagcagaactgtggatggcaggctagaaaaatctgtggtcgccattgtcacaccacaacctgcagcagctgtattctcaagtccctccctcccacgcccttcttagcctgccagcctagcaggaatgaatgggttccgcagagcactgtgtgagtagtgctgcagaccctgaaaatttgtctctgaaaaccaaaaggaaaaattatttgtaaaaaataaattttcaactttagtggccaaacttatttacctctgaaatttcatcaccaacatccagtggtacgaagtccagtgacttactccggatcgttgctgagaatggaggcttcctaaatatcaagataattttactccaatttatttcctaggggtgaaagcaaagcctttttgtcccaagggacaactgagcaaccaccagagtctctagctgaacagcaagggtgtgaggccggctaaaattcccacagttagaagcccactcgcaggaggatatttaccaaattgacataagaactacataaaaaggaaatgcgtttattgagctgatgtttcacagttgtctgtggatggaggcgacattgcaaaattctttttacattatattattctcttcttctttttaatttggtgtattggttattactattattttgcttgttactttccagacaaaagtccaattcagatatgtaactgcacacatgtagtactaacttctgagctcaattatttctccttgtattttcccaattttctatcaggaaagatgattcattccaaaggacaatgtaccatacaaaatgtgttacatagacttctcataaaagaatacctctagtaaaccattataactactctacgttcacttgctcttgattattgccatgttagaactatttgttcgcttctttatttaatatggttattctttccatcttccagttttgtttagctattcgggtgtgcgtgtgcctgcagaagaagctctgaaaataagttagttgaacctgagaaaccatttggaatgaccgtatggctaaatctttttttaaattaaaaaaatcacatatacccaggccatttcgagcatcatgccgattttccctcccactttacgtttaaagcaattagagatgttgaaccctaacaaaatgtagtcgagtttaatatactacgagggaggggctggcagtcattttcctttaaatatttaatctaaacataaattgttattaagggtagggggaaaaaacctcacatagataattttaactgcagtttgaggtttaagcaacagaaagtcttctaaccccagtcccctttcttctccttccgcccctccccaaccccgccccataatggatgctcggccgactgcttctgcacggtctctttgtctaaaggatgcaaacagtctacggatgctagagaaaaaggggtgggggagagattacctcatcccacgtcgcttgcaccaatcaccagtctcctgtcatggcttctctgggcagattgggggtctggaccaacaggaaaaggccccggcccatccccatggtgaccgagttgtatatagggagccgcatccgcctatgtgccgcaggttctcttacatcgaccgcctaagagtcgcgctgtaagaagcaacaacctctcctcttcgtctccgccatcagctcggcagtcgcgaagcagcaaccatggtgagaatcggcttcggctctttgtggccgttgggtggagtcagcgcccccaggctctacttggaaaacctt

SEQ ID NO: 9443 - DNA, 2300 bp, Homo sapien
cctgttcttctatgacagttgtgtggcatttggtgactcaggttctagtacaagaccactgagttcccagtaaactcagtaaattcagcatttctaaacatatagtcctttgactgggcgtggggggtcatgcctgtaatcccaacactttgggaggctgaggtgggcagatcaccttaggtcaggagttcaagaccagcctggccaacatgatgaaaccctgtctctactaaaaatacaaaaattagctcagtgtggtggcaggcacctgaagtcccagctacctgggaggctgaggcaggagaatcgcttgaacctgggaggtggaggttgcagcgagccaagatcacgccactgcactccagcctgggcgacagagtgagactctgtctcaaaaaaataagaaaaataaaaatacagtccttgggtgaggagattctttcctcagagaaagaaagtgctggttgggcgcggtggctcacgcctgtaatcccagcactttgggaggccgaggtgggtggatcacctgaggtcatgagttcgagaccagcctcaacatggagaaaccctgtctctactaaaaatacaaaattagctgggcgtggtggcgcatgcctataatcccagctactcgggaagctgaggcaggagaattgcttgaacctgggaggcggaggttgcagtgagccgagatcgtgccattgcactccagcctgggcaacaagagcgaaacactgtctcaaaaaaaaaaaaaaaaaaagagaaagaaagtgctttcctggccaatatagtttattatcaagcataggataaattggagaaaggcaggtttgtgacaaaactgatcagaggccgtttgcatagtgccaggtgttaaacatctattaactaatttcatgacactgtcttgtcacttctcacttttggtctgtgttttttaatattccaagaaaagttattagactagatgatctctaagatcacttcccattctatcattttattgtctggttcttacctaataccaatataatgtgtgtttgagatggtgaaggttcaggagttattggccacatttcacagatgggaaacagggcagcggggcacggggtttgcttcagatccgtgggtccttgctgagctctacttcattaagcgatcaatatttcctggctcctgagtggaactgcagttacatttccctttggaaaagctggtctgtttttaccaataggcctgcagaaaaaaaccaaggccggccaggcgcggtggctcatgcctgtaatcctagcactctgggaggccgaggcagggggatgacctgaggtcaggagttcgaggccagctgtcaacatggtgaaaccccgtctctactaaaaatacaaaaattagctgggcgtggtggcacatgcctgtaatcccagctactcagggggctcatgcaggagattcgcttgaacctgggatgcggaggttgcaatgagctgagatcttgccattgcattccagcctgggcaacagagcaagactctgtctcaaaaagaaaaaaagaaaaaaatcagggtcagagtattgttatgaaaaaacacaacaacaccacttattctactcccacagcctacctaggctttgaagcccacagtattgagagtaagaaaactcagaggtgctaggactgccaggaggcatgtaggaaagaggctagaggagaagaggaatagatttgaagccactaaggagaaatttcagtgatctgtggactaggatggcggagggggtggggacctgatcccaatggcacaatgacaaggtcagcctcatctcttctctctgttcttggcaacagccagtctagccagaaagagcaatctgtcaaatctaattaaagtagaagaaagtgaacaatgggcgcccagctctaaaatgacagcctggttcaatggggtggaggagctagggagggatgagtgctttgtgtgcttggaattagatccttcaaatggatcctttctgaatgcaaaactgtacatctctaactggattcttatttacttcaccaggactcttcagctccctgcgccttttaacacatgcacatccagcaaaagcagaggagaacctggctgtgattcaaaggtaaggctgtaatagtaatgtaatgtaaatagcttcatcatgcacggcttggacatggtactgtgtgcatgcaactgatatttgtgaatttgctcctatttattgtttcatgtttaattatattggtggcattagtgtttatcttattatttctgcaatccttt

SEQ ID NO: 9444 - DNA, 2300 bp, Homo sapien
tttccccaaaaaattccagcagagggcagcaaatctaaatatggatcccaatgcttaaaattaatttaaagtacaagagaattactcttttttttttttttttttttctgagacagagtctctgtcactcaggctggagtacagtggcacgatctctgctcactgcaacctccacctcccaggttcaagtaattctgcctcagcctcccgagtagttgggattacaggtgtgcaccaccatgctcgactaattttcacattttttggtagacatggggtttcaccgtgttagccaggctggtctcaaacttttgacctcaagtgatccgcccgcctcccaaagtgccagaattacagacttgagccactgcgccaggcctgttggttgtttttcttccctatcccactcccacttccctatcttccctattccctctccatgaggcagagccatcagttttgctcacaaacatattccctaagcatctcggatactgtgctaaatatatctggggaatgaatgaaaaagttgaaaagctctactaagactaaaatctctacacatatgttccacaagggccattttgtatgtgtgagttgaagtatatcttgaactcctgacctcaagtgacctgcctgcctcggcctcccaaagtgctggacttacaggcatgagccaccgtgcccggccagaaaattcacttttgttccctcaatatttccataaactctgtatctcccagagatggtcaaggaattcatgagctaagataacatgatagagttgcagagaaacaaaaacaacagaaataaaaggcgcttctgagaaaccttggcagagatggtcagagaggcacatttagtatgacgcagtacaagttagtgttgaagggtttaattcctcggagctctactttcctcatctgtaaactagggataataattcatagagtttgtcatatggatgaaatgtgatcatgtgatatgaaaagccaactactcggccaggcgcggtggctcacgcctgtattcccagcactttgggaggccgaggcgggcggatcacgaggtcaagagatcgagaccatcctagctaacactgtgaaaccccgtctctactaaaaatacaaaaatttagccaggtgtggtggcacgcgcctgtagtctcggctactcaggaggctgaggcaggagaatcgcttgaacccgggaggcagaggttgcagtgagctgagatcgcgccactgcactccagcctgggtgacagaacgagactccgtctcaaaaaaaaaaaaaaagccaactactctgcatagttagcaatcaaaaaatgtaagctattcattatcctaatgaactgaaaaaactgcttttgcgcctatcgggaggagactgttagaagccaaaggctcatttaaagaggacgtaaggaaaagcaaccaaaaaggtgggaatagagtttaaggcgcgttcgtggtgattcagacctagagtggggagcaagccctctctctggacagccctcagcggcgaggggagcgggcgcccgcgggcccagccggggtgcccggcagccaggactccgaggcggaacccgcagcctggtcccggcgtcggcgcctccccggcggcgtagggagcgcagccgcggggaccgggggcgaggccggggcggtgcagtaagggcttccctcctgggcgcggtcgccctcttacctggagcttcccctcgctggggttttgcccacctgacgcccccgcacccaccggggacggggcagacgtccggcctgctccctcctcccagtggacacctctgtccctgtcccggcccattctccagccccagagcccttcctgcccttcctccccttcctccccttcctccccttcctccccttcctccccttcctccccttcctccccttcctcctcttcctgctcctggctccttccgacgagtttggtttgaacttttgaatccgccaatcagcgccgcgcgcccccactccgcgggtgcggccgggcgcaggccagggctcgaaggtggggccgcagcggcacggggcggggtctggggcccgccctcccgacacgtggccggggaccgggtatataaggcccttcggggccggccaccctttcactacttctcccccggactccttggtagtctgttagtgggagatccttgttgccgtcccttcgcctccttcaccgccgcagaccccttcaagttctagtcatggtgagtggggttccctcggggctggggaagagtgcgcgtcccaggggacggc

SEQ ID NO: 9445 - DNA, 2300 bp, Homo sapien
ttttgcattttttgtagagatggggttgcaccatgttgcccaagctggtctcgaactcctgggctcaggcaatctgcctggaatggcaggggcttgaatggctgaactccagggggtgtgatgaaggacaagttattgggagtgaggccagcaggactagggagaaagaggtttttgaggaaggtgtgagaaccctagtagggtttatagaaggtgggaaagctgggcagaggtgtttacacttgagatgtctcatgttgcaaggaaagtgcagctaaccaaaaaccaggaaggatatggtcccaggtctgggccagtcactgggccttgctttcctcactggtaaaatatgatcgcgccactgctctccagcctgggcgacagagtgagactctgtcttaaaagtaaaaataaaatgaaataggcatttattaaagagaggggtgggtctcagaccactgcccccagtagttctttttgttttttgttgttattgttgttttgctttttttaactgccccctgtggagcaaggctaccccgtaggcagtgtgcccagagtagcctttgtttgtgtttttaatttattttttattttgtaactgctctttgtggagcggggaaggagtcctaagctcttccttctcagggggatgctccaagatcctctgggtgggaatgaacagtaatccctttactgaggaaggaaagggcagggggaaatggggacaactcatctcaggaccgtgctggaggtggaacatgcctgcaatcttctcctcaggtgaagggaggatttttagagtagatcacagtcggggtgtccaaggagggcagcgatcctcctcaccgccgccaactctcagttctgggactgtccaagaggaggcgcagccctgatgcgggcccatctgttattcccctccctcctccacacaacctctgagctcctcagcctggaaccctggaagatgatgagaaggaggaaaactgggatcaccaggcacagcccctcacccccaaccccctgtttcttgctgaagatgctgagaggggagcagtacttgcaattctgtgagccggggagagatctcaccctggcacatggttatgctcttttccccaggcagtggctggagcacatgtgtgtgcctgacatgcgacagggcaggggcccgtgcccatcaggccagtcgtcggaggctcttcttcagtcatgacactctgccatccgtctcaccctacctcttgcagggagaggttgggtgacagctgaacagaaaaattcacagggtctgaagccctacaaactgccccgcctgccctctgcttgcaggctatgtgggtgttggtttgacagctgccgccaggactgagcttctggagccagtggctgtcacacccacagtgacctgatgggcaatctcttggccagccagccgccccgtccgggagggaggtgggggggtcagccccccgccgggccagccgccccatccgggaggtgaggggcgcctctgcccggccgcccctactgggaagtgaggagcccctctgcccggccaccaccccgtctgggaggtgtgcccagcggctcattgagaacgggccatgatgacagtggcggttttgtggaatagaaaggggggaaaggtggggaaaagattgagaaatcggatggttgccgtgtctgtgtagaaagaagtagacatgggagacttttcattttgttctgtactaagaaaaattcttctgccttgggatcctgttgatatgtgaccttacccccaaccctgtgctctctgaaacatgtgctgtgtccactcagagttaaatggattaagggcggtgcaagatgtgctttgttaaacagatgcttgaaggcagcatgctcgttaagagtcatcaccactccctaatctcaagtacccagggacacaaacactgcggaaggccgcagggtcctctgcctaggaaaaccagagacctttgttcacttgtttatctgctgaccttccctccactattgtcctatgaccctgccaaatccccctctgcgagaaacacccaagaatgatcaataaaaaaaaaaaaaaaaaaagaaattctcttggccagtcacagcgactcatgcctgtaaacccagcattttgtgaggtcaaggcaggaggattgcctgagcctgggagttcaggacaagcctgggcaacataggaagaccctgtctctacaaaaaatttaaaattagctgggcatggtggtgcaaacctgtagtcccagctacctgggaggctgaggtgg

SEQ ID NO: 9446 - DNA, 2300 bp, Homo sapien
atcccagctactcgggaggctgaggcaggagaatcgcttgatcccaggaggtggaggttgcagtgagctgagatcatgccactgcactccagcctgggcaacagagcaagactctctctcaaaaaaaatttaatttaatttaatttaaaaatagcactcttgccagtaacctaaacttcgttactcaccttccctgcaaacccctgaacacatgcaatagttgtttctcttccagccttcatcagagcagccaagggaggcaggaggaggaggagcgatgagaatactggcaaatacttctacagcatgtactaggtgccaagcacaagtgctttacagagggtaactcgtttaatcctcccaacaccatgaggtaagtactgttattatcattcccatttgtggataaagaaaatggggtggccaggcgcggtggcttatgcctgtaatcccagcactttgggaggccgagacaggtggatcacggtcaggagatcgagaccatcctagctaacatggtgaagcaccgtctctaccaaaaatatgaaaaaattagccgggcgtggtagcaggcgccagtcatcccagctactcaggaggctgaggcaggagaatggcgtgaacccgggaggcggagcttgcagtgagctgagatcgtgccactgcactccagcctgggcgacagagcgagactatgtctcaaaaaaaaaaaaaggaagaaaaaagaaagaaagagagaaagaaagaaagaaagaaaatggggtgaacagaggttaagtcactcagaaaacccaaagcacacagctaattaaggtgagcagccatgaatgaacctgcaccatctgcccagagtcccggtccaccaggggaggatgaggccagggaggacttggcttcttccgccttgggtccaagcactactttcagcaaccaggggcacagtccaaaagaagcccagactctcactgctcttggggctgacattatcactctggaggttaataataatagcaataataaaaccagcttccattttcaggctttaagatgtgtgtcctaagcacttcacatgtatttatttattcctttagtcctcccaacaacactatgaggtagaagctacagttagttatctcccttttcttgagggacatgaagggacgtagtgacgagcctaaattctacaacagagtggtggatcagatgggaagtgtggcagctggatgccagagcccggctcttaacccagactctttgcctacctttgctccgcctggagttgctggcctgctccttctgctttaggggaggagcctcttctgcctggcagttccccacccaggcctgatccacagctccagagccctgctgtggcagccctctgtcccttctcctccgaggcatgtaggtggccagcggagcccttaagcagggtgaggacgggaactccatctggaactccccaggcccagctgcagccccagcagcctctactctcagaggcttgggtcccccactagtgccctgtagacagggcctgagctggtcctccccaggccttgcccgcctctcctgatgcagagctggctccctgctcctggagggtggggccaaatccgggatagatggggctccaggccaacagcagctggggctcagtgcccaggactgcggcaggaagcaccaaggcttccctagcccctcctcacacccaccaagcctcccggccctatcccgggtgggaccctacccctcccaattcccaggagttaggggaggccaagctgtcatttattcgtcctgtcccatctctcccttcctcccgcttcccactcccctggcaaccaaaccagacccatcaaggagaaggaactggcagctgtgcagggagagactaatggcccggaaggaaggaggggcctggaaaggagacgaaggcggtagggacgtgagcagggcgttggccctggcccatctcacaggacgcacaaaggggggagggggctgctgccctgcaatactgaggagctggccagccagggagccgccctccttacccccagccagatatccaggcaggaacctgaaacctgcttccccagatgcactctcttgtcctcaggtcccatctgaggcagacctgtctcacaggacagcgctggagtccccagcagcagcagcagccccagccctatggttcctggcaaacccagcagacctcagcaacccggctcctgcagaccatccgagctgcctctgtccactcctgggcaggttgtgcttgcattctggaagctgtt

SEQ ID NO: 9447 - DNA, 2300 bp, Homo sapien
ttaagcagggtgaggacgggaactccatctggaactccccaggcccagctgcagccccagcagcctctactctcagaggcttgggtcccccactagtgccctgtagacagggcctgagctggtcctccccaggccttgcccgcctctcctgatgcagagctggctccctgctcctggagggtggggccaaatccgggatagatggggctccaggccaacagcagctggggctcagtgcccaggactgcggcaggaagcaccaaggcttccctagcccctcctcacacccaccaagcctcccggccctatcccgggtgggaccctacccctcccaattcccaggagttaggggaggccaagctgtcatttattcgtcctgtcccatctctcccttcctcccgcttcccactcccctggcaaccaaaccagacccatcaaggagaaggaactggcagctgtgcagggagagactaatggcccggaaggaaggaggggcctggaaaggagacgaaggcggtagggacgtgagcagggcgttggccctggcccatctcacaggacgcacaaaggggggagggggctgctgccctgcaatactgaggagctggccagccagggagccgccctccttacccccagccagatatccaggcaggaacctgaaacctgcttccccagatgcactctcttgtcctcaggtcccatctgaggcagacctgtctcacaggacagcgctggagtccccagcagcagcagcagccccagccctatggttcctggcaaacccagcagacctcagcaacccggctcctgcagaccatccgagctgcctctgtccactcctgggcaggttgtgcttgcattctggaagctgtttgacatacaaaggccagatatcagccttctcgctaactctggagtaggggagggtgtggtgggatgtgtgattgtgtgtgtatgtgtgtgtatgtagtgtgtgtgcgcatagatatacaaagctgtgtgtatgcatctgtttgcgtgcgcaggtttgtggacctgttctggggccttctctctttcagactgctggggatgggcactttctctttccccatctcttccccatccagccccacccatccctggtacctgcaactcatcaatactggaaaccagctcctgccagtccatccatctctcagccttggcagccgctgttgcccctcagccccctccccttcctacctcaggaatcactctggttcctgtaaagcccatgactgagcagcaattggtgtggggttggggggagggagaatccagtaaaccaagacagaatacaaaaggcccacttagcccagcccgtggcatggggcagaccctcccgagtgggatccagagctgggtccagccaccctcagccccctatgatgtacccacctcattggggcttgttgcggggtaggtctaggtttgggggctgtgtctttaaggctgaaacatcagcagacaacctctgctgggccgtcttcaggggagggggaggggggctggtcagcccattagcagcagagctggcgccaggcaccagcccttcacagggccctggggattagggagagtagctcttccccagcccgatctgcctctgcgcccctgtctcctattcctctctgggtgtggtgaaggaggggtagctgacagcaggtgaaaatagagcctggccttcagggggcaagtcaaggcactagctatggggcctaagccaggtcaactctccctccagctggcctcctccctactcctgtgccagaagcctgccctttaacttcaggtccttctacctcgcaattttcagggactctagttcaagtcaggccttcctaccctaggttctagctttgggtgcttgttgggaggaagtgacccccaccccagcggcaacagggggcaatcaagtgggtagaggcctgcaaccagggaagggaggggaaggcgctcctgctgttccgcaggggtggggcatccccctccccatacaacccccctccagcgggccatcaggccagtgggaggagctgcccgtgccccccctgagaccgcagggctataaagccgcctcgcagcggtctgcggctccttcccagcccccggcctagctctgcgaacggtgactgcccatccttggccgcaatgagccaccacccgtcgggcctccgggccggcttcagctccacctcataccgccgtaccttcggtccaccgccctcactatcccccggggccttctcctactcgtccagctcccgcttctccag

SEQ ID NO: 9448 - DNA, 2300 bp, Homo sapien
ggggtttcacaatgttggtcaggatggtctcaaactcttgacctcaggtgatccgcccacctcggcctcccaaagtgctgggattacagtcataaacccagccgaaagtagatgatctttttgttgttgtttgtttggtttttttttgagacggagtttcgctcttgttgcccaggttggagttgcagtggtgcgatctcggctcacctcaacctccgcctcctgggttcaagcgattctcctgcctcagcctcctgagtagctgggattacaggcatgagccaccaagtccggctaatttttgtgtttttagtagagacggttttctccatgttggtcagcctggtcttgaactcccaacctcaggtgatccccctgccttggcctcccagagtgctgggattacaggcgtgagccaccgcgcacagcctgaaagtagatgaattttaaagatgcatacaattagtaaagataccttacgtatctttaaatttttttttatagaaacaggatcttgctacactgtctaggctggtctggaactcctggcctcaagcgatccacctgggccatccaaagtgctgggaaagacgcctgtaaccccaggctagacaacgtagccagatcttgtctctacaaaaaaacacaaaaattagctggtggcaggcacctgtagtcccagctacttgagaggctgaggttcccacctcaggaggccgaggctgcggtgagctgagatcgcaccactgcactccagcctgggcgacagagtgagaccctgtcccaaaaatgcataaatagtaaaactagtgagagtgaatgagagatgggatatgtaaagggagtgggaggagttaaggagtaactcctcggtttctggcttgtgtaagaataacttctgtgattggtggggaaaatccaccagagttctgttaagtgttgttcatttcctgtcccccgttaggggttaccccttccatcttaagcaggatattctaggatctctcagtctcacagccttgcccaccaataaccagcaggtgagccccctctccccagacctctagatctgcaaaaggcaacctggaggcaaggaaatccccagctgtgagtagccattcaattctggtgctgtggtaactgagttcaaaaacaatgagtcttgttacctacccgtaaaatgaaagacacctcatcagacacctcactggattgtgaggctccaaggagcacacatattgttaggctcagttcgattccctccagccctctccgcccgtttgaaggcagttccttatcccggagacaacgtacagatgttctctctttccctctttattttttttaagacagggtctctgttgcccaggctggagtgcagtggcgcgaccacagctcactacagcctcaacctcctgggctcaacacgatcctcctgcctcagcctccagagcggctgggactacaagcgcgcaccactgcacagggattattattattattttattattttgtagagaaacgggtgggagtggtctcgctatgttgcccaggctggtctcaaactcagctcaagagatcctcccgcctcggcgtcccaaagtgttgggattacaggcgcctgccaccgcgcccggacgcagatattttctatgggcatctggaatggcgtccccaaagcttggcgccgtgctatggtcaagccgggtcgggggctcgggccagccttcaacaccgttggcagcaatcggaacgatcaactgtaccctcagtaccgcgacctcgcccggtcctgccaatggccggcccctagccggtcctgaggcctcgcgagagctcccgtggctacgccttccccggcctcggaacggccccatccttcctctttccccgcctcccagcggcgctccactctcggattggctgattgatccgagtcagtttttttcctcgccagaaagcggttcgacaattggtccttcttttggcccctcctgcgatgcccgcggattggacggctgagtctggctacgcgggcctccgcgggagcgcgaccgggccaatcaagagcttggcgtattttacaaactgagaaagtagctccagcagcacccgagagggtcaggagaaaagcggaggaagctgggtaggccctgaggggcctcggtaaggtaaggcacgggggtcttgaagggaacgaaggctgctgggttcatagggaggagggcagtttggggcccgagggcgaaagagtaggctcggggtgtctggagatagcacccataagagcggtcttgcag

SEQ ID NO: 9449 - DNA, 2300 bp, Homo sapien
actgaagtcctgatgacaataaggacattagccagcagtcactgaataccaagtatgagctggacatgtgctaagtgctttacaaacatcatctcatttcattctcatgacaactaatgatggtacaaatgttattctcacttgacaaagaaaccaaagctcagagaggtgaaggcaagcttgcacaaatagtaagtgttaagagttaggatataaacccaaatcccacttattgccacagtctatactctagccactaaacaaaagagatagcacatttctgtcctccctgtccccccatgacttgagtaaactgatgtcacactgaggcctggctgtgaaagcctgaaccctatcccaagggctcatcccgggtaatcacaggtttcttgcttcccctcctgagttggtggggagtcctaaagctcctggaaggccccaactctgggggactcctgtatcagacactggttcattcttttccagatgaccttctcccacaccctctcctttctcaccggctgctgccagctgtctcccttcttagctcctggaaactggggcgagtggaagggtgaaaggaaggtcctgaaggtgaaatctgatccacaggagcaagagatgaaaacggaatcagaggtggaccccaaaccctcaggcctcaccaccaaccccatctcccccagtaggatcccttgcctcatcatgaggtacctcttctcccagagcccagctttgtccctggaaggagctcccagaagcaccgactatcagcccctcaagggcactcaccagagcctgtagcctctgggggcacaatgtccggcctcgaggtcctggtccctccagcctagagaagcaggaagccctggcagggtccagtcggtgggtgggggttctgggggccaaatatgcagaggcccgaacaccctgggacaccaacagaggctgtcagcactgctcaggatgcccccctcagtgccccctagcctggtctcctcacatcctgtttcattacctggaccctctgggtggtgcctccctgacttcctcgaaccagtactcttttagccagactaggctggcgccccaggtgacagctcttcacaccctcacctgacaggatggtggccagggctgcagggtcagccacaaactctatggtccctggagcctctgcaaggaaagaggagaaggaaaaggaagggggaaggctgagggggatagggcccctagcataggaactttgaggtacaaggtgagcaagagactcattcaattgaatttggcttatttttttttttttttttaagaaatagatggctgggtgcagtggctcatgcctgtaatcccagcactttgggaggccgaggcgggtggatcacctgtggtcaggagtttgagaccaacccggccaacatagcaaaaccctgtctccactaaaaaaatacaaaaattggctgggtgcggtagctcactcctgtaatcccagcactttgggaggctgaggcaggtggatcacctgaggtcaggagtttgagaccagcctggccaacatggtaaaaccccatctctacaaaaaacaaaaacaaaaaaaaattagctggacctggtggcgcgcgcctgtagtaccagctactcaggaggctgaggctggagaatcacttgaacctgggaggtggaggttgcaatgagccaagatcgtgccactgcactccagcttagtgacagagtgagactctgtctcaaaaaaaaaaaaaaaaaaaagaaagaaaacaaaaattagctgggtgtggtggcaggtgctggtaatcccaggtactcggggtgaggcatgagaatcgcttgaacctgggaggtggatgttgcagtgagccgagatcatgccactgtactctagcctgagggatagagtaagactctgtctccacaaaaaaaaaagaaaagaaaaaaaaaaagagaaaaagagatggggtctcactatgttgcctaggctggtctcaaactcctgagctcaaatgatcctcctgcctcggaggagtgttggaattacaggcgtgagccaccacacctggtcaccaaatgttcatagaatgttacataagacactattctaagcactggggtcccataagaataagacaaagcccctatcctcaagaggctatcatcaaactatagacaggtaacagactcaagccaaggtatatacatgttataaaagaagtgctgcaaagtattaggagaacacagagcaactgattgtgacatggggaactggaaaaggcttcagaagaagt

SEQ ID NO: 9450 - DNA, 2300 bp, Homo sapien
caggcaggggaggctggtgtgagcctgggcctgctctctgatccatccatcatccagcctgggggagcagatccggaattagacatgcagagggctgacacggccctcagccccccgaggaagacaaatggcgacaaagaccttgaataaaatttgtatttatggttggaggaggaggcccctcccccactgactgccaatcctttctctcccactccttgcagacatgtaggggcctcccccaacccccaacacaggcccagccttaggaacctctctctcccagcatcattatgaggcgggggtcgggggtgcaaggaaggagtacagaaaacaagagaggaggaaatcactctccatccaataatcatgccctggtgtgccctgtgccctccatcttacacaatgttctcccatacatgatagtcctggcttatcctggtctctaagaggcctttgcagctgctcacctccagggtctccaaatgcccccactttttaccagtcctagaacctgttttcctagcctctggggtccctgtgagcaagacattttccccagaaggcccaggccctaagagaggatgcagccagtagctttttctctggactctgatctagcaatgcctgtgtctagcaatgtcttggccgctcggaaagacagatacagtcccctcttacaggagggtgcctagcacctaatctgcattttacttacattaatttgcatggccaacttcaacccccacccaaatacccattatgtgggatccaacttctctgggtttcatctaacaacaaactcttgaagaaggaggaaggggcagagactcctgggactggataagtctgggaccagggcaggggtggcattgggctgagctgggcagggcaaatgagaagacagctgtcttctgacttcctctctgtccagtagagtccttcattctcagtcccaaggtaggaaaaatggcatttgtgggctccaaattgagggactaggaggaagacaaatacaaatacctcccttcaaacagccctcacatatacatacacaaagacaacacacaatccacaatcgcactcacccagggacacacagggccaggatcccatggccacctccacactttggagcacactgtcacaatgcacaggcccagagcctagcactgctggcagagccgccctgcccccgcatcttccccacagttgatatgtcacattggagtccaaacacggacctgggtgtctctctgcagcgcgccatttacatttctctctcgatctgtcaacctgtcccggctctgtctctcttcctctgtctctgtctctccctctccccctctggggctgtcagtccgtctcttttcgaagctttgtctctgtctctgcatctctatctagctttccttctctttgatttctgtcgctccttctctgctttcttgtcggtttcttgcttgctcccccgggctgatctgttctcttattttctctctctctctctctctctctctctctccacacaaacacacacacacacacacacacacacacacacacacacactccgctccgcgccccaatactgaggggtgggggtagggttggctagagatttgccttttccagttcaggccaactagtatcagttgaatcctttaccatgttattcggtcacgggcgctgaggtgcgtggggtggtgaatttctatcttttctagcccttcttattttgttttctgtttgtttgtgaggtccctccccctcattttagctcgggaatctacccctgtcttctctgcgtgtttgtatcttgacccctctttatcccatcgctgttttgggtttcctctggcctctgagaatgccaaactccgggtaaagggtaaaagtaaagatacagcgggggccgcgaaaccctgaagaacccgctcagagccgggaaggaacctaggggcagtgggggagtggaggggaggcggggaggacgtgggtgggggccgctgcctgccccgcccccgcacttcccactctgggcaccaggggtcgctccgcctctggccgcttatagtggctcccgccgcgcggcgcctcataccacccgcgcccgggagggaggggaggaaggttagggaggcggagagggaccgcgcccgcaggagagaggcgcgggccagggctctagcagggactggggccgcggcaggggtagcaaggtgagtcggtgcttgccaagaggcagagcgcaaaacctactaggagatcgcgcccggtgagcagcacccgcagctcag

SEQ ID NO: 9451 - DNA, 2300 bp, Homo sapien
cggacactggagtaggagaaggaggagggctttcttcctgcccccatccagaggtgattgctaacccaaggatggtcacaccgtgtcagggctcgggcacgcgcgggtcacttcacattctgagcacagacgcctggtcgatgccctgctgtccctccctcctcccaacctccctccgcctggcccccgccccctccgcccgcctggaaaaggcaaatttgacatttttaaatcccgagccttagagggatcgatgcggcccgggggccccgcccggggtcgatattcctgattgggaagcggccgcttcgcggagcccgcgtgtaaatcacctgggctgggggagggggcgtggggagcctaccacgtcccaggctcgcgaagccaggaggggtcgggacccgggcggtaccggagggcgacggaatgagaacgacaggccttagagaaccagagagaagcccgcccagggcctccccctcccccgctcagccctgccaactcccccagcaggctccagtctcgcttcagcggccgccacccttcgttgcccctggagccgccggggaggccagtgtcggagccagccatgcggcggctcctctctggccgctcccgcggggccggggcttcggcggctgctgtcacggagccgacaggccgggccggccgggaaggggcgggtggcgggggggagaggcggcggggtgaggctggctcagcgctggcactcagtgggcgcgcaacgtatgtttgccgaattgaaaggctgggacaccgagcggcgcagggcagagggtcggagggcacaggcggggtaggagatggcccagaccgggtgagggcagaagcctcactcacgggggaagaaggcactcgaggtcgctctgaggaccgctgggctgggatagaccacccatcccccgccggggagacccgggtagtaaagaacaagacagaatgggacaggcaggacggtttggaccccacctacaagcgcctccaccaccccagcctccgatccttgtcacgctctgctggggaaaccgaggcagccgatgctgagaatagccaaaaagttaaaagcggggtcagcgacgaagctggggcagcaaccagaattcctgcgtgggttttttggattcctccgcccacgcggggccagtttgcgggtaaatgcaccaccgcgccccgcaccacagctcagaccctttcctctcgctgcagtttgtcagatccccccacctcccactctgcaccagtttatagaacaacaatttggggaaaacaatccgggcggagtgacggccccgtaattgtgacaaagtgagtgcgggcggctggagagagcgctaggccgggagcgctgcagggcgaggcggaggcaggggcgcctccccccgccctgccgccccctcgttcttattccggtcacctcccatccctctccttgactcttcaattcctcttctcccggccccttgcgccttccttcgcttgttcctccatcgctcttccctttcctcccggtaacagctcttctcccgctcccccgaccccgtcgcccctcccccggtgcgctttttcctcgctcacttctcccctctcctctgccctccactcgtttcttcagcttttcctcgcgcttacattgcccttgggcccctggctctccccgcacaatccgcttctctccctccccactcctcccttcctgagatcgaaccctgagccccttcccgacccccactctctgggccgccagcgcagccccgcatttctgggttcctcgggaagtaaacctgggggcgcgctgcggccccgggtgccccggcggccagccccttccctctcccttgtatggctgccgcccccgccccaccacctgagccgggagatagtttgtttgtccagcggcggccgccgccgcccacgctgtttgcaaagcttagcgcgccgtcgcgcagtgcgggcccaattaagtctcattcattattcagcgctcctgtccgcccccgccccccagcagtctgaggcgtcgctttggggcccctcccagcctaggcccctcagtgagccctaagaggtcatatagagagcagcatttcctctccaggccgagatgagggctgagggcgtttggagggaagcgctctgcctactgccgggaggtgacacccgcgaggccgaccgtcccccgaagcccccgcaagtccagactgggggacctcggagatccacgagattgccagagaaggaaattgaggcccaagaagctgcatgacttagccaagttcacg

SEQ ID NO: 9452 - DNA, 2300 bp, Homo sapien
aatggcatcccaacagagttaaagaaactgcttgcaggggctgggcgtggtggctcatgcctgtaatcccagcactttgggaggccgaggcgggcagatcacgaggtcaggagttcgagaccagcagcctggccaatatagtgaaacttcgtctctactaaaaatacaaaaaattagccaggagtggtggcaggcacctgtagtcccagctacttgggaggctgaggcaggagaatcacctgaacctgagaggcggaggttgcagtgagccgagatcacgccactgcactccagcctgggcaacaagagtgaaactccgtctcaaaaaaaaaaaaaagaaagaaaaactgcttgcaggggacatgagaaaacaatggggtgagaaaaggttgtggtagaaggatgtgtttatattctgaatttctgaattcttggctattgcattcttgacaatttttcttaaaaccagagagtgaaaggcatattataaaacaatcaaatatcttttagagtatggacaactattatatatcaataaaaaattaattagaaaaaatatatcttttagagaacacaccaccttatcccacccatgatatattgatgtgtgatggagaaagattatttaactatttttttaaatgtgtaaagcagcagggcatagtggcttacgcctgtaatcccaacactttgggaagctgaggtgggaggatcaccttaggtcaggagttcaagaccagcctggccaaccaacatggtgaaaccccatctctactaaaaatacaaaacttagccagccatggtggcacatgcctgtagccccagctagtcgggaggctgaggcaggaaaatcacttgagcctgggaggtggaggttgcagtcaactgagattgagccactgcactgtactccagcctgggcggcagagctagattctgtctcaaaaattaaataaataaataagtaagtaaataaataaataaataaatgtataaagcactatgttaggagattgaaggaaaaatatgaaggttctagtattcacaagctgtcctgtgataagagagatttgatcttttctgtagatggggtgagactaggattaaatttcaaaatttgagaaaaatattttcattccatttatgggagaactttctagcagctacactttctccaaaagggaacaagctactgtggagtggggggtagttcttcctcctctgcttagaggagaatttttggagagctctcagactttacataggtgattggactggctgacttctcaggtcttcccagtatttgaggtctgattctgggctacataccctactcctagaagcatacaatctgatgggagataatgacacaggtacacagatatcaaagcccttgttcagtgttttgaactaaatgtcataagagctgtaaatagtgtattggcacattggaggagggacagataacattgttttatggggactcagaaagattcattattttatatgtcatatgtccctttggggactttgggaaaccctagggaaccagcggctagagcatctcaagggggccttattcaattctaggtaactagccaggtgtgaaagaaagggcccagggtgtctcactttgcagaggaagattggagaccaggaacatgattttaaattatgtgcctttactgcagctttcttgctctctttgtgtgtgtgcattctttccatttttttcttctttctggatgttaaatctgagtaatatatatcatttttaaagtggaattatgaccaggcatggtgcctcttgcctataatcctagcactttggcaagccaaggcaggaagattgcttgagcccaggagttcaacaccagcctgggcaacatggcaaaactccatctctacaaaaagtacaaaaatgagccaggtgttgtggggtgcgcctgtagtcccagctaaggaggctgagattgggaggatcacttgaacccaaaaggtggaggctgcagtgagctgagatcgtaccactacactccagcctgagtgacacagtgacagcctgtctcaaaaatataaaaataaataaataaataaagtggaattatgttgatgactattctctctattctctctctctctctttttttttttttggagatagagtcttgctctgtcacccaggctggatcttggctcactgcaacctctgcctcctgggttcaagcaattctcctgccttagcctctcgagtagctgggattacaggcacctgccaccacgcccggctaatttttgta

SEQ ID NO: 9453 - DNA, 2300 bp, Homo sapien
gaatcctcctacctcagcctcctgggcagctgggacaacaagcacagccacctcagccagctaatttattttttgtagagacagggtctccctatgttgcccaggctaatctcaaacccctgggctcaagtgatccacctcagcctctcaaagttttgggattacaggcatgagccaccgaacctggccaagaatggggactttattttccagccaaaaaacttgtattggctttgcagcaccaacaggccctataatgaaggcatttcctgaactgagtgacttttggtgagtgaaaccagtctttgtggaataggactcaaggctcgcatcccacacctcatgatgaagttctccatttaccagggtcatatcctcctgttcctactctgtatgggaaggaaggggaattgtgcaagaattagtcactcattcctttctgttcctaaaccactttgtacttttctgcttcaacactatgttattatagtcatttaataacttatatttgttttttgtagagatgggggaccttgttatgttgctcaggctggtctcaaactcctgggctcaagcaatcctcccaccttggcctctcaaagtgttgggattacaggcataagctgctgcaactggcctatttaataactttatcctcctttggaactggatactctccttggggtaatgattttttttattcttctttgtaaatgttcgaatacctagaacaatacccaccatcattgagtaggtgccaatttagtgaatgaaaagaaagcagacatttggataatttgcttctatttgaatttttgaatgaagattgaatagtaaggaacatatagtccagtgccgtacctagctggatgacttcgtcttctgcttatctagatcagtaaatcatatggttggagtagatgagacattactaaccacaggtcattggactccaggcgatttttgagcccttacctcaagcaacgttaaaaaccacaaggatcagatggcttggcaaagctctactatactactcagttacatgtactgtgattgcaataacatacgtggaaaccaaaatgacatgtgcctgtggtgtctagctatacactgacacacactctccagcttgttggtgccttttcagagcccctttgcttggcctcaaaaggtaagatgaggacaaattctaatatatatatatattttttgagatggagggtggagtgcagtggtgcaatcccggctcactgcaacctccgactcctgggttcaggttattctcctgcctcagcctcccgagtagctgagattacaggcgtgtgccaccacatccggctaatttttgtattttttgtagagacggggtttcactatgttagccaggctggtctcgaactcctgacctcaagtcatccgcccgcctcggcctctcagaagtgctgggattacagacgtgagccaccgcgcccggccccagattctaataaatattttcaatgctgactgtctaaatccctctggcccctcttaatagacccctgaccagtcgacactgaggtaagtgctttatgcatgcagaaagggtgcacaaatactagttagttccagcaccagggaggttgggagtctggcgtcgaagagagtatttaacagaaaagattcgaagggcggcgggaccgaccaccgccgcgtagaggggctatgctgacagctgggtagatcagaaacccgactgacgatcccgaggtcattcttcccgcgcccccaccggcctctgcgctctctcaggaggcagagcgaccgcgcggtccggaggccccagcgtttcccgtcgttggcgactctgaaattgccttttggaacaaaacttgggtcgggaaggaggcgaaggggaaagcggtgtgaagtcctcggtacggaagagtgagcggcgctgtacccggcggccagagaaaaagcttcccaacccggacattgagcaaaagccccgcgctcgactcccctagcggcgcccgcgttcggccacctccgggggagtttcggctctttccgtcagttcagctcgggccctccgttcccggcgcgcgccgggtccctaaccgatgccgccgggtacgagctgtgctgcacgcggacgcgagctcgcgtcccacccgttttccccttccatctactttgtccccaaccctctccccgagtctcttcctttccccggtaattcccagtctccggtggcgcgcgagcctgcggacggtgcgagacgcgagggaccgggccccgagaagagcggtaacccg

SEQ ID NO: 9454 - DNA, 2300 bp, Homo sapien
caaactcctgggctcaagcaatcctcccaccttggcctctcaaagtgttgggattacaggcataagctgctgcaactggcctatttaataactttatcctcctttggaactggatactctccttggggtaatgattttttttattcttctttgtaaatgttcgaatacctagaacaatacccaccatcattgagtaggtgccaatttagtgaatgaaaagaaagcagacatttggataatttgcttctatttgaatttttgaatgaagattgaatagtaaggaacatatagtccagtgccgtacctagctggatgacttcgtcttctgcttatctagatcagtaaatcatatggttggagtagatgagacattactaaccacaggtcattggactccaggcgatttttgagcccttacctcaagcaacgttaaaaaccacaaggatcagatggcttggcaaagctctactatactactcagttacatgtactgtgattgcaataacatacgtggaaaccaaaatgacatgtgcctgtggtgtctagctatacactgacacacactctccagcttgttggtgccttttcagagcccctttgcttggcctcaaaaggtaagatgaggacaaattctaatatatatatatattttttgagatggagggtggagtgcagtggtgcaatcccggctcactgcaacctccgactcctgggttcaggttattctcctgcctcagcctcccgagtagctgagattacaggcgtgtgccaccacatccggctaatttttgtattttttgtagagacggggtttcactatgttagccaggctggtctcgaactcctgacctcaagtcatccgcccgcctcggcctctcagaagtgctgggattacagacgtgagccaccgcgcccggccccagattctaataaatattttcaatgctgactgtctaaatccctctggcccctcttaatagacccctgaccagtcgacactgaggtaagtgctttatgcatgcagaaagggtgcacaaatactagttagttccagcaccagggaggttgggagtctggcgtcgaagagagtatttaacagaaaagattcgaagggcggcgggaccgaccaccgccgcgtagaggggctatgctgacagctgggtagatcagaaacccgactgacgatcccgaggtcattcttcccgcgcccccaccggcctctgcgctctctcaggaggcagagcgaccgcgcggtccggaggccccagcgtttcccgtcgttggcgactctgaaattgccttttggaacaaaacttgggtcgggaaggaggcgaaggggaaagcggtgtgaagtcctcggtacggaagagtgagcggcgctgtacccggcggccagagaaaaagcttcccaacccggacattgagcaaaagccccgcgctcgactcccctagcggcgcccgcgttcggccacctccgggggagtttcggctctttccgtcagttcagctcgggccctccgttcccggcgcgcgccgggtccctaaccgatgccgccgggtacgagctgtgctgcacgcggacgcgagctcgcgtcccacccgttttccccttccatctactttgtccccaaccctctccccgagtctcttcctttccccggtaattcccagtctccggtggcgcgcgagcctgcggacggtgcgagacgcgagggaccgggccccgagaagagcggtaacccgactggtcggagcccgcctctcgccgccccgcgcctctccccgatcttctcggtctccggtgcgcgggccgtctcgccgctcgagccgcgctcgcgcacccgttggctgccacagcctcgagcttggcgcgccggattcgcgccggcgcgagtacgcgccctgagctctggctggctggctggcgcgcacgcgcccgagagggctccggggcggggcgagccgctgcctgggcgagggtcggggtgatctgctggatctccggcagcatcctgcagtccggcccaggagagaagtggggaggcggcggtgggggcggggcggcgtccggctctgagagagctgggggaggagcgcggcggcgacggcggcggtggctctagaaggggaggtggaggatctcctttcctcttctcagacccgggagcgtccgggacgcggagcccggagctggggcgacgaggcgattgcgggggcctgggctaggtgaggctaagggtgctgggtggcggggttggcgggggctcagagggcgccgaggtgcggggagcgggttgagg

SEQ ID NO: 9455 - DNA, 2300 bp, Homo sapien
cgtctctaatcccagctacctgggagactgtgacagaattgcttgaacctgggaggcagaggttgcagtgagccaagatctcaccactatactccaaccttgacagagtgagactccgcctccaaaaaataaaaaaacggtcagtgggaagatttattctagttcaccctttccctgaaggtgcaatatttttaaaacggcaagcttacataagatctcagttccaatctttttgtttgggttttttggttttgtttgagacagtcttgctgtcacccaggctggaatgcagtgttgtgatctcagctcactgcagcctcaacctcccaggctcaagcagtcctcccgcctcaccctcctgagtagctgggaccacaggcatgtgccaccacatccggctaattttattttttgtagagacaaggtctcactatgttgcctaggctgatctcaaactcctgagatcaaaggatcctcccacctcagcctcccaaaagtgctggcattactgggcttaatggcactatgtggtaaaacccatgtgttattgagactggcaaaacatgccacagttacctattaatagttcaagctcactattctgggttttagttccctctagggatttcccttacttcttatgttcagctatacatttaaaatgatgtatattatttttcatcctgtatttttttttttgagacggagtttcgctcttgctgcccaggctgccatgcaatggcgcgatctcgactcactgcaacctccacctcccgggttcaagtgattctcctacctcagcctcctgagtatctgggattacaggcatgcgtcactgtgcccaactaatttttgtattttcagtagagacggcgtttttccatgttggtcaggctggtctcgaactcctgacctcgtgatccgcctgcctcagcctcctaaagtgctgggattacaggtgctagccaccatgcccagccatatatttttagtctcaaaaaatatgaaatacaggccaggtgcggtagctcaaagcctgtaatcccagcactttgggaggtggaggcaggcagatcacttgaggccaagagttcaagaccagcctggccaacatagcaaaaccccatctctactaaaatacaaaaattagctggacgtggtggcacatgcctgtaatcctgactactcaggaggctggggcacgagaatcgcttgaacctgggaggtggaggttgcagtgagccgagatcacacctctgcactccagcctgggtgacagagcgagactgtctcaaaataaataaataagagatgcatttatcaacatagaaaaaatctaaaacaataatgctatgtgaaaaaaacaaattgaagataaatatatatgatataatatttatgtatttatgtagtgcaaaataatagtgtatattacctatggatatatgcacatatcataaaaatgcaaaagcacgtatggaaataataccaagttcagggtagaaatctctagcgagacgaagaagggaaataggacttattaggtgttcatgggggcttcaattatatttattttgttttaataaactcagtggcatgcaatgggtgtcattatgttttatatgcctaacatagtttataatttaaattgtttgtataaattatctttattttacagttaaatgatacaaggtaaaatatgtttcaaaaaatcttacataaaaatctaagttgttattgttgctagttcatttacctttccacctttctttacagtatgctaaaaatgagggaatattgatgccacattaatacctgataccgaaattaaaccaccttttctttatatgaaatctagcatataacttctatttctagcaatgttctgcatttctaagttttgaaattaatttttcacatgctgttatcactcatctattaatcattcccagtgagatgcttgtatgtactgtcactgacactaaagagtgatacatattgttaaaaatgaaatatcactcttttcattattctctgtataggcctcagctgcctagtgacctactaatgttagaattaaatgaccctgtcatcttttccagataaatgcggtacgtgcaatagttcctaataagagcaacaatgaaattatcctggttttgcagcactttgataactgtgtggacaaaacagtacaagcattcatggaaggtaatcctgacttaattttaaaaataaatttatatttgctcaaatagaatttgcttcagacttttataacattcagcaatccagtgatt

SEQ ID NO: 9456 - DNA, 2300 bp, Homo sapien
aaatataaaggacacttgtaatcagtagctctttatggaattatttattacacatgagccaaattttaattaggtaagctcccctttttcattgttctggtagccctcagcctgttgcagatcagcaggtttgagactatccaatcaagccaaaaaaaaaaaaaatatatatatatatatatatatatgcgcacaaggcttgaaagcttttaggtggattctaaaaaataaaatcaagttgagatgaggaagaatttaaataaaaaaattggaaatgcatatcttggcatagttacaaactttttagatccatgtttccagcaatcaattatatatgtaatttggggattggtgaatatagaaaggtaaatagaactcttggaaattggttaaaatgtgttgagtaggtaaatgcagtccatccttttctacaaagctggcttcctcatatatacagtgctttgaagtgtactatacagacagaacattttaattttgtaatgtccacatggtgaattatattctattaaatcctgtaacttaaggaattttgaaaatttggtaccttttttaaagtcttttttctctgtgtgtttcatttcattttggatagtttgtaaaactgctgtcttcaactgtattcatcttttgttaacagtttctattctgctgttaattctatgcagtatatgtctctggcattgttttatttgtctctagaagttcaactggggtcttttaagatatcttccatatctcttcttaccacgcttatgctttcctctaccttcttgaacatatggtatctattttttttttttttttttttgagatggagtttcactcttgtcacccaggctggagtgcaatggtgtgatttcagctcactgaaacctccgcctcccagtgattctcctgcctcagcctcccgagtagctgggattacaggtgcgtgccaccacacccagctaattttgtatttttagtagagacagggtttcaccatgctggccaggctggtcttgaactcctggcctcaggtgatccacccatcttggcctcccaaagtgctgggattacaggcgtgagccaccacacctggccctatagtatctaattataatagctgtttgatgtccttttctactcaattctatcatctgtgtcatttccgcatctgcctctgtgattgattttttctcttacttataggtcatatttttctgtttcttttaagcttttttaggtgggactagagcagcctttagtctagaaataattttgccctgttgctgaggcagtatccttccaactactctgcctgccatatattgtgaggtttttccactctggctggtgtgagcacaaactgtccctggcctggtgagctctggggattgttctgcctggttgttttgttttgttttgttttgttttgttttgttttgttttgttttgttttttggtggttctttggttttgttttgttttttttttgcctgttgtctttccagtcttgggtagtttctttatactcatgcactggtccacactcagaatcctctgtggatctccgtgcagctctctcatgtgtgtagctctttcctcaccaatactctgccccagaatttcagccatcttggcctttccaaattcccaactttgtcccttcaattcagggggtccaccaggctgttgaggatttctcctccctgcattgtagcctagaaactattgaggcagcaagttggggcaatcataggcctcacttcatttgtttctgttgtctcgggaaaagtactacctgttacacattgtctgaaaaccattgtttcatatattttgtctttgtatgtttttagttgtttaagatagaagaataaatccaattattattattccatcttgaccaggatccttttttttccaaaaatctataaaaacatgtttttctcattggggaaggtggttatttaggaaagattcttagtctacatgacatttggctttggtgttcagatccgactttcaagttacctatataattattctttttttttttttaatatttcggtttttttccccaaggttccaatattgaaaaatctgtaaaagacctccagcgctgcacagtgtctcttgcacggtatcgagttgtagttaaagaagagatggatgcctccattaagaaaatgaaacaagcctttgctgaattggagagctggtaatttaagctgcatttgatatcagtagcataaaaatgatcatatataaatataaagatggtcagccattcccca

SEQ ID NO: 9457 - DNA, 2300 bp, Homo sapien
ggttaataacttgcctttaaaaatcacacagacaggccaggtgtggtggctctcgcctgtaatcccagcactttgagaggctgaggcgggcagatcacctgaagtcaagagttcgagatgagcctggccaacatggtgaaacccaatctctactaaaaatacaaacattagcggggcgtggtggcgcatgcctgtggtcccaactacttgggaggctgaggcaggataattgcttgaacttggtcggcataggttgcagtgagcagagatagctccaatgcactccagcctgggcgacagagggagactccgtcacaaaaaaaaaaaaaaaaaaaaaaaaattcacacagaccaaaattaaaaaaaaaatttaatcacagggacagcaagtggcagacctggttcccaagtgggtgggtgatttcaattgtggccttatcctgtctcaaagtgaactgactcctaaaatgtccttctttttagtagacagctggaccgccgcctggagaggaagccttgaacggctgggggaggggattactttacagccaggatccagccaaggctggggatgagatgggagtaggatctcccgactccttagggtcactcctcagggtcactcctcgtcctggggaccagattccaggcttcacaggaccggagaaggaggagcgcgtcctcccttcccaaagcgccagctcatttagatacaggtgcctggggctttggctctcgtcgctgatgaggggtagcatctttctgatgctggtgactgtgagtgcgtctcgagggatgggggtgctgagcctaccgcttcgctcgttagggaacaaattgctgttttggccccggcggctcctctgggcgcgggcggcagccgcgctcgctggcaaatcgtgggagggaggaggagcggcgctggcaggcaagtccgggggaccgtcgcagcgcgggaggccaagaaaagacggccgccccgggcccggctccgccccgccgggaaggggctccctgcagccgccccagggcagcaccccgcgcggcgccgcgcggagctctccaggacgagctgcgtgaggcgcggggctcggccttcctcgctctcctggtgccaggacccgcacgcacaaggttcggaagttttttcgcagtgtctgacccctgccggtcccctgtatttaccacctgaccctctagcgcgcttaggagaggcaagaggtgacaaatgccagagggaaatggaggggcaggacaaggggtctggcgctcccctccccaccacacaccctttccgcccacggggtcacacggaggacgtctgacccttactcctagggctacccaccctctggtttccaggcagctcctgcttgcggagacacctcataggagcagctggatccattttccagagcgtcaagttgaggatgagaaagtctcgagggccgggcagctgtgcgcgcagaacccccgccccatctgcttttagatttcccgggtgcggctggagcccctctagagcgccggcctccgctggccgcagggccttcacctgcgcctgtcgccctgtccccttgcccactgcattttcctcggggagagcatcttccacagcatgcgtcccctgccccccacgccccgagcccccctcccattccgccgggggaggagaggctgctaggaggctctcggagagcccccgggctgcagagaaagacgcctcccctctgcggctgaggccgagtgagccaaagggggccggccgctcgccagtggttctccgaggtacgggcggggaggcccgcggggtgggatcagggcggccgccacctccccgcccccgccgaggtcccgaagggaggggagccctccgcgggaggcctgtccctttaaggaggcggccctggctgggtgtgccccgtctccatggttaccccggtgcaggcggcgggcgcgggagggagggagggaggctgcagcttctccccgacagacggagggagctgccgagagccggcgccgagcgaagccgagcggaagcccacccgcagccgacacgcgagccgctgccgcggcgggaggtgctgagagcgcggcggccgcggggcctggagcccgggatttgtgggcggcgagggcgcgaggggccgcgcgccatgctccgggccccgacggcgcggacgccccctcgcgcgccagcgtccggcgcgaccccggatcccggtctgcgcattgccccccgacggctgcgctagggagcgcggggcccggcggggggcggccgagctgggcgccct

SEQ ID NO: 9458 - DNA, 2300 bp, Homo sapien
tctaagacacacatctcacccaccctacccaatctaacatctctgagattacaccgcaggctctaattgatgccatttaataattactgtcagccaggtggcagtcttaacctgcctgtgggaaaacctccattgaccccttctggtgagatcaagaatattccctagactcagttaaatgcagcatctcttgtagagcagaggcagctagggctcaggaaggtaagcctggctgcctggcattttccctatgccacacagggctctaatttgctggttccaaacactgattcctggacaagctgcatctgaatcacctgtgggacttaaaaacaatcagactgtggggtctcccatagatactgtgacgctgtaggtagagatagggcctgggtgtttgttctgacttttgcaggggattctaatcaacatagccagctgtgaaacactagaactgatgttcagtctctctcagggctataattcaggttttctggcacagtggttttgatcctgaatgtgtttgagggcctgggtcacagagctctttaccccaagcccatgtgggagccagtgagacaggctgcaggcgtcaggccatgtcccaggcctctttgctcctctctctgctggcttcaaggcttcagctacagaggcccagcccagctctgaagggaatctcagcaacctgcagccccctcttctctcctcatggctgaagctctcagggcttgctgacctctacttcctctccccagggaagggcgacctgatcggctgtgagctgccccggcgggagcaggtggtaaaggccaatgccgacgtgaaggggctgacgtactgcgtcctgcagtgtctgcagctggctggcctgcacgacagccttgcgctgtaccccgagtttgccccgcgcttcagtcgtggcctccgaggggagctcagctacaacctgggtgctgggggaggctctgcagaggtgagtgtgctgagtatgtgcttggaggggatgggggtgccagggagcctggtgaagtgggcagaggctggggatggtggagagctgtgtgtgaagtgtggcctggtatgaaagctcccaccttgggcaggggtctacaccctctctgcccttccacactcatgtgcccagcccagcatgtgcagccacccctgccagctctccttggcctgtctgaggcagccttaccctgtccagaggaatcttagtgaaggtagatgaatgcatcagtgctggcacagggaggggtggctcctgggggtcaggggctgagcagggcagagacaggcaccagctcttcaggttgcttctgaagagagcctggtggccccctgtgttttttcatggtgaaacaggattgttctgaggggcttttgaatttccctggattgtcactaattccaaaccaatttttagcgccgcattctcttggatagtttaattaggctgagggacctggtagaggagtggtggtgtccgtatttggctagaattttgagaggtagttaacacctccagggctttggtggctttagatagattatagattaagatagtatcatctggccgggcgcggtggcccacgcctgtaatcccagcactttgggaggctgaggcgggtggatcacgaggtcaggagatcaagaccatcctcgctaacacggtgaaacgccgtctctactaaaaatacaaaaaaaaaaaaaaaaaatgagccgggtgtggtggcgggcgcctgtagtcccagctacaggctgaggcaggagaatggcatgaacccgggaggtggagcttgcagcgagccgagatcacaccactgcactccagcctgggcgacagagtaagactctgtctcaaaaaaaaaaaaaaaagatagtatcatctataggaccttcagttagaatagatgttggctattctaacaaagatggctcatcccttccagggtagatgaagccttggtaggggaggtgagtgggacacaatagtgaccatccatgccgattccctgtccctcactatccctaggtggacaccagctccctgagcggcgacaatacccttatgtccacgctggaggagaaggagacagatggggagcagggccccacggtctccccagccccagctgatgagccctccagccccctgctgtcccctggctgcacctcctcatcctcagctgccaagctgctatccccacgtcgaacagcaccccggcctcgtctaggtggcagagggaggccaggcagggcaggggctttgaaggctgaggctggcccctctg

SEQ ID NO: 9459 - DNA, 2300 bp, Homo sapien
ccgactagtgcctagcaggcgggcctgatagaagtttctctaaaggctctggaggagtcaaacaatgcataaggtcctgtgcaaccctcagactcctatacctcgtgggaatttggaagtcgaaatccagtccgcggtcccgcccctccccgggtcgcctcaattagccccgctcggtctcgccctaagtctcgcctttccctttaaccaacccctcaagccgggttacctctccggtgcctataatccttaacgtttccctatatgctgtcccaactaggaaagcctttactttccgctattggtaaaatatttacactttccgtaccatggccacgcccccttcacacacgttgccaagacgaaccggaagagattgccagccccctggttcgttaaccggaagtagacgtacctcacggaagccggctttggccctgcggctgctaccgtcgccgcggagaaattgttggatctggcagtctaggaatggtgagacctcgcggttcgcctctgagggttctcagaggagttggggatgaaatggagttttgcagagtgccgccggggacgaccaccccccaagtttggggccccgccccagtggcgccccgaaaagctgcgcatgcgtgggccggaccgggttagaatctggctcgaagtgttacgcatgcgcaaaggcatggagaccgtggggtgagaatgggcttgcgagtttacccccacctccccagccaccagcctgtgggtctcaaaccaaggctacttggtgctctgctttgagttgcagaggtgacttcatcaatgctcctaccccgagttcttgagacagacctggaccgatcccctaccttgggtgtgcactcttgggagaacgaggggcggagggtccggtaaggaaggggcacagaccctacctcagtttgccggcaagctcgggccccttcgccctctcctcagatgtcaagattcttagtcgtagcctatggagcggagagcgacaggctcacctggggacagggctagaacactgagctaagagccaccctggttagaagtggggactcacgagaggagcgccccgagaaagtccagtacctgggttctctaggggttgttggggcacagcgtggttgataatcacgcagttcccaaacagtggtttttggtttccacgagatggtatctcatggaaataccacttactaaatcttcagtaaaaaccccaaatggaaaagaaaaacaaaaaaaaaacgagatggactggttggagttttgtctccctttcttttttcctgctttggcctgggaggggaaggctggtgctgctgagctgagtggacagctgaagtaaagaaaaatgtgggccaaagaatcccttgtctcttgctagtttatagtcaaggcgcttaacctaggagataccagtagaattaaagggtctatgaaccctctaaaatagtatgtgtttgcacccttttctgcagtccatagctgttatcatactctgaaaggtgccagtgaccttcacaagactgatgtctaaggctattattggcagagtggggccttatgcctctttcctgtccttatgtcttccctagcttatgggaccctgggggacctgagccagtataaggaagtgaggctggccagttggaaatctgagcctcagggagcctcatttctcctttgcagaatctcctctcagcctttaagctcacctggtcagaatccttggatgagcctgtgggaccgttcctcctagcccggtggtttggaaccagtggctttgggactgtaagaggatggacaaaggtagtatgaggccgggacagctccccaaatgctcgggcgccaagcatctgctgattccactctgtgcctggcacgtgtgtctttcggtcctggctaggccttgccacctccccctgggccagcaccacccatgtacctgtcggcagagccacagttgactgacttgctgttgagctgctgctctttagcacggctgcattttgatggcagagggagcagttatgcccagagcccagcgtgtcggcatcaccagtctgacctgagcaccatgtgctgcacgacatgacacgtggcaccgggggaactgcccagcgtggaaggtctgggccaggtctgagcccagatgggatctggatggccaaggaactctaccttaaaacctcaagtgtcaaggaggcaggggaggggccaagagggctggcaggggaagggggctggggaggggtcccatttgcagaggctctaggatcttaggaggcccg

SEQ ID NO: 9460 - DNA, 2300 bp, Homo sapien
cacctgtaatttcagctacttgtgaggctgaggcaggacaatcacttgaacccaggaggtggaggttgcagtgagccgagattgtgccactgtactccagcctgggtgacagagcgagactctgcctcaaaatcaatcaatcaataaaaagaagttgtgtagaacctattttttttttcattgtaaaatatggccgggcgcagtggctcacacctgtaatcccagcactttgggaggctgaggtgcgtgaatcatttgaggtcaggagtttgagaccatcctggtcaacatagtgaaaccccatctctactaaaaacacaaaaattatccaggcatggtggcgcacacctgcaatcccagctactcaggaggctgaggcatgagaatcgcttgaacccgggaggtgtaggttgcaggagccgagatcgctccactgcactccagcctgggtgacagaggaaggctctgtctcaaaaaaaataaaacaaaatttaaaaaccatgtattaaaaaactggaaaataattagagagaagaattactactactaccacttggacatgtgttaacattctggtgcatttccttcaactgtcttttcctttgtatgtttttaatagttatcatgaattcatatatatttaataacattaatattattaatgttctgtgtaatcactttttataaaaattatttcaggccgggtgctgtggctcatgcctgtaatcccagcactttgggaggccgaggcagcctgatcatgagatcaggagttcaagaccagcctggccaacatggtgaaaacctgtctctacaaaaaaaaaaaaaaaaaaacttagctgggcatggtggcacgtgcctgtaatcctagctactcgggaggctgaggcaggagaattgcctgaaccgagacccgggggccggaggttgcagtgagccgagattgtgccactgcactccagcctgggctatggagcgggactctgtctcaaaaaaaaaaaatttcattggttttctgatattttcacaagtttacataatatatttaatcaagtgcctgttaaaaaataaaacacacactctttcatgggagttaaaataagtacatactcattaaacaagtccacagaacagtaaatgaggttggtactctcgaagcagagggccatagtataccgtcagggccaaaagggccagtctctcatttgacacttgaattccctagcaatgtccatgttatgtgttcttgacacctctgatggacagctttggaactgaatctttcttattctgagctgaagtatgtctctctatagctgctagactttagtacctcgcaaaggaagcataaaacagaattcctcttttagacaacagtctttctagttttccggaacatctctcacagccccaaattcccaatttttccgacaggttcgttctcccaccccaagattccttccaaggcactctcctctgaaggtgcttccattggttttctctcttacctcccggcgaccacaagtggccccagccgtccaggtggggtccggctgacgggaccaagtcgacactactccttctcgcagggtctcttccttctcagtaaagcggcccacgatcctccatccgctcctcagagagcctctctgccctttctgtccgccacatctccctggctacattatctccccgactagtgcctagcaggcgggcctgatagaagtttctctaaaggctctggaggagtcaaacaatgcataaggtcctgtgcaaccctcagactcctatacctcgtgggaatttggaagtcgaaatccagtccgcggtcccgcccctccccgggtcgcctcaattagccccgctcggtctcgccctaagtctcgcctttccctttaaccaacccctcaagccgggttacctctccggtgcctataatccttaacgtttccctatatgctgtcccaactaggaaagcctttactttccgctattggtaaaatatttacactttccgtaccatggccacgcccccttcacacacgttgccaagacgaaccggaagagattgccagccccctggttcgttaaccggaagtagacgtacctcacggaagccggctttggccctgcggctgctaccgtcgccgcggagaaattgttggatctggcagtctaggaatggtgagacctcgcggttcgcctctgagggttctcagaggagttggggatgaaatggagttttgcagagtgccgccggggacgaccaccccccaagtttggggccccgccccagtggc

SEQ ID NO: 9461 - DNA, 2300 bp, Homo sapien
ttaaatatatacaataaaacattttaaataaataataaataataaaaattgtggccgggtgtggtggctcatgcctgtaatcccagcactttgggaagccaaggcaggtggatcacttgaggtcaggtgttcaagaccagcctggccaacatggtgaaaccccgtctctactaaaaatgcaaaaattatccaggtgtggtggtgggtacctataatcccagctactcgggagactgaggcaggagaatagcttgaacctgggaggtggaggttgtagtgagccaagattgtgccaccgcactccagcctgggcaaaagagcgagactctgtctcaaagcaaacacattttgagggattatgagggaaaatggattctaagctagacttccacatccaagcaaacagtcaattaagagtgaggatagatattaagtaaagacattttcagacaaccagggtctcagtgacttaacctcccatgcaatcgttgtcagaaagtgagtggaggagggactctactaaaacaaggaagtgaacaaaggaagaagagacctggaatctagaaagccaaggagctgattcagggagaagcaaagcaagtccctgtgagacagtgaagatgacggctgtgcaccaagcctggagagccaccagactgacaggagcaaggcacggagaaccacaggggagggagaatcacagcccagagccaggactgcaggatccagctgcctcctcttctccagaagaactcttctcttccacagatctttttgaagagacatctctctctctctgggttgctctccccagaaacagattggaaagctgcccacccccatgctcaggccaccacctgccttcacctctccctggtgcagaggctttatcctgccttctcctttcccttctgcccctggtcccgcagtctcagccacatccccacgggttcatttcaggccccaagccgactggctgtgctgaccccaggaggcggagtggcgggggggtcagggcgggaggcccaccttggggaacatggtcaccatgctgctcaggcactctcggtgcttctcctccagccccttctgcttgtccgtccaggcctgcagcctgagactctgcaggcggtcaatgttttccaggaagatgtagaggttctgggccttgtaggaagcctccgtttctttcatgatttgtacatggttgatcgcttcttgcctgggaaaagaggagaagcaatttagggggtggagaggcctcctctatcccccaagtctgttaaccagagatgactttgttttctttaattccttagagcaaaaagagaaatggaggctggtgagagctggggaaaatggggcagagaaaagtgggaggtggtatgaagtgaggagcctcagggctgggatgaaacagaaagagaaaggaaagacaggggagcacattaggtggattatagacagggccatgggaagagaggaagagagagggaagttgcttagaggaaaagcccactacagggagagcagtgctcagtgcccttcttctcacatcttcaagggttgcccaaggccccaggccagacttgctttccaggcccccactcaggagaccctgtccaggcctggggtggctctccccatccccccttgccctgtgttccttctctcccactgggtttaggctctgccaacatattgcagcaggtgggtgccaggtgggttccagggaggacctaccggaggctctggaggcgtctatagaagatgtacttatggcacaggtactgcagcctgagcgcgcccagctccatggtggtggtggtgagctccagtgctttgctgcgcaggtagtggggcagcctcaactcagactcctcactcaggagctgcaggttcttcctctgggcctccatgtccatgtggtacaccttcttcttaatatttgcaggggatatctgcaaagagggccaggtcagccttcggatggatgtcccagtgacaggaaaggaggcagatttcttgggctttgtgggaactcggcgggtccgtggtctgtaggtaaactccactgaactcataggtctctgctttcccagggcaggctgctgggtactaggagacatgggcaagtgtggcctcctgctttggtgagcagattgggtccggcttggggcaggcactaatgatagctctgccttctccaagtccctccatcgactggtgggtgtgaagatcctcctctccacatcctcccctagctgctctggctctctccgtgggctctcctgctcctt

SEQ ID NO: 9462 - DNA, 2300 bp, Homo sapien
caacagagtaagactctgtctcagaaaaaattaaaaaataaaataaaaataatgctaacctcataaaatgatttgagaagtgttctttactattcaattttttgaaagagtttttatagaaccgtatcttttttttcttaaatgtttggcagaactcaccaattaaactatctggggctggagttttctttgagggaaaggttttttatattatgaatccaatttctttagtagatttacggatattcaaagctttttttttctttagtgagcatcgataggttacgtatgttaaagaatttgcccatttcatctaatttaccaactttattggcataaaggtttttcatattgctctctcatattattcccactgtagagtctgtagtctcttattcttcatattgttagcttgtcttctctcttttcttcctggtaaatatggctagagttttatcaattgcattaatcttttcaaaacatcagattttagttgcattgattttcttctatttttgtttgttttctattggtctctattcttattcttattatttccttccttctgcttattttgggtttttttgttcttccttttctagttttttcctctaagcactgatttggcagcatcctcaaaattgtgatatgtttctatttttgctcggttcaaagtatttcataactttccctgtgatttcttttttgactcagggttatatggaagtatgttgcttaatttgtaaaatatttgggaattttccaaagatctctcaattattgatttatagtttaataccatagtggtcagagaacatattttgtattattttagacttcttagggtaattgatacttgttttatggcccaaattatggtttatatgatcattgttccatatgcgtagggaataatatgtgtcctgttgttgggtgaagtgttctatgactgtcaatggagtcaagttggttgatagtatttttcaaaacctctatactttttattttttgctacttctatcaactcctgcaagagaagtgctggaatctccaactataattttggatttacctattcctcctttcagttctggaagctttttacttcatgtattttgaagcaatgttattaggtatatacacatttagaattatgttctccttattaattgacatctttagcattatgggatgttcctccctctgtatgtttgtgtgtgtgtgtgtgtgtgtgtgtgtgtgtgtgtgtgtgtcagggtatctatcacctaggctggggtgtagtggcgtgaacatggctcactgcagccttgacctcctgggctcaagtgatcctcccatctcaacctctcaagtagttgggatcccaggcatgcgccaccatgcctggctattttttaaatttttttgtagagctaggctctcaccatgttgcccaggctggtctcaaactcctgggctcaagtgatcctcccacctcagcctcccaaattgttgggattacaggcgtgagccactgagcctggcttccatttggttattgattggctctaatttttacaaatttaaaatattttattcaggaaaataacttttgctaattgctttttcttatttgtagacattaatgttttgtttgggagcataacatttagtaatttttaaaaagcaacaagtaggccgggcacggtggctcacacctgtaatcccagcactttgggaggctaaggtgggtggatcacgaggtcaggagatcgagaccatcctcgctaacacagtgaaaccccgtctttactaaaaatacaaaaaataaattagccaggcgtggtggcacgcacctgtaatcccagctactcaggaggctgagccaggagaatcacttgaacccaggaagtggaggttgcagtgaccgagatcacaccactgcactccagcctgggctacagagggagactccgtctcaaaaaaaaaaaaaaaaaaagaaaaggcaacaagtcaagtaaatatatgttaggtaatggacaaaaagctagatagtggggagtctcatctcctaattcttctaatcaaactgatgatgtcactggggaaaagaggatcagttggaacctggtgtttggcagttaccagaggagctgtgcctgggcagagggtacccaggagacaccctggtgcccttaacctccaaagcaggcaacattgtgtgtccaggcctgtggaccagaaacacaggatgttttgtgactgacagagtgatccaaaatggagaaggatgaccccccacagttggtgactcccac

SEQ ID NO: 9463 - DNA, 2300 bp, Homo sapien
atgaacagtcagattggagaaggtcagcagtctccagcagtgatgtcttcaagaagatgaaatggagagaattctctgctatatctagatattctgagaggaaatttaagcaactgggggaagaatttgaggtagagtttgtgagaaatacatagaaaataaatgattttaaaaaacaagattattaattccaggaaaaataaaagtttgtgcaggaaaaaacagaaggtctccctggggaggacagacccaaggaggaagctgggcagggaattccagggtcctaggtattcagaatatggtctaatcctgggcaagtgtgctttgcatgggcaaatccccttggaccccttgccctgtggggagggctgcagctgggggaaggccggagatgtgaaggtaaatgccagaagaaacagctaaaagaggtgaaaacgttgcctccagagaggggaagacgatgggggcagggctctgctgtttgtcttaacaaatctggtacaattattcgattctatatgtgtgtacatgttctaagaaatatttcattaaagaaaagaaaagcatttaaaaaataaaaatgcaattcatgaaagttcacggaacctctggaccacttctgctatacttagagatctcaataatagtttgaaaatcgccccagctgcgctggcatcgcggcagcccccgggggaaggtgggagcggtggagaggccgccggtggtccgtcctcctccccccgcccgccccctccattcccctctcctgccgcggcggcggctgcgggccgcgcgccagtctcctcaccccacctcccccaaaagtttgaaaaccacaggacccagcgtgggcagtacagggagacgtcgtctccaaaaagttacaaaattagccgggcgttgtggcacacgcctgtagtcccagctactcggaggctgagggagaaggaccggttgagaccaggaggctgaggctgcagtgaaccctgattgtgccactgcactccagcctgggtgacagatcaatacgctgcctcaaataagaaaagaaaaccgcagagctgggccttcatttgagaccatgtgggtatcattttgattaaaccacaaagcattttctctctacagcagcccacaagggtgaatcccacttccttttcctcccaggtgtcacctctaactcttcgtgtcaggagtttttctacctctccggagttctttggctctcaggaacctagcacggcatcacgcgagtcccggctcaggtgaggggggaataaagggaacaggaagcgccttttgcggggctttgcaggctggcggtcagcgcctttctgcacccgtgtgcctggggcctgtcactctccagccccaaggccttcagcgcattccccgcagagctccaggttacagtttcctcagccgcacagcaagcatgtacctcacatttttaacttctgtcaaagagtgggccctgctctcatgagttcagcgctcagtgggagccaggtcccaaaagtgaacttcagggtcacgcgagaagcacgtgtacgccccacaagggcgtgatttcggggatttgtctttttttttttttttttccaagctgctgtgtgctcagtccctgagacagaccctgccacctcacaggtgctcaacaaatagttctggagttaactaacttaaaagtactgtaaaagagctacacagcaaattaaattcgctgtgcagcgcaaaggcaccctacacactgcgtgaacgcttcggctcctggagcgccggcgactgcgaagccaggacgcaggcagcggggagaggcagaggcgccggcccccgaccgtcagtcagaggcgggagcaggcgtgccccgccccccggggggcggacccgggacgcggcggcgcgggggcggggcctggttctccgtgccgggggggcggggccgggaccgaacacaccgggccggttggggccccgctcgccggcgggagccaccggagccccggccacgaaggggtgcgaccccccgccggccccgccctcccggctgcggcctggccaatcagagcggctcttactggcgggtgggctgagccggcccagctgctcggaggctctggcatggtaacatccccgcgcgggggtggaggggctcggggcggtcccacagcgccccctgcggcccgggccgtggccgatggggcggggaggccgctggggatagctgggaccccggggagggcgagggaggccaagggtgagggaagagagcccgggaggggggatgggggcggggactg

SEQ ID NO: 9464 - DNA, 2300 bp, Homo sapien
agaggtttcaccatgttggccaagctggtctcgaactccttacctcaggtgatctgcccgcttggcctcccaaagtgctgggattacaggcgtgaaccaccgcaccaggccaggaacagttttttttttttttttttggagacgaaatctcgctctgtcgcccaggctggagttggagtgcagtggcgcctcggctcactgcaaactccgcctcctgggttcacctcattctcccacctctcccgagtagctgggactaaaggtgcctgccaccacgcctggctaattttgtttttgtatttttagtagagacaggatttcaccgtgttggccaggatggcctcgatctcctgacctcatgatctgccctccttggcctcccaaagtgctgggattacaggtgtgagccaccgtgcccagccaggaacagatattttaaaggcagacatgaagggcgtttttaaatgctgagcattctcaacataggggaaattggcagcagtgaggtaccttctcttcagccagataccacctttccccgggattcctccctatcaccccctaactttcaggcaaagaggcagaagggctgggccctttagctgcatctccaagcctcggttcacttacagtgagtttgtttgtttttgaatgggcaatatagtcatatggctgcgtattcaaaagatacaaaagccatacagggaaaagtctcccctttatctctgtccctttctaccatttcttgtgtatcatcttttgtctctgacttttatacaaatgataaaagtttgctgcaccttgctttctttcccacttgttaatacatcttagagatcatatcgagacaataagcttcttcattcttgtttataactgtatagcactgcattttatgtgtatatataatttcatagctccttactggtggctatttaggctgattccaatcttctgtttttacaaataatactgaaatgaaaaccttaaacatacagcattttggccatgtagggctatacctataaaattaatttttagaagtagaaggttctatatagagatttgttctgtttgttcttcgttcgttcaatatttgctgaatacctattatgtgccagatgctggtaggtaccaggaatacagcttccaacaagtcagatatgatccctgtcttcatggaatgttattacactcttgttggggaaaacatatccaggcaaacataataattacaaaattatgtacatgaggaaactaaaaaggggatcagatagagaaataggaaggagctactttaaatacagtcaggaagttgtcttaaaataagtgatacttaagctgagaactaaaggatgggatgcagacagccattaggggtaggacagggcaacctaagctgttcaaagcctacatccacagggagatagttcaggatttgtagaggaggggatggacaccaaaaaggggatggagataaagccaaagagatgaagttggcgattggaagtggaagatgtcaaagaaagtaggtggctaaggatgaggtcagttaggggaggaagctggtcatgaagagatgagaattagggagacaagcattttaaaggactagcgactatttgtgttgagagagctttggactgaatctctgtaactgggataattaggggaactagaaaagaggcgactccctccctagatactttgggaataaaagagacctctaacttatttgagagaggcacagccttgcccacaggcaggataatggattagaagccttaggtagagccagtctgtgcctgtagtgaagcctccttcatcttttctgttgctttgacaaaatggaaactttcaaaataaagatgacattcaaggggctcagccagctggctctgagctggcacaagagagagcaaaagcacaagagagagcaaacctaccaagggctaagggcttggggtgggcaggaaatcgggcttgaagaccctcctgaattttgtgctcctttttcatcctcaccacttctgcttcccttctgcaaaaagcccatctctgtgcccatcctgggtcctatgacttttctctccctcaacagtcggttcccgattctggtccccggcccccagcagcgcctgcccccttcccaccggggccccccatgatgccaccacccttcgtaagttttatgtctttccctgggcttggcttttccagcctgcacccccaactccccagcccctagccactgctgcatcaccagcacagttttcctgtaatgccccttttgctgacct

SEQ ID NO: 9465 - DNA, 2300 bp, Homo sapien
ttgtcttaaaataagtgatacttaagctgagaactaaaggatgggatgcagacagccattaggggtaggacagggcaacctaagctgttcaaagcctacatccacagggagatagttcaggatttgtagaggaggggatggacaccaaaaaggggatggagataaagccaaagagatgaagttggcgattggaagtggaagatgtcaaagaaagtaggtggctaaggatgaggtcagttaggggaggaagctggtcatgaagagatgagaattagggagacaagcattttaaaggactagcgactatttgtgttgagagagctttggactgaatctctgtaactgggataattaggggaactagaaaagaggcgactccctccctagatactttgggaataaaagagacctctaacttatttgagagaggcacagccttgcccacaggcaggataatggattagaagccttaggtagagccagtctgtgcctgtagtgaagcctccttcatcttttctgttgctttgacaaaatggaaactttcaaaataaagatgacattcaaggggctcagccagctggctctgagctggcacaagagagagcaaaagcacaagagagagcaaacctaccaagggctaagggcttggggtgggcaggaaatcgggcttgaagaccctcctgaattttgtgctcctttttcatcctcaccacttctgcttcccttctgcaaaaagcccatctctgtgcccatcctgggtcctatgacttttctctccctcaacagtcggttcccgattctggtccccggcccccagcagcgcctgcccccttcccaccggggccccccatgatgccaccacccttcgtaagttttatgtctttccctgggcttggcttttccagcctgcacccccaactccccagcccctagccactgctgcatcaccagcacagttttcctgtaatgccccttttgctgaccttggaagagggatggttttacttgagcattgggttggggagagctgttgtgaagccctcagtacataacattgacaattccccctttgtctttttgaccttaggacacactggggctagaggtaggagaagtggaagggaaaagaccccattaatgtgagggcagggtgggactatctatctctttcactactccttacctatgctctttaaatatgccacagaattcgggctggaatggcattggtggtcatgagttggagagaaagggatgggaggcaggggactggggtacttgggtacctggatacctgccttctgccccttcatctgagaggcctctttgggggagaattgctgaagaggtggagccttccagtctcagtctggtgctgttaaacctcccttattcctttcctttcccgttacaattaagaagctgtgtgcttgcctgttagaccccagttgtcagtctttctcagtggtgaggagggaggcagtttcatgccttgtgcttctcaaactaaagccttggaattgcctcagagcagggtggagggttggggagggaggtggtggatatttcctgacaggtcctctctacctctgacaaggcgatgtcttccctgctcagtatctcttcctttactcatttccagatgccccctccagggatccccccaccctttcctccgatggggctaccccccatgagtcagagaccaccagctatcccccccatgccacctggcatcctgcccccaatgcttccaccaatgggggcgccaccaccactcacacaggtaattgtctctcctcccctggggcctcagaaaaccctgtcagtttagctgggggtggagataagagcgggcatgtaggcctcagaaactggggaaggaagggagctttgggccaaacccatgtggatttgtctgctgaatgactgagacaactctcaggcaaggtgagaggccagaatctggggattgcctgaggaagtgcccaagtgagggtcatggctccagtgagatgtctcaggaccctttgaggtaccctgtccctcctgttccagcccttaccttggtggttggtttctgtcttctttgtatccatagataccaggaatggtacctccgatgatgccaggaatgctgatgccagcggtgcctgtcaccgcagcggtaagcactaggggccagcaggtagcaggctctgccctgcagtcccgtgagtctgacttggaatgcaggactatgacctccattctttccctcttctcatcgcatccacccaggtccccggcagcactcccca

SEQ ID NO: 9466 - DNA, 2300 bp, Homo sapien
gcaaggggaagaaaagctggagggcctccaggagaaggaaaggaaaggtatctgacacaacacgttcaataaatgcttcctgaattgaatcaaacggaattgaattaattggggaatgagggtgctggatagggtgacttgagaaccccaaaggaaaagggcccagtatttgcagtgtcttggagctgcatctcttcccctcacttcctgtcacccctacttctccatgaatggtgttcagatcccagacatctgtgcccttggagcccctgcagcctgcagtgtctcatgaccctccagtgtgggctgtgcagagtggttcgggtgacttctctatccccaccccactcctaccctctatcccagtgccttgcctaaactgagtgagaaaaagcaggcattcaatgcctacaaggcgcagcgggagaaggaggagaaggaggaggcccggctaagggccaaagaggccaagcagaccctgcagcatttcctggagcagcatgaacgcatgacctccaccacccgctaccggtcagggggccaggctgggctgggacttgggaaccctgagaacacaaaggtccagggtctctgttctctgtctacctactcacagcttatatgctccacaggcgggcagaacagacctttggggagctggaggtctgggctgtggtccctgagagggatcgaaaagaggtttatgatgatgtcctcttcttcctggccaagaaggagaaggtaatggtccctgggcagaatccttcagcccatctcatcctggactttccttgtctttgctttgttatggaccctcgccatttacttctctacttccccagtgtcccagcttctgacttggaagctggtatgggacttgcacatctcatttctgctctgggcctatagtcctgggtgtagcagggaggaggagtctctgagagatgggtctgtaacctgtactccctccccttccctgagacatgaaagtcttgagtatggccttcttcctagggttccctagctacctttccccaggtcctcctctgcccaggcctacttgggtagctctggcctgccctgcctcaccctgatcctgtggctccctaggaacaggccaagcagctccggcgccgcaatatccaggccctaaagagcatcctggatgggatgagtagtgtcaacttccaaaccacgtggtcccaggcccagcagtacctcatggataaccccagctttgctcaggaccatcagctgcagagtaagcctgggcctccaatcccagctatccctttccctttctttactggacctgggaccccagagtctgcctcaccccactcccctgtacctcctgccctcccggacaccctaggagtactcaacactcacccagtccttgtacctctttggactccggggataccagaatgtttcaggacacccctccctctggggtccactcttggcctagacattttgtgtccttggaggaagagctctgggataggaatcttaagtcctagagatgtcaatgatgattttagctcatgtgaatatggtcttaaagcatcatagaactacaggccttaattggtcacgttacaatagactgttgttggcctgtaattactgatgatactcaaattcactttctgaaattgcatcaaagcctgattgattcccagttccctaaggtgtgaaacctcagatcccaagacaaccggtttcatgttatggcttctaataactgaattcacaagagctgaatacttgcttatttattcttatacaattaatgatcccctcttaagaactaccattgcagtggctgctcccacagagccccctccaggcccttcccccaccaccctgggtatccctagcacctgtaggacagcatcgttgaaacattaggggtgctggggtctgagagggtatcctgctgggacaatgcccgcggaacctcctgcctgtctttagacatggacaaggaagatgcactgatctgttttgaggagcacatccgagctttggagagggaagaggaggaggaacgggagcgggcccggcttcgggagcgacgccaacaacgcaagaatcgggaggccttccaggtatctttgctgtcctttctagatcagagctcagctctgccctagagcacaacctcttcacccattccctgcccccttctggatacgctgcctgttctttctgtgcctagccctgtccaagctctatgagacctctctctgcctgcagtctgtttctgctgtacctcctcaattctggactgt

SEQ ID NO: 9467 - DNA, 2300 bp, Homo sapien
ctgtattttctcctgactttttgttcattataaagtcatgcccccatcctactttctctttcagaagaatatatgctggctctgttgagctcaatatgtatctgcccagcttctgctgagcattgtattgggagctatggaggatacagagatggttaagacagggtcttgtttatagggggcttccaattgagccattatacaaggccaagtgaaattaaagcaaaatgaggcccaaagggttatggagagagccgctatgtcagaccggtggtagattaaggagagtttcacaggggcaaccttttttcctgggctttgaggggcccatgcagtgagaattggctggagcagagaggacacttcagggtgccagcggagggaggcagcttctgcttgcctcttttgttttgctgccttccagcttcctcattcccccacctgggtttctgccactctgagcctctgagtaccctgacagagaccctcgttaagagaaccctgggtaggaattctcactcttggggcaatgactatgccttcagcccacttttcccttaatggtgctgtctgcctgccaggagacatatgagaacacaagccaccaggtgcacaccctgcggaggctcattaaagagaaggaggaggcctttcagcgtcgatgtcatttggagccaaatgtccggggcctggagtctgtggacagtgaggccctggccagagtaggccctgcagagctgagtgagggcatgccaccctccgacctggaccttctggctccagccccaccccctgaggaggtcctgcctcttcctccaccaccagctccgcccttgccccctccacctcccccattaccaggtaaccacgacgacccctgggagccaacaggggcagcctctttgtggggaccaaaactgtagtcagcagtgtcttcctcagggagaagctgggaaaatggcattatctgaggacttggagggatataaaatcagggtgagggaggcctggaatctgagggaagctcaagttatcagcacagggatgcccaaaggcagatgtggacctgttttaaggatcataaagatgttgctcccaattcctttgaagacagccaaggagaggcttagactgtagccatagaaactgggtcagagaccagcaacaactgccctgtcagagttagatttctgggagcagcttgagcagagttcatgtaggctccttctctgagagttttttttttttttaactctcagagaaggtgggacaggcagaggggagggaagcctatgaagagtctcttgacgcctgggtcactgtgtcatttcttcttcccccagacaagtgtcccccagccccacctctccctggtgctgcaccctctgtggtgttgacagtgggcctgtcaggtgagtatccccagggctctgggcagggctggtgggaccaggggtgtgtgtccttggcccctgtgtcactgatcctccttccaaattagccattcgaattaagaaacctatcaagaccaagttccggctgcctgtcttcaactggacagcactgaaacccaaccagatcagtggcactgtcttcagcgaacttgatgatgagaagatcttggaggtaacagggcctggggtccagagggctaaggttgagggctagggacctggttgccttttgaggagattctggtcttagaaaagccatcagacagggtgaggccaggcttagctccaccaacccttcattcttgagtgtacgtatatttctagttgtgtcaacactttgtgtttgtattcaggaaatattccagagtgacagagctctgggccaatgctgggtgggctgtcatgaggtcctccactagtatgaggctacagcgttttccttgctcacctattcctgccaggacctggatcttgataagtttgaagaattattcaagacaaaagcgcagggccctgcccttgacctcatctgctccaaaaacaagacagcgcaaaaagctgccagcaaggtgactctgttggaagccaatcgtgccaagaacctggccatcaccctacgcaaggctggccgctcggctgaggagatctgcagggccattcatacgtgaggctcccactgacctggctctggtccctagtctgttggcaacccagttctccacccaggagcctgggtttccctagattccaggtcatctgacagaactccctcacatccccctagtcatccactggcttggctagaatttactgcatctgtgctggcagttcagcccagaccttcac

SEQ ID NO: 9468 - DNA, 2300 bp, Homo sapien
cccttcctgttgctgcttctctgggcctcctcttcttcaggtggcctgcatgcagttcatcaacatcgtggtgcactcggtggaggacatgaacttccgggtccacctgcagtatgagtttaccaagctggggctagaggagttcctgcaggtgagctggctggggtccttgtaaggtgaggtgctttgggatcagtttagccgtatcacaaatgatttttcttttataagtgcctaatccttgatgctcctgggaccctgcctgtcttctgtagcctgggactcaggacctctgcagctaactccccagtcaggcagctccatgggggcgagaatctgacatggcctgcagcaggaactctttgggaagtggtggcgaagggggatgaggactaagactttctcagaaagttcccctgatgatctgcctgctcctacaactactcctactctctgctcttcccccagaagtcaaggcacacagagagcgagaagctgcaggtgcagattcaggcatatctggacaacgtgtttgatgtcgggggtttgttggaggatgctgagaccaagaatgtagccctggagaaggtggaggagttggaggagcatgtgtcccatgtaggtggtcttcctttgcctgccagagccactgttgatggaagctcaagtaaccaggaatcctgagctgacccatttgcctccagattgagtcccagggaggctttagaacccaccagggctctcaagagcatactcaggcctgagccactggatcatccaccagttggaatacacatcgacctccagggctgggcatgaggtggcattggtcttgagacagtcagaatgtggcctttgtcttgtatctgttattggaatataagggaaccacctgactaagctgcctttgtggccttgtgttgaggggtccgactcaggtcttgactagggttcaggctgtgctgagtgcccaggctttagggccagcacagaacctgcccttcctgttgtgcagctcacagagaagcttctggacctagagaatgaaaacatgatgcgggtggcagaactagagaagcagctgctacagcgggagaaggaactagagagcatcaaggtacaagtactctggggaaggcagtccctgactgatcctgggctccagcgccttggggttctgctttttttccctgagtcatatcaagttctctaggatttagatcttgattcacccttgaggtactcaggtgtgggtgggctgatgatttcaccccatttttttagttggagaggaaaggtggggccagtgtgagccagacacacacataagagggtgggaacagctggggcacccacaagcattctggagttccaacccaggcctcctcctaccagcccatcccattgatttttctcccctctacccccgtgttcctcccccagccatgtttaatgagcaggggcagagtgaccaagtgctctgtgtattaggatgtccaccaggtatcctaaattggcagggcaggtactcttcatatttcattctcttctgtattttctcctgactttttgttcattataaagtcatgcccccatcctactttctctttcagaagaatatatgctggctctgttgagctcaatatgtatctgcccagcttctgctgagcattgtattgggagctatggaggatacagagatggttaagacagggtcttgtttatagggggcttccaattgagccattatacaaggccaagtgaaattaaagcaaaatgaggcccaaagggttatggagagagccgctatgtcagaccggtggtagattaaggagagtttcacaggggcaaccttttttcctgggctttgaggggcccatgcagtgagaattggctggagcagagaggacacttcagggtgccagcggagggaggcagcttctgcttgcctcttttgttttgctgccttccagcttcctcattcccccacctgggtttctgccactctgagcctctgagtaccctgacagagaccctcgttaagagaaccctgggtaggaattctcactcttggggcaatgactatgccttcagcccacttttcccttaatggtgctgtctgcctgccaggagacatatgagaacacaagccaccaggtgcacaccctgcggaggctcattaaagagaaggaggaggcctttcagcgtcgatgtcatttggagccaaatgtccggggcctggagtctgtggacagtgaggccctggccagagtaggccctgcagagctgagtgagggcat

SEQ ID NO: 9469 - DNA, 2300 bp, Homo sapien
aatagctgggactacaggcgtgtaccaccacgcccagctaatttttgtatttttagtagagatgaggtttcaccatgttggtcaggcggtctcaaactcatgggctcaagtgatctgcctgtcttggcctttcaaagtgctgggattacagatgtgagccaccgtgcctggcctgcctggccacttaaaaaaaaaaatttagtagagatagttgcctaggctggtcttgaactcctaggctcaagtgatcctccttgaggatcccaaagtggagccactagtacctagccttgttttcttgattaagtcttgctgtagtcatctgaggataggggtgtgcttttattgggagaaggccacagagcagtttatgatagtccctgctgcctgccccctctacctggtgcctgcccctctggctgctggccaggagctatgtccaaagcagcgtggttcccaggcctggggcctcttggcagttggcacacaagttagaggtcctggacctggtcctttgttcccagggaatagctcagtgcctggcattttaggcatgcctgccatctgaactgcggcttctctgggtagagttatgtggaaggaccaagatccttcctggatttctgggcaggaagagtttgtcagattgtgggtgcttcagggtggcaggaacccagggcaaggtggggagaggaggatcctgctttggtcacagcctgatcagccccagggcttgcagaagttgggtgtgcaggagcagcagatgggaactcaggttctggagagggataggctgggaagtgggattccagagcctctccagctcctctttccctggtttgtattggtttctgtgccttgcctaagcaccctttaacctctcctcaaagtgtcaagatcccgaaatagcagtatagactcagacaggaaatgagaagggggtggggagctggagagcagacagacaggaaacgggaggcctgttggcccccagagaggaagctaacttcaggcagctccggtgtcagtcagcttcagccagagcctgctgcctaatctcagctgggcctggtgttgtagctccagagtctctctgtagtttggggtgtggctggccaacatggcactggttttccagctgttggggagaaaggccccgcagggcagtttgggaggagctttcctataaagacccccagaaattctgaaggagtagagcactctagattagggtttcatcctgagcgttttatgtttctgctatggaatgaacctgtcatataacagttccctagatttgcccttgactttcattccaggaatatctcagcccaaaagaactgaaagcagaagggaaaataatgccctgggatatggtccttaggtgctttgttgtctaccttcctggctgagggggacccacgtactcaggttgactctgagtggtcatagacatcctggagttccttgagttcctgttcatctcccatgctttttctggttctgccaaactcaacatgactaaatacagaacttctatacatctctgctcactgctttctaaaactcctctccttaaacttagtagagagtgctttgccccaggatgcctctgttccagagctctccttgacccttcctgctggggtcttgactgaggcttcagtcaagttggagacttgctggcttcggtcaagcacaactctgcacacgggcctgtagtaaatgctcttgatgcttcctaaattcttccaacaaacactgagcaaggacatgtggagggatgcagaaaataattgagccagggtctggcccttaaggagggagtacctgagagcttgtttgtctgaagcaccttcacgataaagcaagtggcattagaagggcctgaactttccccatccctgacttccctgcctaggggaagtccatgaccgtggatgggtctgtcatgggttttgatcttcagaattttcttagcctggtgctgggttccaggaggaggaggtgttgggtcagaggcatgtcacccccctcatccttgacccacttttagcagaccccttccactgtgtttcctttatctgcaggtgggtgcgggaatttctgaatgatgaaaacaaaggcctggatgtactggtggattacctgtcctttgcccagtgttctgtcatgtgagtaccaccccggggctgaagttggggaccagttgggggaggacatagttccattctactttgataaggaagggtgagagttcaacaatgaagatggaaatgggaatcctggacaggaaggag

SEQ ID NO: 9470 - DNA, 2300 bp, Homo sapien
ttgtcatgaatgaggactgtgtgaaaatgaatgtggatactggtcttgtgtcatttaggccacttggataaaaaatgaaaaggatccagtccaccttcagaaaggaaaaaatggctcttcctgtactaagggacaatgtaaccccttagagctagtaataaccaatccccttgatcctcgctggaaaaaaaggggagcgtgtgaccttaggaatcgacagggctggactggatcgtcgagtaaatatcttagttcgaggagaagtctgtggaaaatttaaccttaccaattgctgcctgcacatagatgatcagaggcaagtagtcgaagatatagttaaagacatgacgaaactggcacatgtgcctgtacaagtgtgacacggatttgaccctgaagctatgtttaaaaatggttcccagtgctaggaggatttaaaactcttataataaaaattatagtagtaatagcctgcttactgatcccttatttactatctgtactcattcaaatggtaaaaggtttcatcactactctagttcaccagaatgcttcagcacaagtgtactacataaatcactatcgatctgtcatgcaggaagacataggtagtgaagatgaaggtgagaactcccactaataaaatgagtgagagtctcaaagtgggggaataagggaggagaccacccctcatattgtcttatgcccaatttctgcctccaaagaaagaagtagtaaaaactaaaaggcagaaatgaaatccacaagcagacagccaggcaccacaccctgggcctcgtagttaaagatcgacccctgacctaatcggttatgttatctatagattacagacattgtatagaaaagcactgtgaaaatccctgtcctgttctgatctaattaccggtgcatgcttgctcaatcgatcactaccctctcaagcggatccctttagagttgtgaggccttaaaagggacaggaattgctcactcagggagctcagctcttgagacaggagtcttggccgatgctcctggcggaataaaccgcttcctgctttaactcggtgtctgaggggttttgtctgcggcttgtcctgctacactacagcaaaaattaggttgtattatagaaaattaacttttttggtttttttgagacggggtctcgctctgtctcccaggctggagtgcagtggcaccatctcggctcactgcaaccttcacctccagggtcaagcaattctcctgcctcagcctcccgagtagttgggattacaggcacacgccaccacgcccagctaattttttaaatttttaatagagatggggttttaccatgttagccaggctggtctcaaactcctggcctcaagtgatctgcccacctcagcctcccaaagtgctgggattacagacgtaagccaccacgcccagccgaaaattaacttctattaattgcatacctgggtttgcctactgagaatcataccctggatatttgtattctttactgaaaagaactgttctatctttccagaaagtggtttcctaaattctggttttcctcctggaatcctgctatttccttctcgcatactctagagaaatcgaagtgttttcaaaggtgctctgaagcttacgctccactagtttcacagtaaatcgccccttgcgagggcgctttttttttttttttaatgtgttctctgaatcgctttccccctttaacactgcatgacaagactaaagccagaatcccaagactgcagcgctaccccttcacaagccgtcgggctgtcccgggcggggccggcccattttcactttctccactagaggcagcagcgcaccgtgaccctggcttactacggtaagaaagcggagaccttttgcttcgaggcggttggtggccagtagtcttgatcgacaagctcaggcctctgaactaagcagccgctgtttatgcacgtacagccaatggaaaggcaggagtgcggccaacggccaatgaggactggtcttaagcggaccacagggcggggtttccctcgagaggcgaacgccgggtaaaagatcgggagcggaagtgggcgagtcagagcacatccggtgttagaagcgctggtaggccttggagaggcgggttaggaaggtacgtctgaacctagtactgggcgaactgggagtgagaaatggaaagggagttagcagttactgtctgagcaagagtggcagtagcttccttctgcggacagatggcaccctgaaggaacgaggccctgctcggagaccagact

SEQ ID NO: 9471 - DNA, 2300 bp, Homo sapien
cgaggagaagtctgtggaaaatttaaccttaccaattgctgcctgcacatagatgatcagaggcaagtagtcgaagatatagttaaagacatgacgaaactggcacatgtgcctgtacaagtgtgacacggatttgaccctgaagctatgtttaaaaatggttcccagtgctaggaggatttaaaactcttataataaaaattatagtagtaatagcctgcttactgatcccttatttactatctgtactcattcaaatggtaaaaggtttcatcactactctagttcaccagaatgcttcagcacaagtgtactacataaatcactatcgatctgtcatgcaggaagacataggtagtgaagatgaaggtgagaactcccactaataaaatgagtgagagtctcaaagtgggggaataagggaggagaccacccctcatattgtcttatgcccaatttctgcctccaaagaaagaagtagtaaaaactaaaaggcagaaatgaaatccacaagcagacagccaggcaccacaccctgggcctcgtagttaaagatcgacccctgacctaatcggttatgttatctatagattacagacattgtatagaaaagcactgtgaaaatccctgtcctgttctgatctaattaccggtgcatgcttgctcaatcgatcactaccctctcaagcggatccctttagagttgtgaggccttaaaagggacaggaattgctcactcagggagctcagctcttgagacaggagtcttggccgatgctcctggcggaataaaccgcttcctgctttaactcggtgtctgaggggttttgtctgcggcttgtcctgctacactacagcaaaaattaggttgtattatagaaaattaacttttttggtttttttgagacggggtctcgctctgtctcccaggctggagtgcagtggcaccatctcggctcactgcaaccttcacctccagggtcaagcaattctcctgcctcagcctcccgagtagttgggattacaggcacacgccaccacgcccagctaattttttaaatttttaatagagatggggttttaccatgttagccaggctggtctcaaactcctggcctcaagtgatctgcccacctcagcctcccaaagtgctgggattacagacgtaagccaccacgcccagccgaaaattaacttctattaattgcatacctgggtttgcctactgagaatcataccctggatatttgtattctttactgaaaagaactgttctatctttccagaaagtggtttcctaaattctggttttcctcctggaatcctgctatttccttctcgcatactctagagaaatcgaagtgttttcaaaggtgctctgaagcttacgctccactagtttcacagtaaatcgccccttgcgagggcgctttttttttttttttaatgtgttctctgaatcgctttccccctttaacactgcatgacaagactaaagccagaatcccaagactgcagcgctaccccttcacaagccgtcgggctgtcccgggcggggccggcccattttcactttctccactagaggcagcagcgcaccgtgaccctggcttactacggtaagaaagcggagaccttttgcttcgaggcggttggtggccagtagtcttgatcgacaagctcaggcctctgaactaagcagccgctgtttatgcacgtacagccaatggaaaggcaggagtgcggccaacggccaatgaggactggtcttaagcggaccacagggcggggtttccctcgagaggcgaacgccgggtaaaagatcgggagcggaagtgggcgagtcagagcacatccggtgttagaagcgctggtaggccttggagaggcgggttaggaaggtacgtctgaacctagtactgggcgaactgggagtgagaaatggaaagggagttagcagttactgtctgagcaagagtggcagtagcttccttctgcggacagatggcaccctgaaggaacgaggccctgctcggagaccagactcgggaaaacagggtgtggagggaagctagggaactagtgctgcgcgtgcgcaacagtgctgaagcgggggtggggcggaggcgagtctgcgggggttttggggggtgtcgaggcctctattctgccccagagcgctggcgaaggccccttctcagcccgccttttcctttctcccgctccttctcctctactaagtgtagacgcagggccccttggcctagcttcgatcgttcgaattcagagcacgtccttcc

SEQ ID NO: 9472 - DNA, 2300 bp, Homo sapien
tgctgttgtgaatactgagaaacttggctctgaaagttgcttcagtattattgtaagtgctgtctagggatgtcattaggggtgttaatgggaaaccttaaacaaagacactttccaggtgctgaattctgccatgctgtaagtgtgctctctagaggacatagtcatattcatcttggttatggaaggctgtggttggccttgtaacaacctgcaataattgcaccatctagatcaagagggcccagatccgtgtgactcagaggagagagcaacaaccttagtaggttctgcagcttctcactgtatctgtccttaagaacagaattaacaaaagttctgaggtgagtagtgatgttaatgagagaaggaaagaagaaaccagagaaagcaagccagccattgtgattgtttcatttgtgggagagagcctcaggaagcagatgatgtttatatctttccactggcccaggattccttaggaaatttgtttggggactgtaacttttattattacctagatgaattgttctgagtgttgggctgggtgctgattagagtgcttcattcagtaggtggcgtttcacacaactttatgtttgaatcccttcctccctgcccctccttttctggtagatttaaaatggatgggcattatggccctgataggagtttggaggatttatatttagaagagatgaaagttcttgactggatctttagtactgtagattgaacacgtttacttaggattgcatgtgaaataggggagggagcaaaacttaagaacttgactttatggtgttgatatgatctaacctggatatagttcagtttaaaaatgccctttttgacattgggacagttggcaaaaatctgaataaggtctgcagattagaaatagtattgcattagtattaatatcctgattttgatcattgctttcaggatatacacactgaagtgtttaggagcactgtgtctgtatggttagggaaaaaatatttttacatctgtctatatattgctatatagaaagaagatgaagcaaatgtgaaatattagcatttaggaaatctgggtgaaggttgtacaggaattctttgtactgttctaacctttctgtaggaaaggttctgaaactgtcaaaaaaataccccccaaaaaatcctcctttctgcataaattccttttttatggaggtaggaacctctctttttttaaaattgtgagtccttttcagttcagttcttaaatgtgttaggttaagaaaatttgatacgcatatatttaaaatgcaagtcttaatgccagacccagctttatagtttttgtttgttttgttaagactagtcaaagttttgttttttatctttgaggtgctgctagtgagataatttttttttttttttttttttttgagatggactcttgccctgttgcccaggctggagtgcagtggcgtgtcttggctcactgcagcctctgcctcccaggttcaagcaattcttctgtcttaggctcctgagtagctgggattacaggtgtgtgccaacacacccagctaatttttgtatttttagtagagacagggtttcaccatgttggccaggctggtctcgaactcctgacctcaggtgatccgcccacctcagcctctcagaagtgctgggattataggcctcagtgagccactatgcccagccaagggaattctttagcatcttgaaacaatgacataaaattgctttatgtgccaatgtctaggttcctttaactagattgttaattgagaatttcttttataaacttactgccttttaaagtggcaaatcacctgaaagaatagaaatcagatgatagtaacaaaatagtttgagggagaagaagatgcattcaattcctctgtcgtctttaagatggttgactatgattgcaaatatattgtaggacacataaaaataaaaatggttgtgttagggctgtagaattttaggcaagttttcatctttctgaacttacatgttgcttttttttttttttataagctgttcgtgtgattctgtatgacttaatgactctaacctttctttattctgcagagtggagactgctgcacggactctggaaccatgaacatatttgatcgaaagatcaactttgatgcgcttttaaaattttctcatatgtaagtgttttgaccttgactggttttgtactgcatttcttttcatatctctttgtcccttttctgcatttataacttttgtgtgtataagctaacaaattaacttggccag

SEQ ID NO: 9473 - DNA, 2300 bp, Homo sapien
ggacaggcctccctcccctgggacaaacacagaggtcagagttttaggtggtcagccctgctaatccaaatggctgtggggagtaggggctggggcaaccaagaaaaggatgtagggtgcctgcccaaccccaagtgtgccaggaagaagaactggggtaaccagtgttgagcaacccttgaggaagcggaaccatcatatcccagttgctgttaattccttttggggacacagacacaaccaggccagctctgttcctggcattccctgttaagccagcccagggcctgggcctggaactggatcccagctgtgtgtggtctcctcctcatgccatcatctctcccctaaggtatgttgggagcagcagctgaggccaggaggcccaggccccccagccgccccacccccagcgctggatgccctatccccgttccttcggaagaaggcccagattctggaggtgctgagagccctggaagagactgaccccttgcttctctgctcacctgccaccccctggcggcctccaggccaggggcctggctccccagagcccatcaacggcgagctgtgtggcccgcctcagcctgaaccctcaccctgggcgccctgcctgctgctaggccctggcaacctgggaggcctgctgcactgggagcgcctcttggggggtctgggaggggaagaggacactgggcggccctggggtcctagcaggggacctcctcaggcccagggcaccagctctggcccaaactgtgccccaggcagcagctcctcctcctcttctgatgaggcaggtgaccccaatgaggcacccagccccgacaccctgctcggtgccctggcccgcagacagttgaacctgggccagctccttgaggacacagagtcttacctacaggccttcctggccggggctgcaggcccactcaatggggaccacccaggtcctgggcagtcatcctccccagaccaggcgcccccacagctgtctaagtccaaaggcctccccaagtcagcttggggtgggggtaccccagaggcccacaggccaggcttcggtgctacctcagagggccaggggcccctccccttccttagcatgttcatgggtgctggggatgccccactgggctctcggcctggccacccccattcctcatctcaggtgaaaagcaagctccaaattggccccccttctcctggggaagctcagggaccccttctgccctctccagctaggggtctcaagtttctaaagctgcctccaacctcggagaagagccccagcccaggaggcccgcagctcagtccccagctcccccggaactcgcgaatcccctgtcggaacagtggctcagacggcagcccctccccactgttggcccgaaggggtctgggtggaggagagctgtccccagagggggcgcaaggcctgcccaccagcccttcaccctgctacacaaccccagactccacacagctcagacccccgcagtcagccttgtccaccacgctgtccccaggcccagtggtgtctccctgctatgagaacattctggacctttctcggagcacctttagggggccttccccagagccacctccatccccactgcaggtgcccacctacccacagctaactctggaggtaccacaggcccctgaggtcctcagaagccctggagtaccccccagtccttgcctcccagaatcgtacccctatgggagcccccaagagaagagtttggacaaggcaggctcggagtctccccatcccggccgcaggaccccaggcaactcatccaagaagcccagccaggggtcaggacggcgacctggggatcctggcagcacacctctgcgggacagactggcggccctggggaagctgaagacaggccccgagggggccctgggctcagagaagaatggggtgccagccaggcctggcaccgaaaagacccggggacctgggaagtcaggggagagtgctggagacatggtgccctccatccacaggccactggagcagctagaagccaagggggggatacggggggcagtggccttgggcacaaacagcctgaagcagcaggaacctggacttatgggggatcccggggcccgagtctactcctctcactccatgggggcccgggtggacctggagcctgtctcaccaaggagctgcctcaccaaagtggagctggccaagagccggctggcaggggccctgtgcccccaggtaccccgtacccctgccaaagtgccaacctcagccccaagcctgg

SEQ ID NO: 9474 - DNA, 2300 bp, Homo sapien
gagacagggtttaaaggctgtgaagaatgagggagagggaggagttaaagctgacttatatctagccacaagatgcccaggagaaggaaattacattctcagggactgagaatgattaaatcctgccttttcagtcctcagagtagatgttccacatgagaccaggtaggggagacagaaatattataactccctgccatctctttcctaagaccatctaagaccatttatctcagctgtccctatgatcctcagatcccaggtggtcagaacaggaagagacctttgcggtaaccctctttgtgagaggagaggaagccccacagaaaagtaaagcaggcctggagctaagaaaggcacccagagttagactggctgtggccctctgggctcgggacattcatgtttctccaaagccctctgaccagtctcactctgagaccctagatctgcctgtgctgtggtctcctgaggcttctcttaccggtgggtggggcagcagcaagagctgcatttggggctgggagtctgggagtcctccgtgaaggagcggactcagaggggaaggcctggctttgcgagggagtagggagctggggtcagacagctactgtgctaactctgcctctccctctgcagatcccactcactccactccagccaccatcagagccaccagcctccccctccctgagctccactgagggaccggctgccccgctgcctctggggcactgtgctgggcagagagaggtaggagggctaggtattgtggtcagtactccactgatgtttcctagcaaatatctggagaagggctgtttcccagtgctcagacgtttgtccaggctggaagtgtgagcagccgaatgccaaaaaaagcagatccccaatcctagccactggccctgtgagcaaatgcattagtaatgcattaagaggcatggttaacacttactgagctcttactgcatgccaggcactgtgtagaacaccctggatctcatttgtcttctttagtgaggttaacgtaataatcatcccattttacagatgacacaatgaagcagcttagagctcaaataacttgaaggccctatcaataggcagaactggaacttgagcctacacaggctgactccagagcctatgggttgcccactataccacactatgctacacctgagaaagggctgggcatggcgtcacccccaacccctttctgctggggatgaggtcagcggggtcagctgtgttccctgaggaggcctgggtttgcctatagtgactgacttaggacttggccacatcacactcccttctggagtctgtgtgttctttctgggcccgagaaatggacaggcctccctcccctgggacaaacacagaggtcagagttttaggtggtcagccctgctaatccaaatggctgtggggagtaggggctggggcaaccaagaaaaggatgtagggtgcctgcccaaccccaagtgtgccaggaagaagaactggggtaaccagtgttgagcaacccttgaggaagcggaaccatcatatcccagttgctgttaattccttttggggacacagacacaaccaggccagctctgttcctggcattccctgttaagccagcccagggcctgggcctggaactggatcccagctgtgtgtggtctcctcctcatgccatcatctctcccctaaggtatgttgggagcagcagctgaggccaggaggcccaggccccccagccgccccacccccagcgctggatgccctatccccgttccttcggaagaaggcccagattctggaggtgctgagagccctggaagagactgaccccttgcttctctgctcacctgccaccccctggcggcctccaggccaggggcctggctccccagagcccatcaacggcgagctgtgtggcccgcctcagcctgaaccctcaccctgggcgccctgcctgctgctaggccctggcaacctgggaggcctgctgcactgggagcgcctcttggggggtctgggaggggaagaggacactgggcggccctggggtcctagcaggggacctcctcaggcccagggcaccagctctggcccaaactgtgccccaggcagcagctcctcctcctcttctgatgaggcaggtgaccccaatgaggcacccagccccgacaccctgctcggtgccctggcccgcagacagttgaacctgggccagctccttgaggacacagagtcttacctacaggccttcctggccggggctgcaggcccactcaatgggg

SEQ ID NO: 9475 - DNA, 2300 bp, Homo sapien
ttgagggacacgctggggaccgatgggcaggttgctgcaggcagtgggaggacagtggcccagagaccagagttgtgggtgagggtggcactggtcagatgctggaggtgacctgagacattctgggtttcaccccatttgagtgtgggaaggaagataattcttaaatatttttcattttttttccaggcctgtatatttctaagtctatcaaacgtgataatgttatgagcaaaccaagttaaatatgatacatttttatgatgttaaaataaaaaacttcagattattatacagtattaacaataagcattagaggccaggcacagtgactcgtgcctctcatcccagccacttgggaggctaaggcaggagatcacttgagcccaggaggccaaggatgcagtgagctatgaacgtgccactgaactccagcctgggcagtgaggtgagaccctgtctctttaaaaaataaaaaaatcagtattaaacaggtcttccttttcctccaagtgttttcagaagtccccttcccactgttgtgtacacacacacacacacacacacacacacgaagaagcattctctcttttcactgtaatcccagcccccaaacatccagctgcttctctttctggggtatagaagagaagagggaaggcaaggctggccctggggctggagggccggctgggaggagttggagaggaggcctctgagggcagggtgggcagagcagcattctgagatcttcaggtgcccctatagcggagacccctgggtaagggccctgggactcggagtcggcctctgtgtgaacggacaaggtagcagcaggctccacaacaaccccatagctttgtactgtgcctctgtcagcaggtgatgatatgaaaagtctccatttatggaattcacgccagacactctacatatattatctcattttgtcctccaacaaccctttgggctaagtgttcttatccctgttttacaagtgagaacaagagaaaagagattctttagtgtcagatttctagcccaagtttctagcctccagggagccttagggctgtacggagcttaaatgtctgttttactgtggagcttacagtgaagcttgggtgtgtgcagaggagtgggaaaatctaggcctgtctggtgtgctttgtgaagtagtcatgtgacttgggcaatatcctctgccccagagcctgcctcctcccgcaggcgggtgctccccttccagggttgttaggagaactggatgggatggtgtggaagaaagcgcctgtgctattcatcacactgggtaaacacagtgtgtgcaagtgtaactttctgttcctcggtttcctcatctgaaacacaggcactgataatagcatttaacattgttgtggttaactgttgagcacgaggcaagacaatgtatgttgtagaaccgggttgtaaagtaccaggtgtgacttttcagtctcctctgttgtctgatgattcctggctgagagatggggacctttgcactggctctttctgctgtcccaaatgctttcccattccaggatttcatctggacttcattcaggtctctgcttaattgtcatctctcagtgccttatcacaacccaacgctgtacattgtcggcctcgtccaatagagtggaagcatcatagcggctgggctgtctctggctgttcgtcccgtgtcccagtgcctggcacatagcaggagcccagtaagtgcgtggctgacgtctttttttttttctccacaggcaaggtgaccgttctggatgctagagtgagtgtgcccacctgcgtaagggggcagagacaggtgaggggctttggggcctgtgcatgctgggggtgggagaggcacccctgggctccactgtggaggataaggaagcaagcactcagatggctcgatggtgagctgctgaggacacctctctcctatagtccaaaagctccaagcctttttatttttgttttgaaacggtcttgctttgttgcccaggcttgagcacagtggcgatcatagctcactgcagcctcgaactctagggctcaagggatcctcccacttctttttttttcttttggtagatgcggtctcagtatgttgcccaggctgggcttgaactcctagccgtaagccatcctcccaccttggcctcccaaagtgctgaggtcacaaggcataagccaccacgcccaaccccatttttcttttgtgggggcttcaatggcacaaggggtagtcagtgatggaccaagcttccaccctttta

SEQ ID NO: 9476 - DNA, 2300 bp, Homo sapien
ggtctactctcaggcttagaataagggaatctgttctctctacccagggttctaatcctaactaattgcaatttaaagcacacccaacactttagctccctctaaatggaaccattctgccagaggacctttctcccctatagattcacccatcagtggaaccattcaatgtcaaaaagtggaagggaatattagagctatctagtccaactactgacatttaaagatggggaaactgagccccagagagcaaactgtcttggccaaggtcatacagcaagctaggaaaagtagggaccagagcttctgactctgtctttattgatacccgcttgctccccaaacacttaggtcttcaccggcctatcatgaagatccttcttccctgccaaccacagcacctgcccctccaggtcctcactctcttcgtgagggccagagctggagaaagatgctggagggacaaagccacctcatgcacagaccatagactttgaaaacaagcttgaacatgggaatatctccccggaaaggaatacacacggtttctttgggataggaaacccactaatcccaggttgtttttaggaagatggggggaccaatttgagaagtgaattttcctatcacacaaggagtctcagagagccagatggcgtaatgtctgcaagggagggtctgcaacaaggcaaatgggctatgttcattttccccgaaagtactgaccacaaaacggtaaggcattgacactctttctactgctccccaggccacccctgcccgggccacttcctctggctgaccattgtgcttaagaaggaggacccatgacagacgcggagaagtgggagggagggattgcctctacagccagagaactccttagcccaagacccccagctcctcagcaaggcaggcctttaagaagtagcagctggacagactaagtggactcagctgatccagccctgggatgcctggaaaaccaggcctgtgggaggtgagggccctctgtgcccttggggccgtgccaggactggagataacgcgggaccttgggcccaggacagggagaggggagctaggatccgggcagccgctttcttagttgggctaagccagggaagcgtcgggcacagatgaattctctgcattcttctggcaccgcagccagcacccagagggccttttctgcagacgctgccctgtccctgctccctgcccaaccaacccttctccctcccttagcttctcttcagcgtgcagcccaccaggtccttcctccttcccgcagcccctcaaagcctttgaaggggctgttctctaggagacccggtctttccgcctctccccgccttccccaggccctaccgccccaggccacggggaatgggaaggagtgcgaaagggagccccaggctcgtctccgcgcctgcgctttggggagagagcccctccccccgcaataacccggcaccgctaagcggcacccggacggtgggatgcgggttgggtggggtgagcagctggggcaaggtcagtgctttcaaagagggaggggagcccggcccccggaacatcccccactcccgaaagtttcccttccggggccacggagtgtgcgcgaggatggcgcggggggcgggagggggtggggtgggggtgcacagagtcgcagccggacccccgaggagggtgcggctggagggagggacggaggggcgggcagcagggtttgggcaggaagccgcgacgccctctccgactctgtactgccacgagagccttaccctccacaccccactccccccggcccggagctacagatcgcccccccgcactcgccgccctttcaatcccaagtagacccagaactcaccgaaatcaggtgttgagctgggccagggcaggccggatccgccaggtccatggccgcggcttgggggcggggggcagagaaaggggggtgccggagccgcctcctgatgtcaaggctttaaaggggccggggagccccgcccctggccctgaccccgcctccctcctccctagcagccaatccacgttcagcctggatgcgcgcccctcccagccccctccagatgttcccaggacgcgagctaagtctgcccggccggcgcgcgccgcttccgctttggtgggaaggacctcccttcccccttatagaaacactttctccaggccgggccgggcttggtaaacctcagccgtgcctgggtagaggacgccgggctgggccgagcgggggtggaatgagggcgtctagaacagagaaaact

SEQ ID NO: 9477 - DNA, 2300 bp, Homo sapien
gagcgagctcttaggtgctgctacagctatttaaggtgctggggctggtattgtcaagtattgtcaagacacctgtgctgttcaggctctgaaaagtggtcataggttagaaaagttaccagagtggatcaaattaaaacacctctttatgaggtcacctgtcaggcattttagattaccagtaatgttacgagggcctatctttgcttctggaggaaccccagggtcaggagttcttgccattcactgtcctggaagcaaggtgattccagctccttgaaaattgttaattatttgtgctagcttcatctagtgacaaaaagaggtaagttcagctcagctcaccaaaatttgtcaaaacggtgcagctttttctccttttctgtaattgtgcagaatactgtggtttactaaattccagagtgacttttattaacttgtgtcctcaaataagtgaaactagagaaacagcaggccagatagagatgaaaatataaaggctgggcgtggtggctctcgcctgtaatcccaacactttgggaggccgaggtgggcagatcacgaggtcaggagttcgagaccagcctggccaacatagtgaaaccccgtctctactaaaaaatacaaaaacttagccaggaatggtggcgggtgcctgtaattccagctacttgggaggctgaggcaggagaatcacttgaacctgggaggcaaaggttgcagtgagccgagatcatgtcattgcactccagcccaggcaatagtgtgagactctatctcaaaaaaaggagaaaagaaaaagaaaatataaagtaaaaactgagaggaaaacagcgcttattttaactcctgatggtactgtttgcaggagtcatgctccagtgccttataagaagtttaccgaactgccagcctcatggagcaggatacccctttaagatgggtgggccaggtgcaggggtggggttgggggtcctgcacaactctgctgatgcttggttgaccctgacggatattctgggccatcctggcttttgactggaacctgctacctaggttgacccttcagttcctctccttatcagctctgttatttccaatctctgagtcacatcttgcccaactccattccactatgtctgcttcagttggcatcctttctcccttccatttaaagtttccccaaacagatctggccttattgtattctctattgagttttcattcaacaacatttgttgagcatctttgtgccaggcccatgttaagtataggagactcaaggctgagaataacacaccgttgcaagcacatcctctggatccaaactccctgggttcgaatcctagtaccatcatttctaactgtgggatcttggacaagttactttgttttactccagtgtcctcatctatataaaaagaataataatacggtcattttctcacggggtgagaggattgactaaggagcttacaagggtgtctggtgcctggtaagcactctttaagtgctggctcttaaggcacggtccttgcctctcaaggagctcatggtctacagttgcccctgggggacagggctgagtcggctggcttcgcaagtgacctgcacctcctggctaccctttcctgaaccgggtggaagtttttgagtcacagattcaatgtatgaccccagacaagtaagttctctcggtctcactttttgcatttataaagaaaggaaattggactaaaattgatttccaagatcccaacaaactagtatacttgttctgggtcaagtagcccaagtttcaaactatgtcagcttggccaagacacttagccctcagagtttgtttcatccctgtaaaacgtggatgatattgctaatcccctcccagtgttgtgatgagggttcaataatacaaggcaagccccaggcgctcgccggctccaggtatacagcgagaggaaatcaggacagcttttctgattcaccgcagaattctagccacccgccctagccgttcgacgcacgcgcgctggcaccgccaccgcccacgccgacagcaggttcccggcttccggttccgccacggcccagaggctgtgttgaggctaatggcggtgcccacggaactggatggagggagtgttaaggagaccgcagcggaagaggaatcgcgagttctggcacctggcgccgccccgttcggaaattttcctcattattctcgcttccaccctccggagcaacggctccgcctcctgcccccggagctgcttcgacagctctttcctgagagtcccgag

SEQ ID NO: 9478 - DNA, 2300 bp, Homo sapien
gaacagatccccaagaggtgtggcagggggcagggccaggcccacggaggtacaatcagagcaaggcagaggacgcacaggctatgtggttgaattcagcactgcccatcagtcttctgtgagtcacaggggagggggaactgcagtgccaattatctcattaggagatcaacactccaaaaggccctggtcgggatcatcctgcagattatagaaacaacaatggagagcatggggccagttcccctggctccatcccctgccgtgttcatctgcagctcccctggggcccatggggcaggggaatgttgatgagaggggctttgggactcattcccttacctcctctcagtttcaggtagacgaaggccctcggaggcccagcaccataactaaatccccttaccctcccattagcttgaactcagaaacatgctgacctcgtcctgaccctcaggcctgcggactctgtggtcccctagctccagcctatcccataactagcacccagcaccccctggtctctcgtctgcccatcctgccctctcccaccgtagcctttggggaattctcagcacagtgggggccactcccagccctgcagctgagcagagctggacacagcacactgcatgcaggtgtccctggcacgtgtgtcgcctcaaggagactgtgcaagagtggggtgaagagaagtgtaggaggaggccccagacccccagggggaccctcccctcaactcccaccaacctgagctttggaagcgctgtgagaatccagcttcgagaatccgatttctctcccagaaacatcagcccctctcttgagattctgccatctttgagggcaggccgcccagtggaaggggcagcacctgagggggtggcaggcgaggcgtctcagggctctggtccagctttgaggaacaggcccctcctaggcctcacccatgtcagccttagtacattctcagggagccttgggtttttggtcttacccctaccccatatccctcactggatgccagacccaaatatgccagtagaagtgggtgagccagctgaacagccctgacctcagagtggccgaatcctcccattccccctagtgccctctctttgggtgcttttctgtagaaactcatggaaagtcgcacaggaagcacgagggtcgggcggggctggcgtgatggggcagggaatgaggtgggggcacatgcctgcagctggcttctagccgcagctgagactccagggcccatggaacttggagcaggttgccccatctcagagttggttcttccttggggaagctaaggtctctgagccccctaaatcaggagcccaagtcccagagtcctcgggaaggaatgaggcataggacattagaaattaggtgatgggcccaatgggaatagacctcttcacttcctgcccagcctggccaaattgaggaccttgggagccactgacagttgctaagaaacatcacagttgttgtgctttaaggaagattagtgagaagctgagtggacagaccagaggctgggagaccagttaggaggtcactgcagtgtcccagagccggggtgggtgggggcagggagactgtgcatggtcagtactggatgctgcaagcctaatggcatttggatgagcagagctgggataggaagatgctcagtagggatgctggacctccagttccgatgttgaccactgactatggagagacataatacagctatctgtcctcagtctctggaaggaaagcagggctgagacctggagccctcagagctggcagggaccagcctgaggcagctgctgctaagctgagcatgcgctgaagccaagacagcacatccagagagacacacacacacacacacactcacattcacgcatatacacacatgcatatccatatacatacactcacataaactcacatatacacacatagccacatgcacaaacacatatacatacacactcatatacacacatacccacatgcgcacacacacatgcacacatacacacacacatatacacgcatgtacacacatggactcacatgcatacacatgcacatatagacacgcacacacatgcactcacagatacacatgcatatatatacacacatgcacatacactcacatgcacacacatacacatgcacatatacacatgcacagatacacacatgcacacacacgcatgcatacatacacacgcacatatacacatgcacatacacactcatacacacacatacacatgcatacacatgca

SEQ ID NO: 9479 - DNA, 2300 bp, Homo sapien
tttcacaggcgagaaaaaggagcaaggataggtggctattggcttgccccaggcccacaggagcgcagggcccaggggccctgttagaagcgggcagcacaggcgagacttccagaccttcccctctaccagggatgatgaaatagatgatgagaggggaggtggagatggagacagaaatcagggccgcatccaaagagggaggaggaaaaggcagaggcgcagctggagctgcagagaggtgcagagacagtggagatgaggccctgatgcccggctctggtttcacgcgggcagcgtcagctggtcggtgtcacggagttcccgcgtcctccgcccgctcagcccccgcggacccatccactggggttgctccgcagcgcgactctctctcatcccgggggagggctaagggcggcggtggggggcggggtgggggggaagcggcgggagggggcggtgcgccgccgccttaccccgggctcgcgaatccgcagcgtcctccgcagcatcttcccaggcccggccctctcctccccccgcgccgatggtacgcgccggctcgcctggcccggctgcagtggatgttgctagaacccacgcggaggaaggaagagacgcaggcaggctgcggttacccaagcggccacccgggcctcagggaccccttccccgagagacggcaccatgacccagggaaaggtaccggcatctccccagcctgcaccatcctccatcctccggctcccggctccctgtcatcctcagcaagccctctggaccacgaaagcatcctcccctggccctagtttgaaggtcctccgtggtccttgctgaagtcagaggaccgaaaggccggtgtcaaggaatggaccgaggcctcttcctgcccgcaggcgcgcctctcctcccctgtcaccctgccacccctgctttggcattacagcattacaaggctcctcacagatacccaggccccccgtgaggagtcagcccgggcgtctggtgtgactgtatgtgtgtgcatgggtatgtgtgtgccagggtgagccctgaggggcagtgcctatcgggcaaccccctctggcccaaccctccagtcccaaacccaaccactttatgctcatctttcccaccctccacggaaacaacccccaccctactccctgccattgttccacatctgggcgtcttggctccatccctgtgcttggggcttgctatgacaactctgcatcaagatgctctaattgttgttttggttttggccaggcatggatgggtccggatgaagcatctcttctccagttttaggcctgaattgtaggggaggggctggggcagagactcggctggcctagtaggcttatgtaacatcaatagcctgtggaattatacaaccactagggcctggggctaagggggagggtactcgggccctctgtttgggttgctaaggattgggcagagaaaacaggggaaggacctcccctacactcccccttcttctctttgagaggagcttcagagccaatgacatccttccctggaccctcagaccctcctctccctgtatgcaagctctttgggcctcaaatgatgtcactgggtgataccacctcccgccattggtcacacctcacttgggagtgccgtatgtgtgtcgggggcctgggcattagggtccaggaggctctggggggcggagtggcagggtggaggctgaactcgatttaggtggacatgatccttcagatccgggtgatgaggggggctggggagtgggaggcagtgggaggcctggggagtgttcagttccgtaaacatggagaactcaccccttctgctgagtctccttccacctccaccctgcctccaccaggccctttagtggcgctgttcccttcctggtgtgagggggacctctgcctcctctgccccttgtccccagctcacgcacaggcttgctgggggatggagaagaccgctccagttcagtggtccttgggcctggatggaaccagaagtcttctggtgcgtgcctgtctccaggctgcctcagccagatgctccctgcaaagaaggaagtccgcagtcttcctcagtggccctttaggtctaacacagtcttctgggaaccagacctaaatcccattttctgagagccgggctttttgttgctgtttcaatttcacaccaccccctccaccccagtctttccttctctggctgcctcattcaggccttcccagctcaaatcctctcaccaaagctaaacatgtccacgggtggggggcagg

SEQ ID NO: 9480 - DNA, 2300 bp, Homo sapien
ctttgtataagatcaggaagaccacccctgagataatgtctgagcagagtagtgaagttagtgagggagggagccacgcaatgatctgtagaatttccaaacaagacacagccagtgcaaagggcctcagctaagcgcatgctcagcccagtctaaggaatggccaagaggcctgtgtggctggagcagagtgaatgcgagagaaggaacaggagtgattcacaaacatgaaagtgctaaggctgatgaaagtcaggctctgcgtagtgccatgtctgggaaatattactagctacaattgatggagtgcattccacacacctggcactgcattcagtccagctcacaccaaaactgctacaggagcttagagtgtaacagggagtcagtcaaagaaacttcacagcgccacgtgacaggcgttacatcagggtgctagggaactacagaagaggagcatctaaccccaactagggggggaaggaggcttcctggaggaggtggcattcaagctgtcaagcaggagaaggaaaacacttccaggatgcagatgcagagaaggagggaaggccagaacctggaccagctggtcagagctccaggtgcagtgctggggaccagggcacagcttgctggaagaagagctcgggtttgtagggttgagagagcctctggacacggaggcccaggcttaagtgtgtttgtgcaaaattggtggttatggagtgggggacaaagggcaaaaaggggtgggataaagactttgataattaggccaggcacggtggctcacacctgtaatcccagcactttgggaggctgaggagggtggatcacttgaggtcaggagttggagaccagcctggccaacatggtgaaaccctgtctctactaaaaatacaaaattagccgggcgtggtggtgcgcgcctgtaatcccagctactcaggaggctgaggcaggagaatcacttgaacccggaagacagaggttgcagtgagccaagattgtgccactgcactccagcctgagcaacagaacaagattttctctgtaaaaaaaaaaaaaaaaaaaaaaaaaaagactttgataatttgtctgcctacctgggccctgctttctcagggactttaggtgggtccctgggcagtgagagggaagcagaaggtaagtggccacccccacctgtcccaggtcttagtttctcgtcccatcctagcaggttcagatacttcttttaggcagatttgtgggtgctcgctctggggcagcccaggacattctggtaggagactcctcagttaataatacctcacatacttccagcacttcttggtcttttatgtgcttttacggccataacctgtgcgtctgacagtcaatctaggatggacagagctctgttctaagcctctttttcgtaggagctgcagctcagagaggttaagggccttgccaaggccacgcggccagtgggtgactaaattgggacttgatcccagctcttgagattgcaaaccccatagtgacactgcagcagctacagaaaacggggcctgatgatggctgggtcccagtgacacgtctggggaagcggggagaacgagctctggcatgggaggaatggaaaaggggggaagatggagacggggtgatggaagctaagcgtggaggcaggaagagagctctggcaggggttgtagaggctttgagacagaactagcggtgtctccagaaagaccccgtgaaatgtcccagcagggctgaaagaaacagaagaggtgtcctcccaccccatgtctctgtgaaccaaggcagggagggacctactgtgtgcatttcacaggcgagaaaaaggagcaaggataggtggctattggcttgccccaggcccacaggagcgcagggcccaggggccctgttagaagcgggcagcacaggcgagacttccagaccttcccctctaccagggatgatgaaatagatgatgagaggggaggtggagatggagacagaaatcagggccgcatccaaagagggaggaggaaaaggcagaggcgcagctggagctgcagagaggtgcagagacagtggagatgaggccctgatgcccggctctggtttcacgcgggcagcgtcagctggtcggtgtcacggagttcccgcgtcctccgcccgctcagcccccgcggacccatccactggggttgctccgcagcgcgactctctctcatcccgggggagggctaagggcggcggtggggggcggggtgggggggaagcggcgggagggggcggtg

SEQ ID NO: 9481 - DNA, 2300 bp, Homo sapien
cgggaatattttcagggctgctctgaggggagcgaaggtctggccgcaggcattgcctctctcctccttccaggcccacgccatggcagtccctcccactccgcagtctgcttttgttgccagctctgtctggggcaagtgtgggttggcggtggggaggggcaaaggtgtgggcggaggcaacttctcattttacagatgtggaagcacaaggccaaagaggttgagtgactaacacgaggttacatgacacgttggggccgaggccggtgagaagaatgcatttgaccccgcgtaggcaccatcagctcaagagggtttcagcgacaacactgaggctgggagtcggggaggagttgggagggtctcagacctcctaggtgggtagaatcagagctatccaggcgcctctccccagattctcaccaataaccccctgacacacagacccgcacacccagcctgcaccactctctgcctcctcaccgtgcaagaaaagagagaacctgtgcttttgaggccagtgatgggggcgcagaggcaggggctagacaaggcccagctcacccacagtaagaaggttctcaggttgggccacaagaggtgaatgggccaggccagctcaggcatcaggctgcttgctccctcctgggtatagccgggcctcagctgtggcagcctttcacacccttcaaagcctgccatcaccctgcaggcccctggcccctacccttctcactgttcttcacaggggttcttcctgcctctctcatccccagcagccccacagcaaagaacctgacactcctgtgctgaccagccagaggctggttgcaaaacccctctctgctgcagtcctactcctgcctccccatgcccctcacactgtgcctctccagatatggtctccaaaacgcgggacaagaagccgaagcctcgggcaggcatcggcattctgagtcgccatgcttcccagctgcaggaattgctgggtcaggtgtgaaaccacatttctgtccctcctcatctctgtctcacctcccctgctccccacacctgggctttgctgggagttggggctgaggctggagcagtcctcactgagcacagaagagccaggccccaggcttgtcatcccagcctcacattccaaaactctcagccgcatcagctcactccttggtaggcctggcacaggccctctgcacgttagaataacacaaaaaaatcaagttttcaggtaactaaagttctaggccaggcttagcccctcccttgcagcaggccctcgaaaagtcagttctttccccagggtctcacgggttctgttgccatcgcatgtgccgctatgtgcatacatttccgtttctccaccagatggaaagtgccttaaagatatgggttgtgtatctcaagccttcctgctccatcccttgacctggtagagttcaatattgaagaatacagggtttggggtcagatcaatctgggtgccaattctgactctcccagttactagatgattgaccttaggtaaatctgagcctcagtttcctcatctttacaatgggtatccatgaactgatttacttattcaaacaatatttatgagggccaactccatgtcaaacactgatgtgtgtacaacagtgaccacaacagacacaaatcccggccctgtggggttacttcttagtggagactattggtgcctggcccagagagtgattgtgaaaactcagtgagatgacatttggacagggctcagcacatacgtcatatgtcagcctggcatacgacaggcctgacaagttagagccattattgtgaacatccattctgaaccacagaaccatttgctgagaatttactgtgtgccggcaccatgctaggtgctagggagacaaagacgtggaactctcatccacaccctcaaggaacttatagtcgaatgcacctaccgaatgtcaaatgccaccatcctcatcattgttcagaagcttataaccagcaccaacttgtattacatgcaacaaagaaccatgacattctagaatgtcaggtacaacagagacagctgtttgtcccccagtatccttcagacaaagccatatatgattgaaggttatcagtactgtgcttttggaggattcagaagaagttatatctgattgggagattgaaaaggattggcctgaaggagaggtggtttttgaactgcatcttaaagggtaggcttcaacagacaagagacagtgatgttgggggaggagaatgaggccctgcaggggaccagaatg

SEQ ID NO: 9482 - DNA, 2300 bp, Homo sapien
gttaagtgctgcataaatggcagcaattcttaccattatcaacccagtcaaacaagagtgaaggggcttgggaaggagccaaagccactcactagcaatggcaaccctccaggaatgggccggaccctcctctgtcttcctcatgtccactcaagctggaaacctctccctctctctcaccttctaccgccaggcagcccttcaccagatccccccttaaacagcccctgaatctgtgaattttatccaccttcaatgcccaacacaagcccaggccaccatcacctctcccataatggcagcggtagcttccgcgtgtctcttctctgtcctgcagccaggggggcttctaaaatggccaatctgggctggatgcggtggctcacacctgtaatctcagcactttgggaggctgaggcaggtggatcacttaaggtcaggagttccagaccagcttgggcaacatggtgaaaccctgtctctactaaaaatacaaaaattagctgggcatggtgtgcatgcctgcaatcctaggtactcgggaggctgagccacaagaattgcttgaacccaggaggcggaggttgaactgagctgagatcgtaccactgtacttcagctccagcatgggtgacagagtgagactgtctcaaaataaatgaataaataaattaattaattaattaaatggccaatctgagtgggtgcccaccccttcaacctcccttactctgtaacttcccaaagccctcccctgtccacaaggctggcatgatctgcctgatgccccaggtacttccccatcttacagcctttgcacaggtgttccctctgtttagaacactcatcccctcgccaaccccacctcatcactcggggctgctggaggcctcccccggacgtgctcctccacccatctgcattactgccctgttattcttccacaaggcagcttgggctttggctttgaggcactcgccatgtgtgattctgcactccagcatgtggctatttacttaagacctgcttccccctctagactgtgagctcctggagggcggggagggggtctcttgcttgcttctgctctcctagctcacgacatgactctcaggctgggctggaaacacttggttgaataaatgagttctggtccccacccaagcacacaaggagtgacccacactgctgccgggccaaactgcactgaaaaatggcattgctgtgtggacgtggccctgcccacgtcccgcaggcagagcaggaagggctgaggagccctggccaggcaaagggaggtcatggacacagcaccgacacctgcccacccctttccagtgacccagtcctgcctcccacagccgagcagtgctctgtcagtatggatggcctggacaagtagggtaatgcaagaggcctggcaagttgagggctctggcccctggccccgcctggctctccgctgttcccagctgtcttttcctcatcactccctccttggcccagacttatcctttcatgttattcctctggggatggtctgtctcctactggaggcttactcaaggaaatgaatttttagtggtggaatattgagcctgttatagtctcggccaagggtagacggctgggaagggggtccctcaaaccccacctcttagacagttgcctcctgtccctgtgaatacagctgctttgcctggatcagcctccaacctcactctgggctaggccaccttcttcctaggattcagctcaaagttggcgcctcatgttttccttcctccacgccttcatttgcacaccattctggtcccctgcagggcctcattctcctcccccaacatcactgtctcttgtctgttgaagcctaccctttaagatgcagttcaaaaaccacctctccttcaggccaatccttttcaatctcccaatcagatataacttcttctgaatcctccaaaagcacagtactgataaccttcaatcatatatggctttgtctgaaggatactgggggacaaacagctgtctctgttgtacctgacattctagaatgtcatggttctttgttgcatgtaatacaagttggtgctggttataagcttctgaacaatgatgaggatggtggcatttgacattcggtaggtgcattcgactataagttccttgagggtgtggatgagagttccacgtctttgtctccctagcacctagcatggtgccggcacacagtaaattctcagcaaatggttctgtggttcagaatggatgttcacaataatggctctaacttgtca

SEQ ID NO: 9483 - DNA, 2300 bp, Homo sapien
aacctgggaggtggaagttgcagtgagctgagccactgcactccagcagtggggaaggcatgttccctgggtgggggcagaggcacaccccagccagacccctctgagtccttgtctcttcctatgtgcagagtctggaggtgggccccagatgccctttatatgacaggggttggggtccccctctccgtcgatcttctcccggaggacccagaatgcctgaagttgggagggatggctgagggaagagtgccagggcaccaggtgtctatgtgtcaggccaggagttaggcactggaaatacacaggagaacaaaccccacaggaatccctgctcttttggaacatcacttctgtatgggtaatttttattctttcttcctccccttcctcttccgctttctcttcctcctccttcataatagcaggagtcacgagtccccatatatatatgtatatgatacattctcagttgcaaaataccttcccgttcattatcttactgcattctcaaaacaactttatggggtaggcatccacactcccattgtccagacaaggaaactgaggcgcagaatgtggctcggtagtgtggggtgtggcagaaagctccagaccaggctccagtcccagctcagccactaacctgctggagcaccctagataagtcactcccctccctgggcctatactcacccctcctgcccaccccacatccccatgatacaacacaaagcgctccactccagtctccaatctctcccagatttctgttcctgcgactgtgacttgcccagggacctgctggacaggagctagggcagggtgcagaagcccgtccttctgtccccactctgagcctgaccctgctgtgaatccccaggagagggagcgaggctggagggattagggaagggccagtgagtggggctggggaaacttctagacttgaacgcctccaggaccccagtggccacagcagcactgatagcaggaggcagcactgcccagatgctgagctgagtgggcaccaaggccagagagctgcttatcaggcatcacagccgccccgagcctgcacagctcactgccccacagaaatgtctttctcctgtggccagagcggccctgagctcctcagggtttctaggacctgtcacagcttctgggaccccaacaaatgagtgtgcaaagacctgttctcctcaaagtgcaaataatactgtaagtaagggctgatattcattgaccacctactgtggacgaggcgctgctctgagcacttgacatacattgtttcattcaatccaaaccccaatccactaggtcagttttattctccccattttacagagaaagacaagaaaggttaagtcacatagatggaacaggctgatgccagaatggacaccctcagcttcctcagccgccccaggttgactccatcaccaagggccagggtcccagtgcccccaggctctaggagctgctgtttggctggggctcccaggagaaggtgaagcttaatgatttatgggtgattagctgcaagaatgcaagcacagaagacacaaacctttatgccttggaaatttgtcacaagccaaccagttgttttccatccctgtgaagcaggaataattggaggtctgacagaagaacttcccagttaccagaaggagcagcactcatgttctctcttagttttgtgtgaggtgttgcccctgccttggtcaacagtttgagtcagagagatgggggccgggcacaatccccaccagacgttcccattcacaagaccctgtgggggctgggagacgccctggggcagcagccctggggtaaccaagggaacaaacacggaaaaccagggacgtcagtccttatctggagctcattaaatggggaacattagtcagctgtgaaggccaagatagggtgataggcctgtgggtgggctgggatggggcatgggggcagaggccgccatggaggagaagaggtattggcctcaacgactccacctccccgccacgtgcccagatccgggatggaaggaccctataaatgcccacaacccagcctccccagaggccttgagaaagagagcgatagagtgcgagagcgagtgcccggagcatcctggccctgagacagctgggccagccccgcagggctctgcagcatgtgggagctccgctccatagccttctccagggctgtgttcgcagagttcctggccacactcctcttcgtcttctttggcctcggctctgccctcaactggccacaggccctgc

SEQ ID NO: 9484 - DNA, 2300 bp, Homo sapien
agtctgggtttcttcatgggtagcttggaatcaaatcacacagtggaggccaattataatctctaactttgtagattatattctgaatctctaaaatggcaagaacaaggtcttggcctttatagtccctcattagttcaaatcttcaggtcggagcttcccctggcagccaagcctcttgtgagcacttgtgaatcctttcattctgagatgctggagtttgagacctgtggactatgaagacagtgcctggggagagaggatgagaaagcaagtgaaagggtgcgaactggaggcaagttcagcagcaaaggagcctggcccccaatggcctctggggtcatcagggtcattgtccagcccaagtcccaggcccagaagaaaatcctgcgtacaactggcatgtacagctggcatgattggctggggacaaagcgctgggacccatggaagaaaggacagactgacctccggccttaagaggagagacctgggggaggagctgctccagcaggaaatgccagagctgggcaggaacaatagcggggtttctttagcccttgttttctttggcatcttagctgccacagagcccagagcccgctcctccaagtccttagcattcctgcaggctcctcccctcagccctgcctgacaaactgacagaggaggcacctgttctctacttcctctgcaccctcccgctggactcttccccctagcttagcaccacactaaaccctcaaggggcttttaaaattaacagtcacaacgtaaggagactttactgagccttactctgtgccaggcactgtgctaagggcttctctaacacacatggggatgggagtctttaatgcagctcctctcccgggatcctgggggtgggtcctccccctctaagccctagagagccctccagcctcgttctccacatgcccgacctggagtgggtgggaagagggagagggtggtgtgcgaggaggcagcaggtcacaaaggggttacaagctcagagggaagggggatgggaactggaagaaagtgtcacccagaccaggggtagaagaacttgactttggggagactgagaaagaccacatgtaagagagagagacatggaaaatgaggtagaaacagacagaaacaaagaaaggcacaaaaattaagaggcagaggaaaggtgaaaatagccaggagacagaaactgcaggatgagagaaatgaatagagagagacagagagactaagacagcaaaaggcaggaaggaaaaacagaaaatgagaaggtgtgagagagagagagatggagaggtggagaacagagagactgaaatgagaaagagacctctcggagagagaccgagaggaagaggctggcagagggagagggtcagagaccaaagacagagacaaaaagagaaatagggttttgcaaagactgactgacagaaacagatttcgaggggagagagatcaagaccaagtgagggtttgaaggagacttaggggaggtggaggaagagaaggagagtcttagatccagggtgaggggcttctagcaggaagagggaagacgccaagaccgcgcttgggaggtcagtggtgcgtctctaccccccctgctcccccactccaactcccagagtctcaaggcctcacgtcacacccccgtcccgtcccgtcgacaaggggaaccccggcctgggagagggcgcctccggggatccgttgcctagtccaggtactgcccagctaccgggcgtcgaggattgcgaagcgtcggggcaggctggcacggtgcccacttttcccaaaacgccagccttccaagcccagaagctcgcccggcccaggccgggagcggcccacgtcggacggccggaccgccctgcaggacccagcccggccgcccgcccccgccgccggcggtgagggaggtgagcggcgccgacctgcgggacgagcatcactccgacccagccgggggtgaggcgggtcaggatgctccggtcgcaggaggaaaaggaggagctggaccaaaagcccgaagagaagaaaaggggaaggccgcgcacggagcgcggtaaaggccggcggagctagacgccccgaggtcggagtgaagcgccgggaccgagccccgtctcccagggagtccggggcgcacggcaccgaggagagcgcgggagccaacctgggcgcatcatgcgcagggcccgggacgctgggccggtctacaccgccgcctgggtcacgtggcccggacgggccggcggctgccccggccggggggcggg

SEQ ID NO: 9485 - DNA, 2300 bp, Homo sapien
acaatagcggggtttctttagcccttgttttctttggcatcttagctgccacagagcccagagcccgctcctccaagtccttagcattcctgcaggctcctcccctcagccctgcctgacaaactgacagaggaggcacctgttctctacttcctctgcaccctcccgctggactcttccccctagcttagcaccacactaaaccctcaaggggcttttaaaattaacagtcacaacgtaaggagactttactgagccttactctgtgccaggcactgtgctaagggcttctctaacacacatggggatgggagtctttaatgcagctcctctcccgggatcctgggggtgggtcctccccctctaagccctagagagccctccagcctcgttctccacatgcccgacctggagtgggtgggaagagggagagggtggtgtgcgaggaggcagcaggtcacaaaggggttacaagctcagagggaagggggatgggaactggaagaaagtgtcacccagaccaggggtagaagaacttgactttggggagactgagaaagaccacatgtaagagagagagacatggaaaatgaggtagaaacagacagaaacaaagaaaggcacaaaaattaagaggcagaggaaaggtgaaaatagccaggagacagaaactgcaggatgagagaaatgaatagagagagacagagagactaagacagcaaaaggcaggaaggaaaaacagaaaatgagaaggtgtgagagagagagagatggagaggtggagaacagagagactgaaatgagaaagagacctctcggagagagaccgagaggaagaggctggcagagggagagggtcagagaccaaagacagagacaaaaagagaaatagggttttgcaaagactgactgacagaaacagatttcgaggggagagagatcaagaccaagtgagggtttgaaggagacttaggggaggtggaggaagagaaggagagtcttagatccagggtgaggggcttctagcaggaagagggaagacgccaagaccgcgcttgggaggtcagtggtgcgtctctaccccccctgctcccccactccaactcccagagtctcaaggcctcacgtcacacccccgtcccgtcccgtcgacaaggggaaccccggcctgggagagggcgcctccggggatccgttgcctagtccaggtactgcccagctaccgggcgtcgaggattgcgaagcgtcggggcaggctggcacggtgcccacttttcccaaaacgccagccttccaagcccagaagctcgcccggcccaggccgggagcggcccacgtcggacggccggaccgccctgcaggacccagcccggccgcccgcccccgccgccggcggtgagggaggtgagcggcgccgacctgcgggacgagcatcactccgacccagccgggggtgaggcgggtcaggatgctccggtcgcaggaggaaaaggaggagctggaccaaaagcccgaagagaagaaaaggggaaggccgcgcacggagcgcggtaaaggccggcggagctagacgccccgaggtcggagtgaagcgccgggaccgagccccgtctcccagggagtccggggcgcacggcaccgaggagagcgcgggagccaacctgggcgcatcatgcgcagggcccgggacgctgggccggtctacaccgccgcctgggtcacgtggcccggacgggccggcggctgccccggccggggggcgggggtcgcgccggggttgcgctggacgacggagagcggcgggcccgcagcggcctggagcctcccaacccgcgcgccgcgctggcccccgagcgtaggagccgccccctgcccccccgcgccggccccgcgcccggccgcccgccccctatatagcgcgccccagcagggcccgcgccaggccgccagcctcggagtgggcgcgggacagtgcgcggcgccccgcagccaggcccccgcccccgccgcatccacctcctccgccgcctgcgacccaacgggcgccccccgccgcggcagctgccgccgggcccccgcggccaccatgaagaaggaggtgtgctccgtggccttcctcaaggccgtgttcgcagagttcttggccaccctcatcttcgtcttctttggcctgggctcggccctcaagtggccgtcggcgctgcctaccatcctgcagatcgcgctggcgtttggcctggccataggcacgctggcccaggccctgggacccgtgagcggcggccacatcaaccccgcca

SEQ ID NO: 9486 - DNA, 2300 bp, Homo sapien
aaagcccgaagagaagaaaaggggaaggccgcgcacggagcgcggtaaaggccggcggagctagacgccccgaggtcggagtgaagcgccgggaccgagccccgtctcccagggagtccggggcgcacggcaccgaggagagcgcgggagccaacctgggcgcatcatgcgcagggcccgggacgctgggccggtctacaccgccgcctgggtcacgtggcccggacgggccggcggctgccccggccggggggcgggggtcgcgccggggttgcgctggacgacggagagcggcgggcccgcagcggcctggagcctcccaacccgcgcgccgcgctggcccccgagcgtaggagccgccccctgcccccccgcgccggccccgcgcccggccgcccgccccctatatagcgcgccccagcagggcccgcgccaggccgccagcctcggagtgggcgcgggacagtgcgcggcgccccgcagccaggcccccgcccccgccgcatccacctcctccgccgcctgcgacccaacgggcgccccccgccgcggcagctgccgccgggcccccgcggccaccatgaagaaggaggtgtgctccgtggccttcctcaaggccgtgttcgcagagttcttggccaccctcatcttcgtcttctttggcctgggctcggccctcaagtggccgtcggcgctgcctaccatcctgcagatcgcgctggcgtttggcctggccataggcacgctggcccaggccctgggacccgtgagcggcggccacatcaaccccgccatcaccctggccctcttggtgggcaaccagatctcgctgctccgggctttcttctacgtggcggcccagctggtgggcgccattgccggggctggcatcctctacggtgtggcaccgctcaatgcccggggcaatctggccgtcaacgcggtgagtgccctggggggggggtgggagcctcgaccctggggtgggctcaggaccaggcctcttaccccacctggaaaaaaggggtgccgcagagtgggccagcccacacccttcaccaggaaggcaagagcctcccaaggccaggaaggcaactctccaggctgatatgtgctcccttcctgcccacctcctctccccctcccctcatgctggcccaccctggtctctctccaatgcctgctacccctcctctcctgccagaaacttctgcctcctcctgtctcacctttgagctccaccttcctcctgggcccctcacctctcccatcacctcagtggagcggttgagtagaaccaccagagaaaagcgggctgtcatcacggctttgggtgaccctggcctgtctgtgcttcattgttctcagcgcctccatggggatggttgtgtctgccacagcaggtgtcaaggggctcacatttagaaaccgtagataggaaccccctaatgtggggccagtgcagagcagtttctgttgagtattggttccctctttccccaacctgtgctcctcccctcaaccccgcacccctgcctccctcccacctcctgcagccccagagtcagcccccaaccccatgcaaactgggttcattaatcaaacacagaggaggatttgcttggccattgtcaagctgtgagtcagccgcactggagagacgggtttaaggctggcactggcatggggccaggcacgggcaggaggccgggatggggtgtgaggcaggcaaaccgggcagctgcccacaggatggagggtaaatgccagcttatgggggctgggggttgggcagagccattgataggcccgtgtccaggaaaagctaccctgacgctctgccctttggccacaggcctgagcttcaagcctgtgcaaactatgaaatgtacagtgtctttaacaaatggcttcgctggggcgatgtccacaggacttggcttccaggtgccaaggtgctctaagtgtccctggaggccaaaagccctactccccgagcccctggctatacagccagaaggtggccggggtcctaacccgctatccccttgcagctcaacaacaacacaacgcagggccaggccatggtggtggagctgattctgaccttccagctggcactctgcatcttcgcctccactgactcccgccgcaccagccctgtgggctccccagccctgtccattggcctgtctgtcaccctgggccaccttgtcggagtgagcagtaccgacattgggctggggtgagggtggggcaggcactcaaggcaaataatggagccctggagcggagcccac

SEQ ID NO: 9487 - DNA, 2300 bp, Homo sapien
atcaaaggcacgtatgagcctgacgaggactgggaggagcagcgggaagagcggaagaagaccatggagctgaccacccgctgaccagtgtcaggcaggggccagcccctcagcccctgagccaagggggaaaagaagaaaaagtacctaacacaagcttcctttttgcacaaccggtcctcttggctgaggaggaggagctggtcaccctggctgcacagttagagaggggagaaggaacccatgatgggactcctggggtaggggccaggggctggggtctgctggggacaggtctctctgggacagacctcagagattgtgaatgcagtgccaagctcacaggctgcaagggccaggccagaaaagggcgggcctgcagcctgcaccccccaccttccccaacccttcctcaagagctgaagggatcccagcccctaggtgggcagaggcagaccctccccagagctccttaggaagaagacagactggttcattgaatgccgccttatttatttctggtgaggatgcatgcgtggggctgctggtgtttagagtgggggctacccaataaatcactgatactcacgttccacctctgtctctcctcagagtgccttgagacactctggcccattgcctctcctctttgtcatcccacatcctccaccacgatctccacagggtaccaggggaccccaggacaagtgctctgtgggaagaaagggagactgtgaccatgggaggcccagagaatcagagagatgggaacagagcagggagagactgagagaagaccgaatatcaaaatagagctagaggccaggaaggaggggtcctcactgcagtcaccctccacccctccccctcagccatgtcaatcaagtccctgccacttgaggagggcttggctggcacttgaggggagtaccagggtgtgacaggcagggcggaggagtgagccaaccgcagcccctcgagatggcaagggggtgaccagccaggttccatcacagccctgggctcgtttctctgcaccttggtctttcaaaaaggtgtcctgctgggagcctgtgcccagagggagcagccccccgacccccccagaagccacatgtggcccagcccccttttccagggcttctcatgccttggcccaccagtgtccccaccgtcctctcctctgggcctgagctctgtcctagcctgctcttgtcccactgtcactgacactccttaggtaacctccttaaactctcagagcctccctctcttcatctgtaaaatggggataaaatatcactttcctcacaagatagttgtggggaccagatgagggcatgagatgcctgggaccagtcagctttctgtgaggaaaaggcggggggtcatgcagtgaacagctccgcatagcccagcttcgcagtgagcccagcctggagtcagtaactaccctcattccaatctggccgtgaaacttggggcaacataagctctctgagctttaaggaccttatctgcaaaacaggggtacttttcccgacctcatgtgctatgtgctgtcgtgaggagaaaatgagaccacgcctggaggtaaaacgcttgtacaaatggtcaggcgccttggagtgagtgctcagtatagtcgtgttaatagaaacccacacgtgcctgcctagtctgaggccccagccacatgcttctgccctcctgggggtgtctggacctgagcgcctgtccagcggggccaggagacggactgagaaggggtaggggaagctgtagttcttggccagcgagaggcagtcccaggggctggggtgaggagtggcagaccccccagccttctccacacttagagtctaagcatctacaagtgagaggtcagccactcatgtccgccccataggcttacagtaaacaccacgtggcattgcgtgtgagaaccccgggagcccagggaaggagcagccccccacccaccgtgtcccttcccacttcttccaacctgccccgggctgggggagccgggctgcaagtgccagctctggccagcagagggcgacgtcgtccaccgaatccacagcgtggcgcctcgtcgtccacaagtcctgggtctgggctctagccagatgggggtggagtggaggacacagggagtccctcatgcttgagtcccctggggccaccttgaggcagcctatcccaatgcatccccgccccgctatccgggtggggcgcagaagagaggggagcccttctccgctcagtctccaggagactcaggtacagacacagcc

SEQ ID NO: 9488 - DNA, 2300 bp, Homo sapien
gatccctactggggccagagaccatgaacttgtcatggtagcagtctgcacgactgggtgagtttctccagcagtgctcagcagcgcagatggggggcagaaaggcgtggaagaggatgagaacagagacacgcagcagggacggggtggagaggacagggagccaggaccacggagcgctggcaagagcctgctcagggtgagatgcccaggagttccctggagaggacatggtgaagtcgagacagcagggagaacagaaggaaatgggtgagggatgttactgggactcagacagggactggggaggaacagagcctgtagtccagagttaagatgtttctcttgaagatatcagagggctcagtcccagttgggggaaggtatgagtatgaggctgaaatgcagcagacatagtcatctgccccgggaagtcaagaagtttttattcattcattcaacaaatatttattgggcagttactgtgccaatctctgtgcaagacactacatgcaggggtgaacaaaacttggttcccgccccccaaaggcctccccgccttgcctcactggggagacacattcacaccatgacaacaccctgtggtgactgcagtgtaggagaatgcccaggtgtggtgggagcacgcagaagggtccccacccaggaaaggagcaagcgacgtcaaagctgagcctttggaatgggagttacccaagcaaagggagtgcaagggatctccaagaagaggagagagctttttccaaggagaggccagcaagagtgtgcatttggtgaaaccagagggtaacagagtggggagaggtgagggagagctgcagggtccctgaaggcaggcacagagcttccagagggatgggaggcttggaagggattttagcaggggagcagcatgatcagatttgcattttagcacttgggctgcagtatggaaaattgattgaaacggagcaagggagcagacagagagactggtgaaaggctgcagggcggcaggggtggcaaaaagagggcacagtcaggagatatttaggattgaaaatcagcaggacttgatgcttttcctggatgggggaaggagggagaaaagggtcaaggatgcttcccagatgccaccagctgagctgcagaaaacaagaggagaacatgggggttggggggggtaccaggagacaggaggatcacatctggagacagattgcgtttgaggagcctgagaacaaccaggggacatctgtaggcaggtagatatgccagggatgaggtcaggacacccagctacggtgaagaggggaagactgttatttcaatagcttggcagactcttcttagggaggaacacttttgtttgagaagataccttgctatctgctagggttaaaaggggaaagcctagggcatgggtgaccatagggccagggaaagcctagggcatgggtgaccatagggccagtgcagccacaaaaaatggttaagctgccttgtgtgagaaaggagtgaaatctgtttggcccctgagaggaggagagcagagacggaggagccaagaagggaggggagcgcgggggagggcagggaggcaggaggaagtgagtgaagggccagtggaaatttcccctggtggacagcagaggtgcccatggccttgtgtgatctgacgcggtttgagtcgctgtggaataaaccccttctccacccgcccctctgcaaccccacaggccacagtgtccacagcgtccttggtaaagtcgactgtattcacatctgcattctgtgagtgcgggtataggtgggagtggaggagggaacttactttctgggtttacgggcacggtgtggtgtcagcccatttggaagcaaagcctagatatggagggggccagacgaacaggacctgggaatgcacaggaccccctgaagcaggccggggatctgagtgatcttgctgtatctaagctgacattggaacatgaacagtctgaaatcccatgagccccgctgccctgcacctgcgaccctcaggctagaccttggactgtctacaacacgagtcaggcccaacccgccctggaaatcatcgtaggaggttccagctcagtgcccagagacagcccccacatcccaccccatcaggtcagctcaggctggagcaggcatatgagcaacacccctcattccacccccatacacatgcataagcccatccgcctgcgccctgccagtctgaccagcacagtcctggggacaggagcgtggtggaggagctgcaggtgggggcc

SEQ ID NO: 9489 - DNA, 2300 bp, Homo sapien
gactacaggcgtgagccaccgcgcctggtcatgtccattctttttttaatgtctctcttttttttgagacagagtttccctgttgtccaggctggattgcagtgttgcaactttggctcactgcagcctctgtctcctgggctcaagtgattctcatgcctcagcctcccaagttgctgggactacagccatgtgccaccatgctcaactaatttttttgtatttttagtagagacggggttttgccatgttggccaggctggtcttgaactcctgacctcaagtgatccgcctgcctcggcctcctaaagtgttgggattctaggtgtgagccatggcacccagcctttatgtctgttcttgatttatcaatactgtcgttgcctcctcctgactctgtccaatgaattacttggaagcaaatctcagctatcatataattttatctgtgataaaattatcttttattcttgctcttatgttagacatacttcataataggttatcaaaatgaagttgcttatttccaaatatttaaccagtttaatccaaactgattaaatccattaagaaattatttattgctgagtgtggtagctcatgcctgtaatcccagcactttgggaggctgaggcaggaaaatcacttgagcccaagagtttgagaccagcctggacaacaaagcaagactccatctctacaaagaataaataaataagttagccaggttagtggtgtgcgcctgtgtttgtagctcctcaggaggctaggttggactattgcttgaggtggggaggttgaaactgcagtgagctgtgatcacaccactgcactccagcctggggaatagagcaagaccctatctcaaaaaaaaaaaaaattattatgtaagtaacattagcaagaatcaaaatgactatcttcctacctactcttcagcaaatcaaatattattttcccctgatcttacaagttcttatccatgcctgtacattttgttttgttttgttttgttttgttttgtttttgagagggagttttgttcttgttgcccaggctggagtgcaatggcgcaatctcgactcaccacaacctccacctcctgggttcaagcgattctcctgcctcagcctccctcatagctgggattacaggcatgcgccaccatgcctggctaattttgtatttttagtagagacagggtttctccatgttagtcaggcaggtctcgaactcctgacctcaggtgatccgcccacctcggcctcctacagtgctgggattacaggcgtgagctaccgcacctggccgcctgtacattttttttacacatgttctgtactctaatatagaaccatggagttctcccctacaggtaggtttgtgtcataatcaactgataagatatgttaaataattttttttactgagaataatgaaagtatacacaatttttttctcttgttccagctttcttctgttagaaaaaaaaatctgtttagagtaataaattattttatattaaaggctatacctgtaacctcattattgcttgttttctgctgtccttgagtggatgagaaggaggtaattatagctggtggtcttattccttgttcacataacagtgtggtgtatatatgaaaaagaaaaagtgtggtatatatgataataaatcagtcctggtgtggaggtaggaaaaataattgagagtctctgttttaatatatgctttgggaataggaatgtaaaagtagacatgatgtcccagtttgagaataagattggaggtggttcttcgcatgtggtcttcatctgttggtctacatggcgtaaataataatttaaagctcttttttttttccagggaatgctggcagactttgtgtcccagacttctccaatgatcccctccattgttgtgcattgtgtaaatgagattgagcaaagaggtctgactgaggtaagagtcaactgtaggagatggtgaatttgttatttgtgttaattcggaggtttttaaataaaaatgtcatcttgataatagacaggcctgtataggatctctggctgtgaccgcacagtaaaagagctgaaagagaaattcctcagagtgaaaactgtacccctcctcagcaaagtggatgatatccatgctatctgtagccttctaaaagactttcttcgaaacctcaaagaacctcttctgacctttcgccttaacagagcctttatggaagcagcaggtaagggcagatgtaatacttgaatatgaattcctccacggcagtagtttttct

SEQ ID NO: 9490 - DNA, 2300 bp, Homo sapien
gtgtatttattaaatatatgcttgcctcattcttcagaggtcacatgatcttcctattgccagtaattttccattcccttctctcctgtaaattcctattcacacaagacccagctcagatcagtctctgcaggcttttttaacactcccactccccagataggattaattgcttccttgtctgtgctcctaaagtactttatacatgtctttgtcctactacttatttcattttattataggtatctaagcaggcacaggctaatgcaatcaatgaatgctcctgaccttgaaaggttgttaggaggattaaatgggataacaaatgcacagttcatattttctttcttcatccctttcttaataatattaataataatctgtattgcagtttaccaagtataaactttgatagtgtaccacactgtgtctcagtcgatctgggaataaacctgtgagatagagatgggattattatttctacattatacttggaggaagtgaagtacagaagtattaaaaagtgataatatgggtgggtcagccgaacgcctgctattgttcaaggccaggtggagtgctactgtctgtaatcccagtgctttgggaggctcaggtgggaggatcacctaaggccaggagttcaagactagcctggacaacatagtgagacccttctctacaaaagataaacaaacaagcaaaagaattaccttgatcatgtgcctgtagtcctaggtatgagggaggatcccttgagtgtaggagttcatatttgcagtgagctataattgtgccactgcactccagcctgcgtgacagagtaagaccctgtctctaaaataaaagtggagtcaaattttcgggttacaaaatttgtgatgtgatttttggataaaatacaattttatatatttatggtgatgttttgatgtatgtatacactgtggaatgactaaatcaagcgaattaatatatccattacctcacatactttattgaggtgtgtggtgagagcatttaagatctactcttagcaattttcaaatgcattatactttgttattaactacagtcactgtgttgtacaatagatctaaattttcctctaactgaaattttatatctcttgaccaacatctccctaatctccctcccccaaatctgtgatctttcttttctttttttttttttaaattaaggaccaatgtgacagtaagtgatctttcctttaaaccacagcgcttcttgtatgctccagccagtatttttccaaattgcgggtagccatgcgttgttgagtagtgagttctgggtactttgcatgtagtaaggatgagcagagttttcattacccggttgcaacgtaaaatgtatttctcactgtgggtccagagtttttaaaaagcatgaaagctcctgtgctagcacaatgccaagttctaaataacgtttattaaatggaattatagtattttattttcattttgtatttatttttgttttctagagctatcgcctccattcgtagctactggacagtagagaccataccatctttatttttccgattcccagtggagtgcttgtgatgatgtgggctcattcaatgtgtgtcaaataaaagtctgaatggatacatcaatggaagggataatatagctcagtgaatgtgcttgaaactaactgctgttctaactcctggtattcttctgattctactgtgagagctgacattgttcagttaatcgtttccaagggccctagtcccgcagacagtgagaccaagaataattcgcattcaggaagtaccacttgcccttagtcaatatggcatcctgaatgacttccggaaagggcaccgcaaaaaaaaacaaaaaaaaccgaaaaaccgttgacattagtcaaaatggccacctttggcttcgctttgtcagaatgcgcatgctcattcccgttcccgtcacctccgcgtggccctgacgcgtacgtcacaccgtagagggacggcgcgggaggaataaatttctctgtgattggttggtgaaggttttcaaaccggagctgtgggcgcggcgctgctctgccgttgggtgaggcgcggagcgaagtgaagggtggcccaggtggggccaggctgactgaagtgagtagtgggggtgccagaccaggtgcgtctgccgctggattgtgataggaagcagagtgttcgtgtggtgagccgtggccgccgcgggggtccgggacagcgggacagcgggacaggctggcagccacagcctctccactcgggcttttct

SEQ ID NO: 9491 - DNA, 2300 bp, Homo sapien
tattgggatttactaggtacatgccaatgtactaagcactttccatgcgttagctcatgtaatcctcgaaaaatcctgtgaaataaatattatctctgccttacagatgaggaaaccgaggtccagagaggtcaaggggcctgcctatgctaatgaatggcagggccaggtctggaagctgattctcctgattcataccttctgtcttcccccagactcctcctgaggctgctccttggcctcaatcagtcctcgcctgcctccacctcacctcatcaccttccctccacccccgctgctccctcagtaacatcccaggtgactgaagcaattgcagccatttgaagaggctccacgtgtcagtcagcctgcgagccgcggggaggtggggaaattacagatgctccaaaatagtgttcccctccccctgaggatatttggaattcaggaatcagactctgcctgatgcttcctcaggtctctgggaccctcccaggtgatttcccactctcaaatgccccccacgagttgattctaagtatctgggagagggctgccacccagtggctgcccgggggcatagcaaccctccagcactgcctggtaccgctgaacagctccccaagacctgaatggaagatcctcccttccttttggcagctccgtgtccagtcccctagtaaatggatctcgacctccctcctccacaatcttaagtccactctcccactagggacctccagaccccttctctggtttcctagatgtccactactcccaacttctcatccaacttctttccaatgtgccatccccttctcgttacaggttttcttctaacttaaagcccggcaccatgtcctaggaatacacctctcaccatccttctccccgagccgcaccagcctgcaagtagagcgaaggagccactagagacagaactctggtcccccgcaccctcctcctcatcatctgacaccatcagacctcaacagcctctgtgctaagagcccctaatgagcatcagcaaattaacaacttccccttgattgctccttctctgttaattggatagggagggcccccctccccaaggcctctcagagaagaggagggaggcagggaaggagaaaggtgagagccacaggagcagcccccaggcctgcgttctgtgctgagacttctgctccatccctgagcatagctccccgttccaacccttcctcaccctgtccccttcactccctttgcctccttccttctgtccaaattcccttgacctctggctatttttccttccttttctctgctccttctttggagatttggcagtaaggggttgcgaccatgccccccacaagcccaaagctacaaggatgggatctgagtggtcaaggctgcgtgttggctcacatatgtgcacgtgtatatgtgtcacatgcaggtgggagcagggataagagcaggtgagtgcttgccatgtgggtcaggcccccgggatacgtggacatctgttgcgggggggtgtggttgtgaatggtgtggtgtgactctggtcggtatgtgtgtctgtctccatatgggctaagtgcttgaattagtcaagtgtgactcggagcgtgtgtgtgtatgtgtgtgtgtacgcgcgtgtgtgccaccagaggaagcagcagcaagaggcaggagcatcgatccgaaggagacagcgcggggagagggacgctaggggcagacaccctccctcctgcgcgcacacacgcgcgcgcgcacacacaccacacacagagtcatacacacaagccatagggcctcgcaggcagggagacggctccgggactggagagaggcagcgccgccgaaagcggccgcgaggaggggcgaggcggcgcggggagccctgggtcccgctcccggatccggggccccgcgcgcacaccagcccagagacagcctcgcagacactcgtaggcgcgcacgcgcaccctctcccctccccctcccctcccgccgcctcccggccggacgatggatccctgcagatcccagggctgagagcaccgcgcaccgcgccgagcccgggcagaccgagccgaggcgagcgagccagcgagccagcgcgcgcgggcgggcggacagatcggagccgagcggggccgggcggggcgctccctgcagggctctgcgcggcgtgccgcggcggccgcgggctccggccccgggccatgagcccctccgcgactcggcgctgagcccgccaccggtccagcgccccaggacccgccgccggctgccggcttgcc

SEQ ID NO: 9492 - DNA, 2300 bp, Homo sapien
gcatacaggggcctgggggtttgggccactgggcctcaggccaggagccataggaatgtgtctacctctgggcccgagagtagagcagacagttctcacccaggcccaccaggtggcagcagcaatccactgtacagcagccctgtcctctgaaccggcgcaagacagggctgctagccggcctcagacacctctaatcccatacaactccggatggagtgtaggcatgggcatatgtccagcctggagcctgtggctgggtgccgcaagacctggtcatggggctggggactaggagcccttggagttctctctttgcctcatctctggacctcacccacaaagtggggagagcagtatgtctcctcttctggaggtcaatggaggaggctgttctaggaagggggaagggggcaaagaccgtattccctagtaacctactgccattgctgctccagtctggcctgaaactcttttgtctctcccctgctctgggctgtattgactcaccttatgacctgttttgtggactttgtcaccatccagcagtagtaaaagcacagccaccccaacttggggacattcaaggaggctgtggggaaaaggccaaggataactggtttacttttctctttgcagctttttaatcagcactgtgaccagggctgcactggggcatggagtggggagaagactggggagacagcccctggggctgagatatcttctgaggccctcctagttttgcaaaagcattaacgcacacaccatgccctgggggctcagtcccaagtgctggaagaagaggtgctggtgcttggttgagtgtggtccttggcatggcaactgggtctactttcaggttctgctgataatgggataatggaataatgatggacccaaggggctaggggctgaatgaaaccaaaaaactgagtttggctgggcacggtggctcatgcctgtaatcccaacactttgggaggctgaggcaggtggatcacctgaggtcaggagtttgagaccagcctggccaacagggtgaaaccccatctctactaaaaatacaaaaattagccgggtgtgatgttgtgcacttgtaatcccagctacttgggaggctgaggcaggagaatcacttgagcccaggaggcggaagttgcagtgagctgagatcgcaccactgcactccagcctgggcaacagagcaagactccatcccaaaaaaaaaaaactgagtttgggtcttggggaaagcagaatttcagattcccagagtgaaatctaggagaagagaagatatgtcttggagggcctcaggagcttgggcctgaggaaagtgtcccaaggaggggccgtgttaggatcctggtgatgaaaatgtatatgtcagggtcctggcaggaaaaagacagctacttgatgatttaattgaagactttaacaaagggactgctgacagagctgggggcagggttaaggaaaccaataagggggactgaggcagtgagcagtactaggaaatcgttatcacttctaggctgaagaagcacaaaagaagacagtgctctgtagggagccctggcaggatctgtaatcatggagggcctaaggcactactagagctacagaggggcgagggctggggaaggattcataccccaatctttcctcctgccttctgagccattaccaatacctcccaactgtcaaccccaactagaagcccatgcaggtggcaaaggagctcaggcgatgcaccctaccaggaacagttttccagggcacacagagggcaagaaagggtgagaaacaggtgggagaggggagcaaatggagaatgggctgcacgggaggaaccattcccaaagggtgttgagattccaacagctggggtggctaggaacagcccttggtgagtagagggtgctggcaggactcttaggctctccactctgccctcgccaggtcttcacacgctatggaaagtgctacacgttcaactcgggccgagatgggcggccgcggctgaagaccatgaagggtgggacgggcaatgggctggaaatcatgctggacatccagcaggacgagtacctgcctgtgtggggggagactggtacgtcacccacttcaggggcccctctgcatggctctaggccccagcctctgccaggggattcctgggcttcactgtgagacctgggcagggcccgggctttcccctctccctccagcatctcaccatctctatcactgactctacctgacttccacactcacatctctctggctcccac

SEQ ID NO: 9493 - DNA, 2300 bp, Homo sapien
cagtcagtggcctttcctccttctgggtgcccagccccctttcctcacctgatacccaagcccaccacttttattttctggtgaggtgggtttgggaggaaagagaggcctagaggaggagttgaaagctctgctgttgtctcaccctatcttaatgagagacaagtgaggtggagggcctgccccccctccctccaccagacactccttccaggcctgagccccaacccctcttcaggccttccttccctagctgtgtcttggtcttcaatcccagaacaggacctgtgagcagctgcattggcctggagctggagagtaaggctgtaggatctttggaatctcttggttcctaagagtttcctcagagatcatacctccccagagggaagcaggaatgaggccaaaaagtgtgcattggataggggaacagcaggcagggctctgggtgacgcatgcctctggtctaataaactgggtttcaaccatctcctcttcagtgttgttctcttatttgaaaaagtatttagatattctcactaagtgcctaaagctgagcttggtttggggccaattaggggatgagtaaggagaaggtttgagtagggacactgtggtccccctgggatgggacaggctgaccattatatcaggaatagtttgaaccactgggcagggaaagagggagaagtcaaaggcaacaaagttccaaaacagaatccccaatacaaaggatgctttagagagagagagcagagtcaaaattcaagataaactggaacttatcataaaatctggaagcaggctggcacggtggctcatgcccgtaatcccaacactttgggaggctgagacaggtggatcacttgcggccaggagttcgagatcagcctatgcaacatagtgaaacccccatccctattttttttttcttttttgagatggagtctcgctctgtcgcccaggctggagtgcagtggcgcgatctcggctcactgcaagctccgcctcccgggttcacaccattcccctgcctcagcctcccgagtagctgggactacaggcgcccgccaccacgcccggctaatttttttgtgtttttagtagagacggggtttcaccgtgttagccaggatggtctcgatctcctgacctcatgatccacccgcctgggcctcccaagtgctgggattacaggcatgagccaccgtgcccagccccccatccctattttttaatatttaaaaaaaaaaaaatctgaggccaggcacaatggctcacacctgtaatcccagcattttgggaggctgaggagcacagatcgcttgagctcaggagttcgagaccaacctgggcaacatggcgaaaccccatccctaccaaaaatacaaaacagtctggcatggtggtgcatgcctgtggtcccagctacttggtaggctgagttgggaggatcacttgagcctgggaggcggaggttgcagtgagctgagatggtgccactgcactccagcttgggcgagagagagacagacctcatctaaaaaaaaataaaaaataaaaaataataatccggaagcaggttaggtcagagagaaagttaggatgaagttcccacgtgaggtacttattgaggcactttatctgtggaatgagtcccgggctatgagcaagggtatctggaatcttggcttcggctttatggctaacttgctggttgacctttgccaagtcattcacctgtgagttcagctttcccatttgtaaaatggaataaactgtgtttccctcctcagcccctgatagttatagcagtaagaaaacgaaacgaaaagcagtcaaagcgttttggaaagttaacgccatgcgccaagatgaagctattactccaagcccctcttcatcagagggctcgagttggggttgagactggggctgaggctgtggtccgtccccctttccaggtccttgtcttcctcccgtcggcctgggggcgcccgctcacgcggcctctctattgcagagctcttctctatggttttccctcccggaccgtgaaggcgggagggcgtggccagcacgccttttccgctagtcgccccgctctatcccatagtctcgctgccctgagcctcccgtgccggccggccggccgggggaacaggcgggcgctcggggggcgctcggggggcggggggagttccggttccggttctttgtgcggctgcatcggcggctccgggaagatggcggcccgggcgggtttccagtctgtggctccaagcggcggcgccggagcc

SEQ ID NO: 9494 - DNA, 2300 bp, Homo sapien
tttggatgggaacattctagtattgcctgttcaatatatgtaatcaaacccaccaaaaaatccaaccactgttcctactccggaacttggggtttatcagacttgagaagggaaagcagagaggagtggttgggccgataactaggagtggagaaaattgatgtcaaggacattgaaatggcatctgtttttacccaggctaattacatgtgtaatgaatggctgatgaaccattattaatttcaagcaaatctacagtttgctcttgggaaaagagctctagtgatacagataacttcctgtgatgagccgattctgaatctctgcaccctctttattcccatgtaaatgagcacattcttagtctccacactatctaaaatgattgtaggggcaaaatgagagagggaagcatttaggcaaaaacaagggggttattttatgcataaacatccattctttggggctcccatcatttgtgccagggacagaagcatcctttctcttccatcacccgtaatcagtgctcccagctggcagcctggcactggagccttcatctcagtgccagtgcaataaaggagtggtctgtgggaggctgtttctgtattaggtataacattgtgctaagaaaaacagccaactactgatttcatgtccgtttccctatgggaaattactggccatggaaggagaatatggttggtttttcctgggcagtccccggaacttagaaagccatttctccccagtcttgacctcctgcctgcttactcctacccatgggttgcacacagactcccctgtagcccagtgcttgttaccagttgctggccagcaacagcccagggggatggcaacacccacctagccgtctgccaagccaggaggtcagcacatgagcacacagtggtgtctgccctctaggccaaggtgcacagtgttaggagcctcttgctccactctccagatcagcctggaaaccagagcttccctcgtcttagacaaacagatggccgtgggcgatgcagagccctgaactgctgagggtgctccttccattctcgcccttccccaaaaaacatacaccaaacttacccccaatcacagcatctgagaccacaaagccccacggacacagctgccccgggtactgcctgccttccccttttctggcctctgcaaactagccattcacctgatgaagcccctggggcagtaccttggaaacccctgagaggaggagttgaaggaggctcaaagcctttcaaggacagtgtgcactctgcctgcctcctattctctcctgtcctcttaagcccagagtctacaacaaaattgtgtaccgcaattctcagagctctctaactttaacctttcccaccttccctagaacacatttttgggtggggatcatctgagaggcccatggatgagtccccaagatgacctctgtgggtgaccaagacaatcttgtcttttgaggcacctggagtctctcatccttttttgagctgggctgtcctcaaagcaggcccttacctcttatgtggcctcatctttagaggtgggaagtgggcccacatcccccaccccagccctgcagtggagctagcgtgggcctgctggaggacagaactgtggaacagggtcctgtgaggatatgtggcagggttggcggggggatagggggtcatggaggagcctacctctgaaaagcattcccctagctgctactgaagctaaatacaatttatttcatgctgggggacagaaaggagcaagggagagcagtcacctgctccttatctgggctattttcttagcagacctcaaaatgagaccatggtgggaagctgggctggggccaagggaagaagcttgccagcactgtcagccgatgagcccaggagaaaaagctgggcctagtctctgccccattcctgttccacacctgtctgtacccctgtctctcctttccctggctctgccagactctctatctccctgggcgccagcctccccacccacccctggagggcggggcttggctgcacccacgtgtggtggagttaaatgctcctagccggcagaggagctagggagtgtggcactgagccggctcaggcagagacgcggcaccatggctagcaagaaagtctgcattgtaggctccgggaactggtaagcagctctgtcaagtgatatgggggaagggtaggccccccaagacagaggtgggtaggaggcagaatgggtgggaaaggccctcaggttcctgttcagcccctgctgctatc

SEQ ID NO: 9495 - DNA, 2300 bp, Homo sapien
gacctctgccaggacccacacagcttcgatggatctcagtgtttgttaacaaaatacaaagatctcaaacaaaccccttttagcttctcctagcaacatctgtgtcctcagaaacctctggttctcccccttccccctcccccaggctgccctggcacccaaattgctgccatgctggcatctgtagctcggtggcttgacattctccccagggacttcccggttcctagttctttgccagctcctccccactctgtgcgacctttccaagccttccctcaccctccccgccagcaccctctttggggagcaggaacttaatctgctgacagagctacacctttcataacaggctcagatcactcagctccctgtgacctttgtattcacccaggcttccttctcagtagctctagctgggggaggtgtcagctgggcccctcctgtgctatctccccagaggacatccctgactccacccctttcttcctcccaaactctgcacctcttcctcagctgctccagaccggccagggtaaccagctaaccatgcctggcatctggaagccagcaggccagagggtggcccaaaggctgatgaacggtagggaagggtgagcagattcctatgttggtgggcaccaatattccaagggcagctctctttgctgaatgagggccttctcgtgaggtactgacaacaccagcaactcgagagctgggaaactcaaggaggaggaagaaaatcaaaaccaccctactccctggggtgaggaaagaacaggaggggaggaggaggagtgtgctctgcacttgccttgctccaggatggggtggcagcagaggaatgtcacaggtcagcagcctaggcctccagctataaatagtccggagggcccgagaggctcccgcccgtccagcagggctgtcagcttcctgtgtggcagcacctggcacactggctctggccagcattatgctaaaaccctgttactctccaatgaaccagggaggcgggctcctctctgcgcctatcccttgagaattctgtcttaccagtgaagggtggggctgcccagatcaggcagcaggagtgaggggcacagtcaccccaggccttgctgagcccaggtctgggtactgagtgtccagagctgcctccccaggaggttaaggtgggggcaaaggggaagcttcaagcactttgcctacttttgttcactccccagtgcactgtgactcaggccttcccatcaggcctatttgtctacccaataaagcgtgttttttccagaaacaagaagagttgggagagggagcttcagtgcatgtggcagtgcgtgtgctggcgcgtatcattgcacgtatgttttccctcttaccgtaggaaaaatgaaaaaagaaatccctcctccataatcgcagctactccaggggtcagcggcggtgcccactcagtccccatccctctctctcccctcccgccagcgccccctcccgccctcgccgcaagctggccccggccttgccggcccttcttaggggctttatcatgcctcctgcaagaatagagatcacacacgggacggaaacgttagactctcatcccttgtgcccattccttggtcacgggccaagctgccgcatccttagcggtccaggcatcgcggtgcccctcgggcccctacctggactaggcccacagccgggctctagggggcgcgcgatccacctccagaaggccggctgcgaaaatctacccagctactggcgacgtcaccgcaccgtaggctgaggattggctgactctgatttagcatcctaaaacttccggttccagagcttggctcgccaaagaccctccctcgagggagagaaaccacagcccccagaattcagcgggcctctccgagagcacggcgcgtctgaggatgcgtagtaaggataacgggcccggaagccggaagttcaaagccggcctccagccagagtgacggcctgcgcggactcccgccttagtgggcggagttgtgccgcgtctgatgcgcagttccctttatagcgcggcaagccgaatcctagaggctaacccggcaggtgggagggagaaagttgctttctgcaccaatagctgaggcgttcagggttgtccagggacgctaccctcacgtgtctggttccgagtgctgcgttcggctgtgctgggaagttgcgtagacagtggcctcgagaccctgcctgcctgaggaggcctcggttggatgcgaaggagctgcagcatccaggtacgctgccggcta

SEQ ID NO: 9496 - DNA, 2300 bp, Homo sapien
tctttaaaataaccctgtgaggtagatattatctccattctatgggtatgtaacagtcacaaggtctttcagctggtaaaatctgtctaactgcagatctgagttttaatcagctgactgcctctggattaaagaagcctgggttaggggtaagagtaggaattggaaaggctgttttctgcctttggattttcatgcaattatgtcgataggagaaaggaggagacagggtttttagatgatttttatctctgatatggcatcaactcaacaacaaagaatgacggcctcatttactcttctgaatgctgattaattttgggtcagaattgacctccaatacaacaagagtgggtttcactaaaacatgttgcttgtcagttactgagcaactgctgagcatagtaccttggtaaatataaaagcagtctatttgtgtttacaaggagtttaaacatgagttgggggttaaatattattggtatacagaatagtataccagtaaatgtaaattaaggtatccactggcattggcctttgaatggaactattttttttttcccccccaccggtgtaaaagagaatgtgttacagatgtggctaaatttatgctctgaataaatattactctatggctcaggaactttggtgataaggtaaaaagttttcatagagggagataaagtttcttattctcaatccctcctttagagataatatattctaggttcaaatgcagctcaagaaaataggttaacggcactccattttacacctcccagtcatattttcattatgggactccttaagatgctaagggctaaaactggttttgacttatcctgaaagtggcaatatagagttttcctagtgctgatgttcttaaaaatctctgattacgggggagagtgagatctttcttgaagaaccaaggaatagttcctcaattttcaaagattcaaaagttggaaattaattataatcaatcaatgataacatcatagaatcttagatatacaaaaaaatcttagaaatcatctcatataacctctttttattttttattcttcttcttttttttttttttttttttgagacggattctcacactgtcgcctgggctggagtgcagtggcacaatctcggctcactgcaacctccgcctccagggttcaagcaattctcctgcctcagcctcccaagtagctgggattacaggcgcccaccaccacgcccagataatttttttttgtatttttagtagagacggggtttcactatgttgaccaggctggtctccaactcctgaccttgtgatcctcctgcctcagcctcccaaagtgctgggattacaggcgtgagccaccacgcccggcttttttattctttttaaaaatttaaatccttgggactctgcttgatataacctcttcttttagatgatgaaaccaagacccaagaggtaagtgattttaccaagtttatatgccttattagtagatctgagactacgatagagtgctaataggtgatttccttctcacctttcctagcttcctgatttctttcttctcgactcctgaaagatctaagtatttccataatctcttggttaggcaggaaggtatccaagatccaggatatctatatgcaggaagagcttagtctcagttctacttttccctccaattaagatcttggtcttttgatgtaaggaaactgccatttattaatcacctcctttgtgccagggtctttcatatacattatctcactgaattacttacaagattcttatgaagtagattagtggttctcacattttaatggacatgtgaatcacctggggatcttgttaaaatgcagattctgattttgcaagtctgagatgggctcaagattatgcatctctaaaaagcttccagccagcacagtggcccacgcctgtaatcccagcattttgggagactgaggctggtgaacattgtcaccctaaagaagtgataaatgttgaaagtgatggatatggtaattaccccagtttcatcattatactatgtatacatgcattgaaacatcacattgtaccccataaatatgtacaattattatgtgtcaactataaataaaatttttttaaaaagaattggcccgtgggttttctccattacagatttattgccaaaccctgtgcactctgtattggcatcgaggacagtggtccttatcaggcccaacccaatgccatccttgaaaaggtgttcatatctattaccaaggtaagtgggcaaagaaacaga

SEQ ID NO: 9497 - DNA, 2300 bp, Homo sapien
gacccagcatatccacagagacccagcatattcacgtggtggaagatttatggacagcaaaatgaaagtgaggtacagaaacaaccagattggttacagatcagcgtttgtctcatttgaacgtggttggaacagttggctacatttgattggccaaaattcagtgattggcactggtgtggtctacgttcgatttacacctccacttgttacagttcacaatgtacagaaaacctttaggccgaacttaaatatgtaaggaggcagctttagattaaacttgacttaacactagctaccacttcttacctacataactttgggcaagttgtttggcctcactggacctcagtttacttatccagtggggataacaagatcaactttatagggtgaaggagtgaaataacctgtgtaaaatgttccatgcagtgcctggcacacaggaaacctcatcaaacattggctatttattttgttttgcctttaggtcctttagatatactttttttttttttttttttgagacgagtctcactttgtcgcccaggctggagtgtagtggcgcaatctgggctcactgcaagctccgcctcccgggttcacgccattctcctgcctgagcctcccaagtagctgggactacaggcgcccgccaccatgcctggctaattttttgtattttaatagagatggggtttcaccgtgttagccaggatggtctcgatctcctgacctcatgatccgcccgcctcggcctcccaaagtgttgggattacaggcgtgagccgcgcccggcctttttttgtttgtttttgttttgagacgctctgttgcctaggctggagggcaatggcgtggtctcggctcactgtgatctccgcctcaagcaattctcctgcctcagcctcccgagtagctaggattacaggcatgcaccaccacacccgggtaatttttgtatttttagtagggacggggtttcaccatggccagcctggtctcgaactccttacctcaggtgattcttccgccttggccttccaacgtgctgggattacaggcgtgagccaccacacccggcctgcctttacgtatactttttgagtgcttcccttttcactttgtttttcttccatttccttttccccaagagaagaataaaaggatttttgtaaactttttttatttttattttgggacggagtctttggtctgtcgcccaggctggagtgcaatggcgcgatttcggctcactgcgacctccgcctcccaggttcaagcgattctcctgtcccagctttccgagtagctgggattacaggcacagcgccaccaggcccagctaatttttgtatttttagtagagacggggttttgccatgttggccaggctggtctcgaactcctgacctcaggtgatccgccagcctcggcctctgaaagtgctgggattacaggcgtgagccaccgcgcccggccttttgtaaactgttaagtccattttttctgaggaaaagtgactaatttttaagggataaagcagtgaaagtaggctgaggtcacggggcacgaagggaagaaaaggttgggagcgaaaagaactctagtggcggacagtagtgggcaggaccagctgacatccaagagaagccctgacctgagagatcgatctggcctccgggagtggagacagaggtaccgcctgggtgggagccggaacggattcgattccaacaggctgagaaaggagaatgtccccgtaaaggagctaggcctgaaataaggggtgtggccgtagctggatggaagagtgagggaggagtagaagcgtggcctagaccagcagcaaaagagggcgggcccagggccgcccgaggcgtggtcccagggccgggctgggcgagtcagaggctcgggaaggggcgtggatccccggaggcggtccccgggttgcagtgagggaagtgggccgggaggagagatgggcggtgaagaggcccggccctgccagggaggcgggcggatccgtggcagtgaccagaaggggccggaagggggtggccgccggccgggccccgccctggggccgcctccccgcgggttccgttggctgtggcggcagctgacgcttgtggcggcggtggcttcggggtgggcgtaagatggcgacagcagcgcagggacccctaagcttgctgtggggctggctgtggagcgagcgcttctggctacccgagaacgtgagctgggctgatctggaggggccggccgacggctacggttacccccgcggccgg

SEQ ID NO: 9498 - DNA, 2300 bp, Homo sapien
tatataaatttcttgtaggtcacaagacaaaaaagaaaaacatatatatgtggatttctagcatctccccaggctagtttactggacactgaaaaccctacaactgaaatagaatgatgaattaaacagatctctagttaatcctaccttaaaatttcggagaaaaactccttctgcttgaatccagaaacattctttttttgcaatcatttttctgggactagaaatgtttctgagaaatgtttttgactaggtttatgaaacatttttttgaaaaataagccttaatattttagtactttgttgactcacctcttcattttggcaggaaagtaactcatgtagttggaatttcaatgattatgaaaaaaacttcatggagcccttttccataatcttcatccattggtatctgctatagaactgaccaaaaacagtgtcaggttacatgtatacacaaatgcgcgcacgcgcgcacacacacacacacacacacacacagagtacaaaatttctgccctcacatctccccctttttccaacttcagttgaaacacttcagaaaaagttattaggaatgttaatgaccaaaaagacatctaagtctataaacggcctttaaaaatgacaaatggcacaaggaagaaagttctttatacagagtggtttggatttctgctacgtgtggcagagggtaagaaagcctcctcactgagaacctgatttctgacaggaccagagaatacctgagccatagttgttagtgttcgaatattcttcaacagaaaagcagtgtttttcctggtgttggaaggatctgtcattaatgaaagtgcccaaactttgcttttcggaagaacactttccaagacattccatgagatactgtaaaatgtcttccttttgtaactcaagcaggtgactcccaggttaagagtgaggttcaacagcctgtccatcccaagccactaagtccagattccagagcctccagtctttctgaaagttctcctcccaaagcaatgaaggtatgatggcaatttctctctgagcctttggacattggtctactggtagagctaattgtaccttttatgatgatgatgttgattataacctggttttgctttcctgtggatgataatgccacagaagagcacactgaagccagtcgctttccctggaaatcttgctgcctctgctcaggtctttggcccgggagcgagaaggctcactaatgactctcagtttgaactctggaaaactcatgaaagttttaaaataatgtcggtttttttatttttgtttttgtttatttattattattatcttttttttttttttgagacagaatctcgctctgtcacccaggctggagtgcagtggcatgatctcggcttactgtaacctccgcccccccatgttcaagcaattctcctgtctcagcctcctgagtggctgggattacaggcatgcgccaccatgcctggctaatttttttgtattttttggtagagacagggtttcaccatgttggccaggctggtctcaaactcctgaccttgtgatctgcctgccttggcctcccaaagtgctgggtaagccaccacacctggccttgtttttgtttgtttgtttgtttgtttttgttttgttttgagacagagtctcgctctgtcgcccaggctggagtgcagtggcgctatcttggctcactgcaagctccgcctcccgggttcacgccattctcctacctcggcctcccgagtagctgggactacaggtgtcctgccactacgcccggctaactttttgtagttttagtagagacggggtttcaccgtgttagccgggatggtctcaatctcctgacctcgtgatccgcctgccttggcctcccaaagtgctgggattacaggcgtgaaccactgcgcctggcctgttttgtttttttgagacagggtcttgctctgttgctcaggctggagtatggtggtgtgatcacggctcactgcagccttgacctcccaggctaatgcaatcctcctgtctcagcctcctgagtagctagaactatacgcacatgccaccatgcctggcttttttttttttttttttaagagatgtgattttgccatgtttcccaggctggcctcaatctccaggccttgggtgatctgcctgcctcggcctcccaaagtgctgggatgggattataggcatgagccactgtgcccagccaggaaaaatctgttcaactaaaatcagcacattggacgagatgtgcaatttcaccttaa

SEQ ID NO: 9499 - DNA, 2300 bp, Homo sapien
atgtacacacacatatttttgtatccttcaagcatttgttctaagatttcaaattacaaaccattaatctcttgatgtcctaattgtctaacaaaatcaaaaagaacaatattgaattttatttgttcttaggcagatcgaaattggtgcatattggaaaccataatgagtattctgggagttaagccttctcttccccacattattaagtatacattctctaataatatttggtggactaattctctgggcaatgaataatttcatcttggttttttaactgtaattttaacaactttatgttttaagaagagatgatgtgtgtaaatcaattagcaaagtggagtatcacaggctgattatgcaccgtgaatgtgaaaagcgagcaaatttagacttcccttagaaggcaggtcaggagatacagcaaattgggatctgcgaagctgaacttcctcttgttaccagattttactgcttctcagtgccctcctgctgtaaacattcccaccaggtgactccctatgtggggaaacctgttgagtaactttttttttttaactcctaaccatttctgcattacagttctcctgctctggagattttaagagttgaaaactctttgggaattcttgtaaaaagtacattttgtctcatccccaaagaatttcccaggccccttacagaatatggttgtaacaaggcacatacatactctctggcagcagttctggaggtggggctttgagatggggtcaggaatgagttgttgggctatataatgttctgcagtgctagctgccagctcctcctcacagatgcacctccggtgctgtgggtcgtaatctagaataccatcactaggtgactaagtcatactcacattcctttcattgacctggtggccataaattgtttcctcccatgcctaaagattcacagagaacagaaaagtactagattactacattattagcagactaatggtgggaaatgtctatagtcatcgacctctatgtttattttattttattttatttttttattttgagatggagtttcactcttgttccccaggctggagtgcagtggcgtgatctcggctcactgcaacctctgcctccctgattcaagcgattctcctgcctcagcctcccaagtaactgggattacaagtgtgcaccaccacacgtggctaattttttgtatttttagtagagacaggatttcaccatgttcgccaggctggtcttgaactcctgacctcaggcgatccacccgcctcagcttcccaaagtgctgggattacaggcgtgagccactgcacccaggttctatgttgattttagatgtaatagatgagttaattgtaatattcaccccagtgtcctttgcaaggaaaaaaatgcaattatccttattccttatgacaataaaatgcatgttcttttatgttgaggctctgttttgagaagtaaaataaattatgtctttagtacaatatatgaattgtatatggaaaaacatgctttttgaaagtcccaccaaaaaggtttctttatggtatcattaaatataatttcagtttttatatgtatacatcatccctgtctctctttccaggccgggcatttatatatgtatggtcagtatattttctattattggcacttggcatctcctttcccctgctccagaatggtcttttctgataaaactcacaagctttgcattaccacaagctctgctgctagaagagtgaatcacaagaatgttgtatgcttggggtgttctgtgtgcctgtgttgatgtgtctgtattctaatgagcaatccagttttacactagcatacagatatttaactctgaggtatgtgtccacaaagctgcttttgtcatttcactagtcagtgggttttgcttgtgagagttagggggttgatttgacccgaggcttcttagaagaattttttaacattccaagtttatctaatagatgtgctatgaagagaacagaatgatgggactttaaaaaaatttttacagttatttttattttgtagaatgagctgaaagccagtggtggcgaaatcaaaattcataaaatggagcaaaaggagaatgtgcccccaggtcctgaggtctgcatcacccatcaggaaggggaaaaggtaggttgaaaagtctgatgtccagttgccaaggaagcatgtgttctaaattagatgcttgaaattagaaacaactctaactctaggctgtagagtgtctgggaatttggtaacagctgccaggacaga

SEQ ID NO: 9500 - DNA, 2300 bp, Homo sapien
ggctaacgtggtgaaaccccatctctactaaaaatacaaaaattagccagcatggtggcaggcacctgtaatcccagctacttgggaggctgaggcaggagaatcgctggaacccaggaggcagaggttgcagtgaggcaagattgcgccactacactccagcctgggcgacacagcaagactccgtctccaggaaaaaaaaaaaagattggtattcaaaatacaatggagggtccttcccctttacgttgtcctgtgcttaacgggtaagctgatgctacagaactgctaaattgaagttaccttatagccaggcgcaggagctcacaccgtaatcccaacactttgggagcctgaggtgggtgggtcatttgaagtcaggagttcagaaccagcctggccaacatggtgaaatcccgtctctactaaaaatacaaaaaaaaaattagccaggtgtagtggcacacacctgtaatcccagctactagggaggctgaggcaggagaatcacttgaacctaggagatggaggttacagtgagctgagatcacaccactgtactccagcctgggtgacagggtgagactccatctcaaaaaaaaaaaaaaaaaaaggaagttacctttcaaatgccatttattcacatatatatgtatacacacacatagatacaaatgtacacacacatatttttgtatccttcaagcatttgttctaagatttcaaattacaaaccattaatctcttgatgtcctaattgtctaacaaaatcaaaaagaacaatattgaattttatttgttcttaggcagatcgaaattggtgcatattggaaaccataatgagtattctgggagttaagccttctcttccccacattattaagtatacattctctaataatatttggtggactaattctctgggcaatgaataatttcatcttggttttttaactgtaattttaacaactttatgttttaagaagagatgatgtgtgtaaatcaattagcaaagtggagtatcacaggctgattatgcaccgtgaatgtgaaaagcgagcaaatttagacttcccttagaaggcaggtcaggagatacagcaaattgggatctgcgaagctgaacttcctcttgttaccagattttactgcttctcagtgccctcctgctgtaaacattcccaccaggtgactccctatgtggggaaacctgttgagtaactttttttttttaactcctaaccatttctgcattacagttctcctgctctggagattttaagagttgaaaactctttgggaattcttgtaaaaagtacattttgtctcatccccaaagaatttcccaggccccttacagaatatggttgtaacaaggcacatacatactctctggcagcagttctggaggtggggctttgagatggggtcaggaatgagttgttgggctatataatgttctgcagtgctagctgccagctcctcctcacagatgcacctccggtgctgtgggtcgtaatctagaataccatcactaggtgactaagtcatactcacattcctttcattgacctggtggccataaattgtttcctcccatgcctaaagattcacagagaacagaaaagtactagattactacattattagcagactaatggtgggaaatgtctatagtcatcgacctctatgtttattttattttattttatttttttattttgagatggagtttcactcttgttccccaggctggagtgcagtggcgtgatctcggctcactgcaacctctgcctccctgattcaagcgattctcctgcctcagcctcccaagtaactgggattacaagtgtgcaccaccacacgtggctaattttttgtatttttagtagagacaggatttcaccatgttcgccaggctggtcttgaactcctgacctcaggcgatccacccgcctcagcttcccaaagtgctgggattacaggcgtgagccactgcacccaggttctatgttgattttagatgtaatagatgagttaattgtaatattcaccccagtgtcctttgcaaggaaaaaaatgcaattatccttattccttatgacaataaaatgcatgttcttttatgttgaggctctgttttgagaagtaaaataaattatgtctttagtacaatatatgaattgtatatggaaaaacatgctttttgaaagtcccaccaaaaaggtttctttatggtatcattaaatataatttcagtttttatatgtatacatcatccctgtctctctttccaggcc

SEQ ID NO: 9501 - DNA, 2300 bp, Homo sapien
gttgagggaagaaggaagaagactgaagagcttattttggcttttgagggaagaaagaagaagactggagagaaatatcagctgtgttcattaacgagggttttttttgtgattttttactgagatataactcacataatataaaatcaccattttaaagtatacaatcttgtgatacttagcatattcacaaggttgtacaaccattaccactgtttaattccagaacctttccatcaccctgaaaagaaacttcatacctgtgtagtcactcccaacttcccctgctctcatcccctggcaaccacttagctacttcctgtctttatgtatctgcctattttggaaatttcatatgaaggagtcatacagtagatcttctacttaatctttaatccttacgatgtactgttttcctaaagaagtagaatagtagataaggaaaagggagagatcacaagaaggtgacgtgctcagtaagcatgaaaattttgatattcagctgggtgtgatggctcacacctgtaatcccagcactttgggaggccgaggtgggcagattgcctgaggtcaggagttcaagaccagcttggctaacgtggtgaaaccccatctctactaaaaatacaaaaattagccagcatggtggcaggcacctgtaatcccagctacttgggaggctgaggcaggagaatcgctggaacccaggaggcagaggttgcagtgaggcaagattgcgccactacactccagcctgggcgacacagcaagactccgtctccaggaaaaaaaaaaaagattggtattcaaaatacaatggagggtccttcccctttacgttgtcctgtgcttaacgggtaagctgatgctacagaactgctaaattgaagttaccttatagccaggcgcaggagctcacaccgtaatcccaacactttgggagcctgaggtgggtgggtcatttgaagtcaggagttcagaaccagcctggccaacatggtgaaatcccgtctctactaaaaatacaaaaaaaaaattagccaggtgtagtggcacacacctgtaatcccagctactagggaggctgaggcaggagaatcacttgaacctaggagatggaggttacagtgagctgagatcacaccactgtactccagcctgggtgacagggtgagactccatctcaaaaaaaaaaaaaaaaaaaggaagttacctttcaaatgccatttattcacatatatatgtatacacacacatagatacaaatgtacacacacatatttttgtatccttcaagcatttgttctaagatttcaaattacaaaccattaatctcttgatgtcctaattgtctaacaaaatcaaaaagaacaatattgaattttatttgttcttaggcagatcgaaattggtgcatattggaaaccataatgagtattctgggagttaagccttctcttccccacattattaagtatacattctctaataatatttggtggactaattctctgggcaatgaataatttcatcttggttttttaactgtaattttaacaactttatgttttaagaagagatgatgtgtgtaaatcaattagcaaagtggagtatcacaggctgattatgcaccgtgaatgtgaaaagcgagcaaatttagacttcccttagaaggcaggtcaggagatacagcaaattgggatctgcgaagctgaacttcctcttgttaccagattttactgcttctcagtgccctcctgctgtaaacattcccaccaggtgactccctatgtggggaaacctgttgagtaactttttttttttaactcctaaccatttctgcattacagttctcctgctctggagattttaagagttgaaaactctttgggaattcttgtaaaaagtacattttgtctcatccccaaagaatttcccaggccccttacagaatatggttgtaacaaggcacatacatactctctggcagcagttctggaggtggggctttgagatggggtcaggaatgagttgttgggctatataatgttctgcagtgctagctgccagctcctcctcacagatgcacctccggtgctgtgggtcgtaatctagaataccatcactaggtgactaagtcatactcacattcctttcattgacctggtggccataaattgtttcctcccatgcctaaagattcacagagaacagaaaagtactagattactacattattagcagactaatggtgggaaatgtctatagtcatcgacctctatgtttattttattttattt

SEQ ID NO: 9502 - DNA, 2300 bp, Homo sapien
cttctccagggttctacaaattgtttcaatccttgctgccactatccgtaattaatggtatagtttcagctatcctgcaactatcctgcatctttgtcttatttaaaagaagaaaaaaaaacccagcagaatttaccatgttattttatggcaggtaatgatgaactttgctgatgtgtagttacagtgtttcaagcacttgtattttgctttttctttcttgtttttttccccattaatctttgggtaaaaatctcttgtttcgcatgtaactatcattagagctgggtttgcctttcttctcattttgtccttataaggccatcctgttttatcacttcctgcttcagctcctgagtttttctctcttcccctctccctctccctctgccgggtggatgctttctccatgtggcaaggctgtaactgttcacagctgtctgaaacagcagtggaccaggagcagcttggagttttaactttcattttacaaagaacaacatgtttgaatgtttcagcaggcaagttataactggcatctacttcttgttcttctagaacaccgaaaatctctcccagcactttagaaaggggaccctgactgtgttaaagaagaagtgggagaacccagggctgggagcagagtctcacacagactctctacggaacagcagcactgagattaggcacagagcagaccatcctcctgctgaagtgacaagccacgctgcttctggagccaaagctgaccaagaagaacaaatccaccccagatctagactcaggtcacctcctgaagccctcgttcagggtcgatatccccacatcaaggacggtgaggatcttaaagaccactcaacagaaagtaaaaaaatggaaaattgtctaggagaatccaggcatgaagtagaaaaatcagaaatcagtgaaaacacagatgcttcgggcaaaatagagaaatataatgttccgctgaacaggcttaagatgatgtttgagaaaggtgaaccaactcaaactaaggtaagaattgggcgggtttgaaacttgagaaagccaattcaagcactaaacaaagctgtttttccaatctagctattttgagtagaggcgaatatgtggtcagtatgtcttttgattccagttagataagttaatagtctcaaatgcattatttacatagatgctaagatttgtgagtctctgacacaatttcatgttaaatcaggttcacactgggattcaaattggtatctagaaatgaagagagtttaataccgattggattatgtgtttttgtacacttgcccttttaaattgtcttcctgtgttctttatcatttgtagctttgggggtggaattactgctgaatagctctctgcttggacacagctgcagactgagtgttaaggccggagtttaacattaagactgaggcttacttgtctctgctagctgaatcccttctcttcttctcaacttcctcatctgtgccttccaacaaatgttttctatcagctaaaatcctctctcaggcaaaatcaatgaagatagccagactagctatagctttcgggagttttgacttgcaaatgcacagggttgcgttttcctacaactgctaatgaaatttgatccttcatgtggattgcagacctcgtccccagagggaattacttaactagaaaatgagttacatatgctggtgatttataacacaatccagaggccacagagctggtaaatttttccagttttctcatactttcctatatatctggctttgtacatggggatggttcgttacaacagtcgttataatgaaataaacagacctgatggggagcaaaaccatctgttactctagattccacctagatgggaaagctggattttttttaagctaaatatttggcccaagtccctatgtttggaaagtaatataataatattaagcattctttctgagataaaaaataactcatcctgtagtcttcagttatattagatgtgatattgtcaatcccttcccatgacttgcagtgccagtcacttttctacttagaattagaaaagttcttgaatgtttgcgggtcatgtttgaagttgtgcgagtttttgacgatgtgtaaagctacaacacttctctgtgcatgagctttagctctactttaacagtgaaaccagttggcaagagatgtaaccacaaagcagttttataacgtttcttaactctcttccctctcaagtttttagacctttagtcctgccaactccttctttcccctttatggtttta

SEQ ID NO: 9503 - DNA, 2300 bp, Homo sapien
gctgttctgtaattccttcttttccagcaagaaaactttttaagcttcttatatctctgatgcatacattcttcccccaatggatcattttgtaagctaaaatttaaacactagaatcaagcagttctataatttcttttcaagccttatttctacttgatgaagtggctttcaagagtatattcagaagagtaatagggtgagagacttaattcccaaaatagctgctaatcctgtttaattcctaggttgtttgtcctttctttcttagttgaaagactggtgagtcacagactacaggagagaaggtattggagtttgcagtttgttgggaaggtggtgctgttcaatttatttaggagtacagtcctttcaaagtacgggacatttaatttaatttaatttttctttttttttttgagacagagtctcactctgtcacccggactggagtgcagtggcgcgatttgggctcactgcaacctccgcctcccaggttcaagccatttttctgcctcagcctcctgagtagctgggactacaggcgcgtgccaccacgcccagctattttttgtatttttagtagagacgtggtttcacggtgttggccgggctggccacgaactcctgacctcaggtgatccacccgcctcggcctcccaaagtgctgggattacaggcatgagccactgcgcccagccgggacatttaattttcaacaagcgtgtttcctctattatggaacaacagtgacaatttccaggttgttttcagtctgtcttacatgtataaattaattccatttttggccctagtgaaagtgaactctcttagatatgtaaatgtgtgtcctttgatcatctgagtgataagtagtggtatttgcatttgaagcctgcatattttacaaccagaggatctgtaaaacagtgaatttcttgataactgagaattttttttttttttttggttgggggatggcgtctcactttgtcacccaggctggagtgtagtggcgcagtcttggctcactgcaacctccacttcccaggttcaagcgattctcctgcctcagcctccagagtagctgggactatgggtgtgcaccactgcacccagttaatttttgtattttttttagagacagggtttctccatgttggtctggctggtctcaaactcctgaccttgtgatccgccggcctcggcctcccaaagtgctgggattacaggcgtgagccaccgtgcctggccctgataagtgagaatttatacacagataaacttgtagagaagagcagggaaaaaaaaaagattaaattcttatgaaaaataaaatttgactgctcatatgcatgtaaattatgtcagatataactaaatatttatgcaaatacttggaaagtctggggacttctccagggttctacaaattgtttcaatccttgctgccactatccgtaattaatggtatagtttcagctatcctgcaactatcctgcatctttgtcttatttaaaagaagaaaaaaaaacccagcagaatttaccatgttattttatggcaggtaatgatgaactttgctgatgtgtagttacagtgtttcaagcacttgtattttgctttttctttcttgtttttttccccattaatctttgggtaaaaatctcttgtttcgcatgtaactatcattagagctgggtttgcctttcttctcattttgtccttataaggccatcctgttttatcacttcctgcttcagctcctgagtttttctctcttcccctctccctctccctctgccgggtggatgctttctccatgtggcaaggctgtaactgttcacagctgtctgaaacagcagtggaccaggagcagcttggagttttaactttcattttacaaagaacaacatgtttgaatgtttcagcaggcaagttataactggcatctacttcttgttcttctagaacaccgaaaatctctcccagcactttagaaaggggaccctgactgtgttaaagaagaagtgggagaacccagggctgggagcagagtctcacacagactctctacggaacagcagcactgagattaggcacagagcagaccatcctcctgctgaagtgacaagccacgctgcttctggagccaaagctgaccaagaagaacaaatccaccccagatctagactcaggtcacctcctgaagccctcgttcagggtcgatatccccacatcaaggacggtgaggatcttaaagaccactcaacagaaagtaaaaaaatggaaaattgtct

SEQ ID NO: 9504 - DNA, 2300 bp, Homo sapien
gaattattagtaaaatgaagaaaaaaactacaaagtgatgagtttttaatatttattatatttaaaaatttttttttagaaatagggtctcactctgttgcccaggctggagtgcagtggtgtgatcatagctcactgcaacatcaaacttctagcctcaagccatcttcccgccttagcctcccaaagcactgggattacaaatgtgactcaacatgcctggcctattacttttatttttaagataatttaattgtagcttatataatttgatttctaataatggttgtgcttatgacctggctcataaaatccctgaaaatttagcaatcaacctaatgctagctctatcttcaaaaggaggctttgggaaagcaagtaatttttgtatccactaaagcacagagctaaaaaaaattggggggaggggagacatctattgagggaacgccacatgcagggtaacgtattttctggagtactatcctgtattgatattgtatgctctttagcattcccatgctgtctgccacttttgctggagtcttgatacttgatactgttaatgcaaaataagtagcaggccattagtttggagttgtttttgtacccagaaagcaacccaaaatttagaggtattccttgcaccttttgtttgttttgtttttttgagatggagtctcgttctctcatccaggctggagtgcagtggcgagatctctgctcactgcaatctccacttcccgggttcaagtcattctcgtgcctcagcctcccgagtagctgggattacaggcacttaccaccacgtccggctaatttttgtatttttagtggagacggtgcttcgccatgttggctaggctggtctcgaactcctaacctcaggggatccgcctgcctcagcctcccaaagtgctgggattacaggtgtgagccaccgcgcccggccccttgtacctgattttgaatggagtttcaaccaatcacaaacagacaaccagccaagtggttatataattagggacctcccatgtgaccatacccaaataaggcaaacgcttagctgtagccaatcaaatttctttactttcgtgttcagcctataaagtttgatgcctgggcagctagagcaggggtgtctgagcctcttttggttctgactgttgtccgattcaaaatctaagtttgttttgtctgaaatttttatttctacaatacctatccagaaatcagtctaggctggatatttgaaggaagaagggaataactggctggcatattcatcacctgttggaaatctctcttctcacacattttcattaacttcttgaggaagtgtaattacaagcgttttcccacgagcagcccctactaataacgcatcaagctgcatgaattccgaaaagcttcagaaaacttgtggtctgaaaccctactatgcttgaggtacaggaaagaaggatactatcaaaaggcatcatgcagctggcacggaactgggacaagaatttgggggcaggatggccaagtgctaggccaattgacggtctccaaaccattagcacagctcctattctgaatggaggagtaaaaacagctgttggagaacttggacgtcatctgcccttgtcaaaccgttttcaggattaatgtacttaattcagctttttccactacaccacacagcctcctgtaaaacaccctccctgcacacaacttacccccaaagcaccaggaacctagctggctagagttgagcttaggaaaaacctgagtggctccagagtcaaactgcgataacgttgagtcagaggagttaaggacaaagtagagctgcacagaggcccacgtcgtgcaagtgcgtgtctccttcagagaaaagcgtgccgaggtagactaggccccgggcagcaaaaaccctgtcccgtcgccagcgccccgcaccgccagagcgactggagcagacgcgagcgctgggcacgtagccggtggcgcgcacgctcagcccgaggccgcacgggaggctgtctggcgtgcgcgcccccgcggcggtgggcggggtccggggcggggccgcaggagcagtaggtgttagcagcttggtcgcgacaggtgcgctaggtagagcgccgggacctgtgacagggctggtagcagcgcagaggaaaggcggcttttagccaggtaagggccttctctctccacaaccggagagtgcgggaagaccccggcttctctccacaccctctttctccttcgacttttggggcggggggagtgcaaggagtgtgagtccc

SEQ ID NO: 9505 - DNA, 2300 bp, Homo sapien
gcgtctgtaatcccagctacccgggaggctgaggcaggagaatcgcttgaacccgggaattgcaggttgcggtgagccgagcttgtgccactgcactccatcctgggcaacagagtaaaactccatctaaaaaaaaaaaaaaaagcagaagtttaaaattttcaagtacaaattaccaaatttttttttatggcttgtgctttttgcatcctgttttattttatttttaagacatggtctcattctgttgcccaggctggagtgcagtggtatgatcatggctcactgcagcctcaactacccagactcaagcaatcctcctacctcagcccgccaagtaactgggactactggtgcacaccatgacgcccaggtaatttttgtatttttctatagagcctcccaaagtgctgggattacagcatcctacctaggaagtctttttcttgtccaggtgtggtggctcatgcctataagcccagcactttggaaggctgaggtgggcagatcacttgaggccaggtatttgagaccagcctggccaacatggtgaaacctcatctctactaaaaatacaaaaaaaatagctgggtgtggtggcacgtgcctgtaatcccagctactcgggaggctgaggcaagagaatcgctgggacctgggaggcggaagttgcggtgagccgggatcgctccagtgcactccagcctgggtgatggagggagaccgtctcaaaagaaaagaacagaaatatttgtctaacccaaggccccagagattttctcctatgttttatagatttagaagttttatagttttagctctaacctatagttaagggtcagagtttttccatgtgaatatccagttgttccagcactattattgaaaagtctatcttttcccccattgaattacattggctgctttgttgaaagttaaataaatatatttgtgtgggtccatttttggaaattctgttctattccattttactatatgtctatgataatctttttaataaagaaaactattttactttggtgaaaagaactctgaagttatttttaggtattatgaaaaaaggctgaatctttttttttttttttttttttgagatggggtctcattttgtcacccaggctggagtgcagtggcacaatcttggctcactgcagcctctgcctcctgggttcaaggaattttcctgtctcagcctcctgcgtagctggtattacaggcatgtgccaccatgcctggctcattttttatttttagcaaaggtgaggtttcaccatgttggccaggctggtcttgaactcctgacctcaggtgatctgcccgcctcagcctcccaaagtactagggtgacaagctagagacactgcgcccggccaggctgaatgttatacgtgtgaacaattggcattcttcccaaacatctcttactctaaccggaaatatatgtgtatattaaaggtattttctgtaactaatttctaggatagtaagttatcattgtattgaatgtgcatttttatgcgtaagaagtaattaggcattctttgcctgagcttcatttttctccaaatataaaaaagggagtaaaataaactcatcatgtggaaatctttaaaataaccaaaaccaggttctattaaagaataatgaaaaaatatatagaacatttcaaagggtaaaccagaataaattctgttctttgggaacaacagttagccacataaataccacaaatcaaggaaggggatttcctgacttccgcttccaagcaattccaataaatgaaggaggaagttattttcctttttaaaaaacttactgttggcaggattagtgtacttcctttcactcttttaggatgttaaacgcacatacacgaatattcctgtacttcataaacctttgggattttgtcaggttctgagtatgcagattttttatttattttttttttgagatggagtcttgctctgtcatccaggctggagtgcagtggcacgatctcggctcactgcaacctccgcctcccaggttcaggtgatcctcctgcctcagcctcctgggtagctgggattacaggcatgcactaccatgcctggctaatttttgtatttttggtagagacatggtttcaccatgttggccaggttagtctggaactccaacctcaagtgatcctctggcttcagcctcccaaagtgctgggattacaggtgggagccatggtgcccaggtcagaaggttaaattgtttcagtaaaaagtcattctgttgtggaaatg

SEQ ID NO: 9506 - DNA, 2300 bp, Homo sapien
aggagatcgagactgtcctggcaaacacggtgaaactctttctctactaaaaatacaaaaaattagccgggcgtggtggtgggcgcctgtagtcccagctacttgggaggctgaggcaggagaatggcgtgaacctgggaggcggagcttgcagtgagcctagatcgtgcctctgcactccagcctgggtgacagagtgagattttgtctcaaagaaaagccttcatgtctagttgctgattgatgaattccatgctgcataaaagatgcaagtgagagagaaagaataatgcaaatttagtttagttgacaactaaactttgggaggccgaggtgagtgaatcacttgaggagtttgagaccagcctggccaacacagtgaaaccctatatctaccaaaaatataaaaaattagccaggtgtaggccgagtgcagtggctcacacctgtaatctcagcactttgggaggccaaggcatgcagatcacgaggtcaggagatcgagaccatcctggctaacatggtgaaaccccgtctctactaaaaaatacaaaaaactagccgggtgtggtggcgggcgcctgtagtcccagctactcgggaggctgaggcaggagaatggagcaaacctgggaggcggagcttgcagtgagccgagatcatgccactgcactccagcctgggccacaggcgagattccgtctcaaaaaaaaaaaaaaaaaaaattagccaggtgtggtggcgcatgcctgtaatcccagctactcgggaggctgaggtagaagaatcgtttgaacctgggaggcagaggttacagtctgctgagatggcactactacactccagcctggacaacagagtgagactctgcctcaaaaaaaaaaaaagaaagaaagaaaggaaggaaggaaggaaggaaggaaggaaggaaggaaggaaggaaggaaggagaaagaaagaaagaaagaaaaaacaatacatacacctgtagtaaaactatgtaaaaatagataacacaaatatgtaaaattcatgattgtcatttcctctggaatgggacagtggggaaggaaggaaccaggggtgggggacatcaaagaggacttcaaccttctgtaatgcttttttattattaaaaaaattggaagcaaatattaaacaaaaattagccaggcgtggtggcgcgcacctgtaattccagctactcagggaggctgaggcacaagaatctcttgaacctgggaggcagaggttgccatgaaccaagatcacaccactgcactccagcctgggtaacaaagtgagactctgtctccaaaaaaaagggaaagaaaagaaaagaaaagaaaaaagagtaagcagtgcaaagagtgtgatcctcatccaaatgatatcatccaagttacttcatccaaatgatatcatccaagttactacatgtctaggaaaagttaaggggcagctgaggaagtagttgtaacctttattccattacaggcttaaaaatacttaagcaaaaccccaggaagagagaagaaccaggagttatatttgacacacctagatttttttttttttttttttgagacagtttcactcttgttgcccaggctggagtgcaatgacgtgatctcggctcaccacaacctccgcctcccgggttcaagtgattctcctgcctcagcctcccaagtagctgggactacacgcatgtgccacctcacatggctaattttgtatttttttttttttagtagagacggggtttctccatgttggtcaggctggtctcgaactccgacctctggtgatccacctgcctcggcctcccaaagtgctgggattacaggcatgagccactgcacccggccaacacatctagattttaagcttatttaagcagggctatatcttctgtttattttagcattcctgttgtctattatttcctaccctccttcccccctcacccttctaccatggcagcatatagaatgaccagttctctgcacatagtaagcattctttacatgtttgatcaatgataatgtcacaatgggtctattgtgacatcaacaggacgggaatatcatgggagccaccaattagtagcagagtatgccacaacttctaggatcaggaaagacctctcctagcttcctactggatatctttattagcatttttgtagattctgtgaaaaagaagaaataaaacgaaatcacccacattttcaaaatgttcttcaaaatgaaaaatgagatagacaatgaccctgaatcagaaaaatgcatcaagga

SEQ ID NO: 9507 - DNA, 2300 bp, Homo sapien
ccacgcctggccatgaaggcttcttaaagtcaatttttaaatcctgcttccctttcaattcgacaagcatttgttgaaacactatgcagcttacattatcctaaactgaagaatatatgatagggttcctgtgaagaaactaaaacaaaaaagaaaagatttaagatagaatataataatcaagtgctaataagggacacgaagaagagatctgtagaagcagaatctttgagaaaaccttatggagagagaaggttgattgacaaatggaggcaatccaggtaggggcaacaccttgagccatggctttggcggtgagtgctaatgagtttgcatcttagggggaaagtaaggagattggtttaatcactgagatgacttcacgggaatttactgaggaccacattagggtgggcctgagataacagatatcagcaatttggtggtggaattaatttggtatctgaggagattccatttgcggcaaagcaaggaggatttcatgagatcagaatggcaaagtcttgaaatcaagtaacagtggtttggtgaaaatgaaaccttcactttgggaagattttttaaataatagaatggaaaaatccattggaaaagatcaagacatgattatttcatttttatttattattattattttttagagacagagtcacactctgtcacccaggcttgagtgcagtggcgtgatcttggctcactgcaacctctgcctcccaggttctagcaattctcctgcctcagcctcccacgtagctgggactacaggcacacactgccatgcctggctaattttttgtattttactagagatggcatttcaccatgttgcccaggctggtcttgaactcctgagctaaggcaatccacccgcctcggcctcccaaagtgctagaattacaggcgtgagccacggtgtccggccaatttttattcgttactattattattactatatttgagacagagtctcactctgtcacccaggctggagtgcagtggcgcgatgttggctcactattaactccacctcctgggtttaagcgattcgcctgcctcagcctcccgagtagctgggattacaggtgtgcaccaccacacttggctaatttttgtatttttagtagagatggggttttaccatgttggccaggctggtcttgaactcccgaccgcaagtgatccgcccgcctcagctttccaaattgctgggattataggcgtgagccacccttcccagccaagacatgattatttcaaaagatgagtgtttgaactaggacatacaagtgggagcgatctatcctactacatattgctaaagacaataaggaatttggaccatctaacaaaaattatagataattttaaaaattttgtttttattgtatttcgtttgaattaatgacagaacgtcaaagaagacactgtccagattaagtgttattactggtatattaagcggtgacatgggtaattaattcaaatgagcctggggcaaagttctttaaagggaaacccgacctcctagagggcttcttcaactgtaaaatggggatgataataatagtgtttattgcatagaattgttttaagatcaattaacataaaatgcttagtatagtgccaaacacaatgtaagcatttaatatacattagctgctattaacatatttgctagtatcatagttttttgttttttttttcttgtctacttttcttctgtgagccaccacttttcggcagggttggtttgttcagtacacttcgccaaggtcggctttaaaaatcaaatctagattgtgaactatgaaaactgcggaattatcagtgctgtgtagctatctgacaagtgataaaatgtgtcattacgatttttacacatccccgtgccacagaatggcgtctccttctaatcgttccccccgacagatgatagtacatcccacactgctgctggaaaagatagtgcaaaagttgagcgcgccgagggctctcttttctcccggaaacaatttttccctagacccggaagcagttgttgtttcaagggaggtgggactgggcgggtcaggccgcagcggctgacggcaggggaggagccgggtccactgccgggtggaggggcaaggcgagtgtgtgtccttatcctagcaattggggcgcgggcctgtgagccagttggagttgcggcggcgggaacgattgggctgagcagaggacgacatgttgcttttcgtggaggtgagtgcattatgctagtctcgtcctgctcttaggag

SEQ ID NO: 9508 - DNA, 2300 bp, Homo sapien
agccaggagctgggtcttagtgaggtggaccccagctttgcctgccagctctgcaattcacttcctagatcatttgttcccctgggacacaaactactagtttgtcactggaacttctctgggcctgtctcagaatgggattaacataaaggagtggaactgttcagcagaggcagggagaaataagtaagttccctcctcctcagcttctctttccaacctccccttgcccatttcctccttcttcccctgccggattccagggttacaaatagaggcttctttcttccgtttaattccatagttacccaccctagtttgcccttctctagaatctctctactctcatattgcatccggttctgtacctcctccccgcctccacccactgtacccaattgtcttcctgaccaaggaggaggacaggaagtgttgaatgtcaggatcaaatgtcaggatcccccttccctgagggaagaggatagggagatctctgggctgaggctgctgtctccttcccactgtcctttctgcaggtcctcagatggcacactagggtgggcttgctggtgggtaggcatcccacctccagtccagtggaatgcttagttgtacgtcttattatgctgtaatgtttattttttagggcgtacatatgaatagcaagttttgttgaaatagattatccccctccccaacacacaaataaattatgtgatacctaaattcccacatcacattcatcaatcaattcagcttcaaatcagtggctaccaaaggcagagtggtgggagagtactgctctcctgtgggtacaaaacaggtgtattttctgtagagaattttgaaacaataataaagatgactgaaaggtatacgcttgttatcctacacttagaaattctaaagcgtgtaagtgataaaatactcctcactacttccaccatttcaaggctcagcccctgctctcaagatatgaatgaacctaggcatggaacagggcattatgtttggggtgtgtgtgtgtgtgtgtgtgtgtgtgtgtgtgtgtgtgtgtgtgtggtttttttttttttttttttcttttttgagaccgagtctcactgtctcccaggctggagtgcagtggtgcaaactcagctcactgcaacctctgtctcccaggctcaagccattcttcaacctcagcatctgaagtagccgggactacaggcgcccaccaacacgcctggctaattttgtatgttttgtagagacagcgtttctctgtgttgcccaggctggtctcgaactcatgagctcaagtgatccgcccgccttggcctcccaaagtattgggattataggaatgaaccatcgtgccctgcctcaagagattaccttaaatggcactatttaaagtagttatgctgtggactttaagaacatacacttgcaggacagatggaaaaaaatttacaatataaagcacatcactgcttttatcttgtgataaaatttctagttatagaattgttcagactctaaagtatcacagcttagatggcaataaaattttataatattctggaaaattactgtagataactaaaaaatttgctgtagatgaaaaaatacacaagtgtctcaaaagttatgtaaatagtttaaattttgtgacatttgcaggtaggttggggtaaagcagcatttctattttatttatttttctgagacagggtctcctctgtcatgtaggctggagtgatggtgtgtttatagctcactgtagcctcgaacttcctgggcttatgtgatcctcctgcctcagcctcccaaagtgctggaattacaggcgtgagccattgcacctaggcagtatttctgttttaatatttagagatacctattttttattatataggaagctaaattttatatagatgtctcacattttcaagttgatcaaaactttaatattatttattatttgttaaatataattattgggtttctcccccacttttaagtaatggaaaagtgattttatctgaatctgtaattttcatgctctgattttaaaaatttacaaatagatccttcgattatttagcaggtagcatctaaaggaactggtttaaatcctaatgccaaagtatggcaagaaattgctcctggaaatactgatgccaccccagtaactcatggaactgaaagctcttggcatgaaatagcagctacatcaggtgctcatcctgagggtaagtcttaaatatttggtcataaaaatcacagtttggttaaatgtatggccaagcaag

SEQ ID NO: 9509 - DNA, 2300 bp, Homo sapien
tttacttctttcattctgtatggtttgagattgatcactgttaatacagatgattgttgttcattttgaactattatgtgatattctattgtaggaagtaaaatatttattcattgtactgttaatggacattttgccattataaatcttcatgtgagcaagaacttttctaggatttatacatcagcttgtgttcttttaaagttttaaagtctttcgagtgttttttgagatggagtgtcgctctgtcgcgcaggctggagtgcagcggcatggttttggcttattgcaacctccactgccagggttcaagcgattcttgtgcctcagcctcctgaatggtgaatacaggcgcgcgccaccatgcccggctaatttttgtattttcagtagagacagggtttcgtcttgttggccaggctggtctctcaaactcctgacctcagatgatccacccacctcggcctcccaaagtgctaggttgacaggtgtgagccactgcgcctggtcagtgtttcaagttttgaagaaacagactcatatattttttttacacattctgtgcactaatcctttgtcagttacacgtagtagaaataatctttcacttctgtggtttcttttccgtctttagtgcctataggttgaaacaagttcttaattttaatctggtcctattagtgttttctttatagtttgctgtttttatttcatgcttaggaaatgatctagcttccagatcatgttcttatttatattttctaccaagtttttctgaatgttactttctaaacctgttgaaatttttattttatccatcggttttaatttctagggctcttttctaaattctatgccagcagtataaatacacataacagcgtttaccatcttaaccattttaagtgtgtacagttttgtagtattaagtacctttacatggttgtgcacctaagctccagaacttacaatctttcaagactaaaactctatacctattaaaccattacctgttcctcctttctcttatccttcagcagccactattctactttctgtctctgaattgactactcttagtaattcatataagtagaatcatacagtatttgtctttctatgactggtttattttacttaacatcctcagctttcattcatgttgagcgtgagtcaagatttcattaatttttttttaatgtagcctacaaacttttttttttttgagacacggtcttgctctgttcccaggagggagtgccgtggtactatcatggttcactgcagcagcttcaacctcccagactcacgtgatcctctcaagtagcagggacaacagatggacaccccccaccctagctaaatattttactttattttgtagagactggatcttgctatgttgtccaaggctggtcttgaactcctgggctcaagcagtcctcccgcctcagcctcccaaagtgctggaattacagtcatgagcccctgcatccatccctatgtttaacttttttttttttttgggacggagtctcgcactgtagcccaggctggagtgcagtggtgcaatcttggctcactgcaacctccgcctcccaggtcctggttcaagcaattctgcctcagcctcccaagtagctgagattacaggcatgcaccaccgtgcccagctaatttttgtatttttagtagagatgggatttcaccatgttggccaggctggtcttgaactctgaccttgtgatccacccgcctcagcctccgaaagtgctgggattacaggtgtgagccactgcgcccagcctatttaactttttaaggaactgctacattgctttctaaagcagtgcatcattttacattgccaccctctatgtatgagttttaatgtctccatatcatccccaacatttgttaatgtttgtcttttttttaattataaccatccttgtgggtatgaagtgatttttcaccgtggtttagctttgcattttatgatgactaatgatgttgaccatcttctcttgtgcttattagacgtgtatatcttctttggaaaaaggtctaagtgtaattttgaaaaatctttttactttaaggataatgaagagttgacaattagttgcccagtgcctgcagatgagcagacagaatgcacttctgcccagcaactcaatatgagtaccagttctccatgtgctgctgagcttactgcattaaggtacaagttatagtatagaagatcttcaacattaaattactttttctggccgggtgtggtggctctcacctgtaat

SEQ ID NO: 9510 - DNA, 2300 bp, Homo sapien
atagtttgctgtttttatttcatgcttaggaaatgatctagcttccagatcatgttcttatttatattttctaccaagtttttctgaatgttactttctaaacctgttgaaatttttattttatccatcggttttaatttctagggctcttttctaaattctatgccagcagtataaatacacataacagcgtttaccatcttaaccattttaagtgtgtacagttttgtagtattaagtacctttacatggttgtgcacctaagctccagaacttacaatctttcaagactaaaactctatacctattaaaccattacctgttcctcctttctcttatccttcagcagccactattctactttctgtctctgaattgactactcttagtaattcatataagtagaatcatacagtatttgtctttctatgactggtttattttacttaacatcctcagctttcattcatgttgagcgtgagtcaagatttcattaatttttttttaatgtagcctacaaacttttttttttttgagacacggtcttgctctgttcccaggagggagtgccgtggtactatcatggttcactgcagcagcttcaacctcccagactcacgtgatcctctcaagtagcagggacaacagatggacaccccccaccctagctaaatattttactttattttgtagagactggatcttgctatgttgtccaaggctggtcttgaactcctgggctcaagcagtcctcccgcctcagcctcccaaagtgctggaattacagtcatgagcccctgcatccatccctatgtttaacttttttttttttttgggacggagtctcgcactgtagcccaggctggagtgcagtggtgcaatcttggctcactgcaacctccgcctcccaggtcctggttcaagcaattctgcctcagcctcccaagtagctgagattacaggcatgcaccaccgtgcccagctaatttttgtatttttagtagagatgggatttcaccatgttggccaggctggtcttgaactctgaccttgtgatccacccgcctcagcctccgaaagtgctgggattacaggtgtgagccactgcgcccagcctatttaactttttaaggaactgctacattgctttctaaagcagtgcatcattttacattgccaccctctatgtatgagttttaatgtctccatatcatccccaacatttgttaatgtttgtcttttttttaattataaccatccttgtgggtatgaagtgatttttcaccgtggtttagctttgcattttatgatgactaatgatgttgaccatcttctcttgtgcttattagacgtgtatatcttctttggaaaaaggtctaagtgtaattttgaaaaatctttttactttaaggataatgaagagttgacaattagttgcccagtgcctgcagatgagcagacagaatgcacttctgcccagcaactcaatatgagtaccagttctccatgtgctgctgagcttactgcattaaggtacaagttatagtatagaagatcttcaacattaaattactttttctggccgggtgtggtggctctcacctgtaatcccagcactttgggaggccgaggcaggtgaatcacctgaggtcgggagttcaagaccagtctggccaacatggtgaaaccccgtctctactaaaaatacaaaaattagctgggcgtgttggcaggtgcctgtaatcccagctaatcaggaggctaaggcaggaaaattgcttgaaccggggggtgggggtgggtgggggggtggggggggtggggggtgcggggcgggcagaggttgcagtgagccaagagcatgccactacactccagcctgggtgacagagtgagactccgtctcaaaaaaaaaaattacgttttcttctgattagttgctcaactgttcctatatgctattctgagtctaattgcaagctcttttttccttagcacaactcagcaagaaaaggatctaatagaagattcctctgttcagaaggatggtctcaatcagacaactataccagtttctcctccaagtactacaaagccatcgagggcaagtactgcttcaccatgtaataataacataaatgcagctacagctgtggctctacaggtaacttgaagattttagtttatgttaaaaaaaatacaatagattagatttttttttttttttcacgtaacactttgttagaacagagtcatttggaagtagcccaagttggggctgactatcagaaagaagctta

SEQ ID NO: 9511 - DNA, 2300 bp, Homo sapien
taattaaaaaggctggtacaacaataatatctagacaaaaagattaaggtaaagaataaacaattagaaataaagagaatataaggaataatctagcaaaaaggtagaataatttggtggaagaatgcagtaaaggctggatgaggtggcttatgcctgtaatcccagcactttgagaggctgaggtaggaggatctctcaagtttgttctaagcttctataattttaaataaatgttttactttagaatggttttaaatttactgaaaagttgcaaagatagtacagataattcctgtgtatgcttcatccagtttttcctttttttttttttttttttttgagacggagtttcgctcttgttgcccaggctggaatgcagtggtgcaatctgggcttaccgcaacctccacttcccgggttcaagcgattctcctgtctcagcctcccgagtagctgggattacaggcacatgccaccatgcccagctaatttttgtatttttagtagacgcggggtttcaccatactggtcaggctgatctccaactcctgacctcaggtgatctgcctgcctcggcctcccaaagtgctgggattacagatgtgagcgaccacgcccggccttgacttttttttttttttttgaaacagtttcactgcgttgcccaggctggagcgcagccgccatgttctcagctcactgtaaccttggcctcccgggttcaagcgacgttcctacctcagctcccccaggtagctgggattacaggcatgtgccactactcccggctaatttttgtgtttttagtagagacggggtttcgccatgttggccaggctggtctcgaactcttgacctcaggtgatccgcccaccttggcctcccaaagtgctgggatcataggtgtgagccactgcacctagccttggaccctcttcatattaaattaaaattaatgtttttggaacacctattaggccacagagtgaggaggatgagttaaagtaagttccctccttgtaagtagttagaagtatagaaagaaagaagtggacctgctctctattgtctttttcttttctttagacggagtgtttgctctcttgcccgggctggagtgcaatgacgcgatctcagcttactgtaacctctgcctcctgggttcaagtgattctcctgcctcagcctcttgagtagctaggagtacaggcatccgccaccacgcccggctaatttttgtatttttattggagacggggtttcaccatgttggccaggctggcctagtactcttttttttttttttttgagtcggagtctcgcgctcacgctcaggctggagtgcagtggcgtgatcttggctcactgcaagctccgcctcccgggttcacgccattctcctgcctcagcctcccgagtagctgggactacaggcgcccgccaccacgcccggctaattttttgtacttttagtagagacggggtttcaccgtgtcagccaggatggtctcgatctcctgacttcgtgatccacccgtctcggcctcccaaagtgctgggattacaggcgtgagccaccgcgcccggtcggctagcctggtactcttaacctcaggtgatccaccagcctcagcctcccaaagtgctaggattacaggcgagagccaccgcgcctgtctttttaaaagctaaaactgaaacggaaacagagctcctggcagataggaccaggagccacagcgaaggaggtggcctgtgattaggtttttataaatgggcaggtattaatcagggaaaatggagtaaaggacacgatagacatacattgctaagtctagtattggaaaaagtaaggcctgggacccctaaaaacttgctcgagagtgaaaggtaaatgctatgtgtccacactactgtggtaaagccgacagtccataccatgagcccatttcgcgcagggaaattcgagtggtgggcttgggcccgtcgttctggtagcttcccagtagagggcgccgtaagcatatgcgtcttcagcctgactgggctggagaggcggtgcgtcctcctggccggggggcgggggccgtcgcgctcacgtgacctttgctcatggcggcggcggcggcggcggcggtgctggtggtgctcggcggccggagccggatcctgtagccgggtgtgggcccgtgtctgtccgtccctccttcggccccctctcttgtcttccggagtgtggctggcggagctgggatggcggaacgaggcctggagccgtcgccggccgcggtggcggc

SEQ ID NO: 9512 - DNA, 2300 bp, Homo sapien
tcttggtttctttgggcaagttagagagtgagcaaaatggctaatctcaatacgaaggcttggttattctatgaggctgggtctgtttggggacagggtgtcttgtgtatgcttgattagagtggcaggagagaccctaaattgcatgacccctcaacaccttcagctttatctaacaaaaaaaaattaacagatgtaggcaggacctcctgtaagaaacagggacatttcgatttcttgctttgtgatgcccagctagcccctttgtggcatgtggcaagtacgaacatgataaaagcattaagtgggttggagggcagtttggcagtgtctgttagcattttaaaagcatataccacagccgggcactgtgactcaggcctgtaatcccagcactttgagaggccaaggcaggcgaattacttgaggccaggagttcaagacaagcttggccaacatggtgaaatcccaactctactaacaatacaaaaattagctggacattgtggcgcacacctgtaatccctgctactcaggaggctgtgcaggagaattgtttgaacccaggaggcagaggttgcagtgagccgagatcgcaccactgtactctagcctgggcaacagagcaggactctgtctcagataaataaatacatacatacatacatacatacatacatacatacatacatacatacatacatacaccagtcccagctaccctggaggctgaggcaagagaatcacttgagttcaggaattggaggccagcctgggcaacatagtgaaacccctgtctcttttttttttttttttttaaagcatatgccatatgacagcagtactacatgtccatatagggaaatacttgcacaagtccagggaaggaagtaggaatgtgctccttgaaacattttttgtagtagcaaaaaattgtcattaatagggaaatgcctaaataattgtgatatagccaaacaatggaatactgtgccgcagttcaaaaagaattatgtagatctcttatactgatatgcatagatttagctttagaacaatttaaatgaaaaaaacaagttacagatatatgtataatatgatgtcttttatgttaaaaatacttatatatttctatgggaacaaatatctatgaaaatgcattgaaaaaagattggaaggatatctgtcaaatttgtaactgattatctctggcgaggagaggagggaaccaggtttgagggtaggtattaaaggaacttcaatcttatatttaatatttaagattgttttcaaagagtgtgtatttgagtattacttgtataattaaaattgctaacaaaataccagctcaattttaaaatactaagtatgtattttgtattgattacttttcttctttctttgtttttcagaatgtaatgaataagatgcacacaatcagcgtaccctactctgttatgaaaacctgtcctctctcttgggtccaaagagtacatgctcacaaaggtagtcacctgcaacatctgagctttaattatgtgactgtttgaattaagatttcagggatttcagagattttcaaattgcccttgtatgcccctgtcccttaacaaattgtagagtttagttactacagaattaggtaccttgcctgttcatctcactgatgtcctctcttaagcattgagatgaattttttccaaatgcgagccttgaattagatttgactgtcttggtattcacagtttccttggctgggacactgtgacctgcctagagggtctcagtgaacaaacaattgtaggtccagtcagttgtctaaatgtgataatttctgcctctgagctattggcacaatctctttgaaaccgtttttatcttctccaagcaaatatcatgattccccaaataagtaaaaatgtttttattgtggtgtattacatatgtcccaaatttattgtgtatgttaacttcatcctttttgaatttatagccaaggtagctttagtaaaatgtcgggacttgcactgggctatgatggcacatcgggaccaaagagacgtgagcttgagttccctccgaatgttaattgtgactgatggagctaacccctgtgagtatttcttcattgtggatctgggaatatcctgtgttttgatagattagggtttttcgccctgtactaagatataattcacatactgaaaaactcactcatttaagatgtgtaattcagtggttttggtatattcacgagttgtgtaaccatcattacaatctaagtttagaacattttcatc

SEQ ID NO: 9513 - DNA, 2300 bp, Homo sapien
gtgtcatcctgtgatgccttcctgagtctgttccaaagtcatggactgaagcctgaggccatctgtccgtgcgccacgtctgctgaagccatgactgtagcaatccgcaggtactgttcaggatgtcagatgctcttgatgtatgttacaacttggatgaaatgtgcagtatttaccaggtgatgaccaacggatgttaactaattttctaagcagtttcaagcatctcatttttcccactcttgctcaaagtgtatgcagtaaactgaaaaatttaattgatatcatttcgtatttgtgaattagctctttttctgtgccattttgctcttcggaatccatagcaccttagattaaaaatagactgttcttgattgtagcttaagtatggatagtatatctatagtatattcaagaccattatgtatgtaagtatcagtgaatgtgtgtgtgtgtatatagatatactttttttttttttttttttttttttttagataggatctctctttgtcacccagtggcatgattatggctcactgcagcctcaacctcctgggctcaaacagtcctcctgcctcaacttcctgagtagctaggactacaggcatgtaccaccacgcctggctaatttttaaatttttttgtagagataggttcttgttatgttgcccaggctggtctcgaattactggctttgagcagtccaccttccttgtcctcccaagtgctgggattgtaagcatgagccaccaagcctggcccagtacgcaatacttgatgatgatgataaatgaccattttgctggtttatgtgtttactacactacattttttttaaatttaatttttgagagatggggtcttgctctgttatccaggctggagcacagtgacacgatcattgtagcctcaacctcccaggctcagatggttctcccaccttagcctcccaagtagctgggactacaagcatgtgccatcatacccagctaatttttgtattttttgtagagatgggggtcccactgtgttgcccaggctggttttgaactcctggcctcaagcaatcctcctgccacagcagttgctgggatcacaggtgtgagacaccacacccagctctaatttggcatatttttgggagagaaaatggagaatttttttggtattgtagccagaggaaatttgtcttcctatgtatttgtatttttcccttgatgttatttcattcaccaaacttgatgggttcttcttttcaggcctggagttccaggagcccctttgccaggaagagccattctctcaatgaatggattgagctatggggtaatacgggtcaatactgaagataaaaattcagcactgacggtccaggatgtagggcatgtaatgcctggtggtgagtcgcaaggagcatcatttggtttttcataaagatttgtcatcagagataatagagcctgataaaatacagaatcccaaacgaggaacccttaattcagtacttaacgcatttaatttctcagagcctctctaatagttaagtcattataattatgctgaccttccagcagtattgtatgacttaccagttgtgaatgcttcaagtccatttctttacctggaaggccaaatactgagagatgttaaagttacctggttttcactgtaattgccaagccattgggactggcagaaaattagagcatactgcttccaagagtgtttgagtttgacctgcctaagggtaacacctcattcatctaacctgtttatttgggctttgcattcatcgttaatatgtcactgtctctacaagctttacatttcaaatatacctatgtagtttcaggtttatgtttagcattcctgtctggtatttttacttaatgccactcagtaaaggcaggactttcttgggttcacaggatgaagctgttattttacaaaagttttctagaatctttgtcctttaacctgtattttctgtacgttagggatgatgtgcattgtgaaaccagatggacctccccagctctgcaaaacagatgaaattggagaaatctgtgttagctccagaactggaggcatgatgtactttgggcttgctggtgtgacaaaaaatacatttgaggtacatgatattaacatttcacagggaaaatgtttggggatttcaggatgttacgagggcagatcccctggttgatgggacatagcataacatgtggttgagagtgtgtactctggagctagacttgcctaagttcaaattctgaacttaggtcactagctga

SEQ ID NO: 9514 - DNA, 2300 bp, Homo sapien
caggtttttattttttttctttggagacagtctccctctgtggctcaggctggagtgcagtggcgtgatcttggctcactgcaacatctgcctcccaggttcaagcgattctcatgcttcagcctcctgagaggctgggattacaggtgtgtgccaccacacctggctaatttttgtatttttagtagagacggggtttcaccatgttggccaggctggtctcgaactcctgacctcaggtgatctgccctcccccacctcccaaagtgctggaattacagtcatgaaccacgacgcctagcccctcccccgctttttactgatcaacttttgttaagcattctgtggtccacggaagaaaaaaccaaacaccaaagaacaataaacttgtacaaccagccttccagccatcaatattctggattccagaatgattgaggctggactttgttaatcatcgaaggctggtatctgagaaactcttcctctcccttacctttataggccacttttctttcagtaatgctgaaacactgacttaataacagttgtcccctggtctagcatttaataggtaatccacaatttttgctgaatgtcaatagctaaacgttagtgacctcttaagactgtctggcagagtaaatcttcggctttatatcacattctccgacccaaagggccaaaaataggcaaagctctctccactaaatcggtttcctaaattggggatctcaaactagtaaaatttcagaaaactttcggaacttttgtcaagagcatactaaaaaagtttatcttttgtcgtttactatcattaaagccataaaacagcattttacaaggaaattttaaaaattaagaataaggcataactcccttccagagaggtagacccaaaaatattctgaagtttttgtaatgcattaaaatgacggcataacattttattaacactctgttacgtttcttttttctttttttttgagacagttttgctcttgttgcccaggctggagtgcaacggtgcgatctcggctcaccgcaacctccgcctcccgggttcaagcgattctcctgcctcagcctcccaagtagcttggattacaggcattcgccaccacacccggctacttttgtattttttagtagagacggggtttctccatgttggtcaggctggtttcgaactcccgatctcaggtgatccgccctcctgggcctcccaaagtgctgggattacaggcatgagccaccgcgcccggccacatcgttatgtctcattgtaaatccgtttctgtagaaaatccttccacatgggttaaaggacacaactcattgttactttatgggattaagaaaaatctgagtaaggccgggcacggtggctcacgcctgtaatcccagaactttgagaggccgaggcggaggatcacttgagcccaggagttcaagaccagcctgagcaacatagagtcctcatctcttcaagccgagcgtggtagcgcgcgcctgtggtcccagctgccccataggctgaggttggagaatcgcttgaatcccggggttggaggctgcagtgagtcgagatcgaaccactgcactacagcctgggccacagacccccgtctcaatctcggaaaaaaaaaagagactccatctaaaaaaaaaaaaaaaaaaaaaaagctgaggaagtcaaagccttcactcttcatttctccttccaagaggacagggccggcgtcggtcaaggtcaattggcaggtgagttgacagcgccgccactaatcgatgaaaacgccccccgcgagcacccagctgctcatggcctccggaagcggacgtagggcgggtggggtacagctcctaaggagaaacggaaccgcaggcaccgtccctctcccgctgcagcctgaggaacgcgttccgaggaacccctagccacaagtcaggaccgcgtacaagatggcggcgcgtcacgtgggcagcgcggtgacgcaggacggcggcccgcgcggaggcagcgccatagcctaccccaaacgcacactagtgctcagttttgcccccctcccctcccccgcccccgcccccgcccccaggcttgtgtagatcatgccgccagtagcggccctgactgccgaggaaacggtagcttaggacagttggctgttaagtgacactgattctccccgccccgcctgacccccgagaaggaggcttgtcccccgctgcgtgagggggtggggaagtgggtagtgaattcggatctacctgggaggggggagtggaagttcccg

SEQ ID NO: 9515 - DNA, 2300 bp, Homo sapien
aacaaattatcccaaaatgcagtagcttagaacaacaaaaatttatctcgtattttctgtgggtcagaacttttaagtgtagtttggctgggtgtctctgacttaaggtctctcatgaggttgcagttagggtgtcagccagcactgtggtctcatctgaaggtgtgatcggggaagatctgcctctaagcagatcatgcggtgttgcatgattcagcttttcgtggctgttcaactgaggacttcagttcctcaatggctcttgctggcagcctctctacagggccacagggcagcttacaacatggcagcagctttaccttagagcaacaggactgcagagagtgctcaggacagaagtcacaatctttttataacctaatcttgaaagtggtagcccatcacctctactttctatttactagaagtgagtcacgaaatccagccaacactaaaggagagggaactgactaaggctgtgaataccaggagacagggttcattggcgggcattttgtaggctacctaccataccagaggatatttgtctgcagataggagtgatcccaccaaagacaggaaatgacaatgcaggagaggagaaaaggcagaggaaatccaggaagaagacctctgcagttattgatccactgcctttttcattttatttggagagatggggtcttgctttgttgcccaggctggagtactgtggctattcacaggcatgatctcactaccaatcaacacaggaattttgatcaactccatttccagtctgggccagttacccctccttaggcaacctggtggttccccactacccgaaggtcaccatattgatgccaaacttagttgaccagttgacatagcatactacagtccagaactcctgggctcaagcaatcctcctgcctcagcctcctgagtagtaaaactaaaaaatatattgtttaaagcagtgctgtataatagaactacaggcatgtgccaccgtgcccagcccactgcctgtgtcactgctatttgatgacttggctgcatatacttgctttatgagtatgttaaacctctactatctgtcatagcaagacccgtcatccttatcacgttggctatgggtttaaaaaaagaaaaaaaaagtcatcttgccttgtttacaaaggcatacacaatctgaccacatctcacacacacagaaatacacacaccccaactgtgtttttctcctcctaatatcaccttccactaaaatatctggggaataaggactttgtttcttgtcagccctcagagatcagctcatgctgcaatttgtttctccaatatcacctcctccaccccaatttcggcacagctctgagactctgctcccttccccacatgttaccatgtgtaagccccaaactcatatactccttttatctaatgctgccaactgcaccagcctcggaaggatggtatgagcaaggcaactgtccttttattgacctctacgttaactctccaccacctcaccaacttcccacagcccacacggtcttcttattactgaaggtgttgggttaacaaaggcaaagttcagtataggtcaagataggaatgacagaacaatttaaaactgaacattaggtatcactcttaaaaactctgggttatgttaaagaaaaattattcagtgatactcattaaagcacagcaaggcagactttattcaggaccatccagatagggatagggaccatggcaatgggattttgtaatgggtagagggactgggctaaaatccaaacagagcagagccaagggagaatttacagccacggagcaggagagacgtgtcagtggatggaaaattactaagaggtagcatcaggagtaatggcattccggctaaccgacctaacaggattcttgctggacaggccagggtgatcagacatcacctgggggatagtggtggatgaggaagccgatcagaccttgagggtgaggggttctttctaaactgacctacctattcctcggccgcctcccacacctccgggcctcactcgcgcctccccgccaggccgtgcgccccgcgtgcccagggcgggtgggaagtacctgccgccatcttgctcaccagcctccaaaatgcggctggggctcctgagcgtggcgctgttgtttgtggggagctctcacttatactcagaccactactcgccctctggaaggcacaggctcggcccctcgccggaaccggcggctagttcccagcaggctgaggccgtccgcaagaggctccggcggcg

SEQ ID NO: 9516 - DNA, 2300 bp, Homo sapien
gtcctgtggagttgctcagtttcttccctggatcctgttttcaaaaacagacagaagggcaacccgctcgggtccccttccacactgtggaagctttgttctttcgctcttcacaataaatcttgctgctgctcatttaaaaaaaaaaaaaaggaaaggaaacaggccacagacagaaaacaggccactgattgcctcaggattaggaatgcagaagggaggatcacaatggagcaagagtaatcttttaggggtgatggatatgttcatttatcttggctgaagtgatgggttcacaggtatatagatatgtcaaaacttatcaaactgtacacattaaatatgtaaagtttattatatgtcaattccacctaaaaaaatctgttaaaaatggaatagatacaatatttataaaatacatgcaggttataacaaatcatgaaacaacagaacactccctgtatccatcacccagttttttaaagtaaatgtttactatttttaaaaaattatttttttctgtgttccctagccaccctaaagctcaggcctttttctttttcttctttcttttttttttttttttttttaaagagatagagtctcactatgttgcccagacaggatttgaattcctgggctcaaggtatgcttctgtcttagctcctcagtagctgagaccatgggcacccaccactgtgcccagattcgggctttcttgtaaaaagcggatggatgcttgaaactattttctgaatccctttggctcccaaatgtgaatattctgggaaatatttttatccaaattagctgagtaatcgagtagttaggcacattttgaagactgaggcttgtcctttaaaagaagggcagcccacaaactgacttccttgagccaaaaattgttttaaaaggggaagtacagcccaaaacagtgattttaaaatatcaacaaaaagagtcaaattctgtaaaatatttaaagagatttattctgagccaaatatgagtgaccatgtcctgtgacacagccctcgggaaatcctgagaacatgtgcccaaggtggtcagggtacagcttggttttctacattttagggagacatgaggcttcaatcaaatacatttaagaaatacattggttcagtccagaaaggcaggacaacccgacgcgaggcagggagcttccaggttataggtacgttttaaatttttctggttgacaattggttgagtttatctaaagacctgggatcaatagaaaggaaatgtctgggttgcaataagagttgtggagactgaagttttattatgcagatgaagcctccaagtagcaggcttcagagagaatagattgtaaatgtacttaaggtctgcgttgatgtgaatgccggcttgaggtataatgaggcatatctgacccccacttcccctcatggcctgaaacaatctctcaagttaaattttaaaagcgccctggccaaggagaaagtccattcagatggttagaggccttagaacattatttttggtttacaaaaacgttgagttgtgaacactgagagcctctgcccagaatgtaaaagagagaattcttgctgactgtggccgggcatgcatgtcctttcacttcctttttttttttttaaaaaaaaaaaaaaaaaaaaaaaaaacagggtttgggcgggggaagtaagggggatgtgttatgataaaggggccttggcagcactcttctggtgtggtttgaccaggctccacccacgaattctgttttcttttagaggtcactggagagcccggtggggtgtaagtacactgcgcttataaaactctagcaggaagctagcagctgtctccaaacccagagaaggggaaacaggaatcgattaggaataaaggattataatccactttccttctgaggaaaagctgggaaccttctcattttgccttatgaaaactaagctgaatcgactgctgccaaacatctattaggcaaaattggcctcttgcccatgatttgactttccagcacagccagttctttttctcctctgcagctgattggctctggagtgtggccagaagcctctctcctgcaattaaaggagtcgggtctctaactgttgatctgtttttttcccttctgagcaatggagcttaccatctttatcctgagactggccatttacatcctgacatttcccttgtacctgctgaactttctgggcttgtggagctggatatgcaaaaaatggttcccctacttcttggtgaggttcactgtgatatacaac

SEQ ID NO: 9517 - DNA, 2300 bp, Homo sapien
aaactagttctgcaccatgaggaagaagcagctgaagacggaggcagctccacactgtgaactaagtaagtagcccagggaagctgcccagctgagcagacctgaaagggtgacaagtacagctctagcaattttattttctagttataatagaagttgccaaaggaaaggttccgatctggaggaacttcatcaaacctttctgaaactccacagatgtactgtagcgagaatctcagaactaatttgtgcattttcttttttctccaggagaaattctgtatgaaaaccaacctgctccaggaagccaagccccccccccccacttttttttggtccccgagtttgtttttacttcgcactttatttggatttttctctttgcagttcacgctcctttcctcatttcttggtctctcttactaatgaaattttctcctagctgtttttacgtgaataaagaagctcaattacctttaatgctgtaagcagtgcgaggggtcggggagtgagggtggcgggaggatctaatgtttttggtggctgtaaacgacattgcagaaaattacggtaatttgttaggccatttattccctcttcaccagtttggcagtctcatcttcagagcaaaagatacggtgtgaggctgaaactggcgatagagtgggattgcttttgggtaggtaggatgaagtctggggagaatcgagtcagctgggcgaggaggaaaacaattcactacggaggcttgggaggacacctaaggcggtcaaactggctgcactagctgatgtttctcggttcctcccaggtgtggggtgctcttggtggggcagcagatactatgatgtggctctgggggcgcgaggaaatgttccttccaggtggctatcctttttttttgagacagggttttgctctgccacccaggctggagtgcagtggcacgatcttgtctcaccgcagcctccacctcccaggcccaagtgattctcccacctcagcccccgagtagctgggaccacaggcgggcgccgtgatgcctggctaatttttttttttttttagacggagttttcgctcttgtttccaaggctggagtgcaatggcgcgatctcggctcactgcacctccgcctcccgggttcaagcgattctcttgcctcagcctcccgagtagctgggattacaggcatgcgccaccacgcccggctaattttgtatttttagtaaagacggggtttctccatgttggtcaggctggtctcaaactcccgatctcaggtgattcgcccgcctgggccctccaaagtgctgggagtacaggcgtgagccaccgcgcccggcctttgcttggctaattttaaaattttttgtagagaccgggtctcactatgttgcccaggctggtatcgaactcctggactcaagtgatcctcccgcctcggtctcccaaagtgctgggcattacaagtgtgagcctccgcgcctggcctggctaccctttacaggatagagctatacctcgtagcttgattgtcagtacctaacgtggcgccacggcgaactagggcaggaatcttatctgtccccagactgctagcggactggagctccccagtccaggggctgtgtgggtctggccaacgcaagcagcaactaggcagcatgcagctcccgccgggtgccccaggggccgccgcgtgccccaggggccgccgcatccagactccgcgtgggcggagcctaggtccctggtctgcgggccacgcatcccggccgctgcagggactccagccaatagggatgtgcggctgccgtcctgtcgaccaatcgcggggaggggagggcgttagccagcgtggcgctggctcccggaatatggagccctgggcgcgggggcggcgtgtcaggtggttgcggagctggtaaggtgaggggaaggcaaggtcaggggtcacggcattccgctcgctggcagggaggggcgcggggcggctcgagggcctgtgtcgggggtcaggctccggggctaggatgcgacaccggctcgccgtgcggggctgtgaggggaggtgtggccagggagggcctcaggcccagagtccaggactgatggagtcgcgccattcagagaaagacccaaagatgggggcagggagggaacgccggaggtcgcgggggtctcgccccttccccgccgcggcctaggacacatggcccagctcccagctgcaccggatggcgcgcccggcctgtgtcggggtgcgctgacctgcttcgacgcctcgaaagaggccg

SEQ ID NO: 9518 - DNA, 2300 bp, Homo sapien
aataaaatttttgaactcaataaattgttaattaatatctaggagtggcagatatataatgcttctcttttcacgacaggtcaaagatgaaatctgattaggctttggagggcgtggtttgcctcttgaaattccttgctcgtctttagaaagctgtgttgcttagagcacccaaaagtgccctttatctaactgagggaggcgcacttgtcttcatatatagaggcaggagctggcattgggaaagtcaaactagttctgcaccatgaggaagaagcagctgaagacggaggcagctccacactgtgaactaagtaagtagcccagggaagctgcccagctgagcagacctgaaagggtgacaagtacagctctagcaattttattttctagttataatagaagttgccaaaggaaaggttccgatctggaggaacttcatcaaacctttctgaaactccacagatgtactgtagcgagaatctcagaactaatttgtgcattttcttttttctccaggagaaattctgtatgaaaaccaacctgctccaggaagccaagccccccccccccacttttttttggtccccgagtttgtttttacttcgcactttatttggatttttctctttgcagttcacgctcctttcctcatttcttggtctctcttactaatgaaattttctcctagctgtttttacgtgaataaagaagctcaattacctttaatgctgtaagcagtgcgaggggtcggggagtgagggtggcgggaggatctaatgtttttggtggctgtaaacgacattgcagaaaattacggtaatttgttaggccatttattccctcttcaccagtttggcagtctcatcttcagagcaaaagatacggtgtgaggctgaaactggcgatagagtgggattgcttttgggtaggtaggatgaagtctggggagaatcgagtcagctgggcgaggaggaaaacaattcactacggaggcttgggaggacacctaaggcggtcaaactggctgcactagctgatgtttctcggttcctcccaggtgtggggtgctcttggtggggcagcagatactatgatgtggctctgggggcgcgaggaaatgttccttccaggtggctatcctttttttttgagacagggttttgctctgccacccaggctggagtgcagtggcacgatcttgtctcaccgcagcctccacctcccaggcccaagtgattctcccacctcagcccccgagtagctgggaccacaggcgggcgccgtgatgcctggctaatttttttttttttttagacggagttttcgctcttgtttccaaggctggagtgcaatggcgcgatctcggctcactgcacctccgcctcccgggttcaagcgattctcttgcctcagcctcccgagtagctgggattacaggcatgcgccaccacgcccggctaattttgtatttttagtaaagacggggtttctccatgttggtcaggctggtctcaaactcccgatctcaggtgattcgcccgcctgggccctccaaagtgctgggagtacaggcgtgagccaccgcgcccggcctttgcttggctaattttaaaattttttgtagagaccgggtctcactatgttgcccaggctggtatcgaactcctggactcaagtgatcctcccgcctcggtctcccaaagtgctgggcattacaagtgtgagcctccgcgcctggcctggctaccctttacaggatagagctatacctcgtagcttgattgtcagtacctaacgtggcgccacggcgaactagggcaggaatcttatctgtccccagactgctagcggactggagctccccagtccaggggctgtgtgggtctggccaacgcaagcagcaactaggcagcatgcagctcccgccgggtgccccaggggccgccgcgtgccccaggggccgccgcatccagactccgcgtgggcggagcctaggtccctggtctgcgggccacgcatcccggccgctgcagggactccagccaatagggatgtgcggctgccgtcctgtcgaccaatcgcggggaggggagggcgttagccagcgtggcgctggctcccggaatatggagccctgggcgcgggggcggcgtgtcaggtggttgcggagctggtaaggtgaggggaaggcaaggtcaggggtcacggcattccgctcgctggcagggaggggcgcggggcggctcgagggcctgtgtcgggggtcaggctccggggctaggatgcgacaccggctc

SEQ ID NO: 9519 - DNA, 2300 bp, Homo sapien
tactccaagtctcagattcctaatttgcaaaatgagaataataataaataatacttcctgccccattagtttattatgaggattgtttttttggtagagtcatggtctcgctatgttgcccaggctgttttcaaactcctggcctcaagtgatctgcctgcctcggcctcccaaagtgctgggattgcaggcgtgaatttttgtgccagcctactacaaggattaatgcttgtgaagtgttaaatatagcgtttggtacacaataaaaattcaattaaggttgtcagttactcttaagtataaattggggaccaagaaggcaaaaatggagtgtgttttttgcagatggacggaggggagccaggacacagctcagcttgctcatgctcagagagttaagctgctgaccctgaaggcagggggcacacaactgtatgtgggagccagactaagcagtcgagacagggcagacagtgtgagaaagctgttgatgagagctgctgctgaataaaatcatctttcacctgtctacagctccccaagtgttctttctgctcatccacccactacctccggacctcaacatgacctttggcgtagtctaaacctgacactcataacagttacagatttctttgtcccttctacactcccacttttttgagacagggtcttgctctgtcgcagaggctggagtgctctggtgtgatcacgacgcactgcagccttgacctcctagcctcaaatgatcctcccacctcagcctcccaagaagctgggatgttccacaggcacgttccactacactcaggtaattttaaaattttttgtagagagggggtctccttatgttgcccagggtaagaattcctaaactcaaataggctttttcctgccaagactttagttcgtgggtgattttacaggtgcttctattttcccttcaagtggaacaaattggcccccagtccaatctgcagagacagctttgccttggggaagttacctgatgtagaacaaggacaggagacaggtcaagttgtagttatttgactttcgtgattaagagagccctgaagcaaagagacctttcatctggatccctgggcaggagatccataattctttctcctgactcaatggttgttctaggtaggaaccagaaccacttgctggaagcctgcattgacttatttgaatcgattactgcttttctttcttttccattctaagctattatgtttttatggtactaagcagattttcttgaaaacttctagaaaactgcctgctacctgcaagaaactgttttcttctctcctgtattttacgccaccccaatgcttctcctatgcagctttgtcgtctaagttatttccctgaggcaaaatttccccattctttcagctcccctcctcccagattgagaaattctaggcttgccctggacttctgtcttgtagtctctgggtttttttcctttctttttcttttccatcaggcaccaagtccggagtttgcgtggctctgatgtctgctcgtggatcactgattgaccaggctgaagccagagggtcctttagatcccgagggataatagagcaggcagcatttccacccacgttctgagactcctcataattgcctcagtgctgcacgtacctatatggaaaatacaagtgcactgtcaggcttggggttaatggtttcacctcacgtctcagaggagcagagtcctagtgcacctgtggagcctgaaccagctgcactccaagaggagcagagaagggaagcaatttcttactccacccctttcaaccactggcactcacaggcttgccacctactcttgctcctgccaaatggtacagagatgaaatcttagaataaaatttttgaactcaataaattgttaattaatatctaggagtggcagatatataatgcttctcttttcacgacaggtcaaagatgaaatctgattaggctttggagggcgtggtttgcctcttgaaattccttgctcgtctttagaaagctgtgttgcttagagcacccaaaagtgccctttatctaactgagggaggcgcacttgtcttcatatatagaggcaggagctggcattgggaaagtcaaactagttctgcaccatgaggaagaagcagctgaagacggaggcagctccacactgtgaactaagtaagtagcccagggaagctgcccagctgagcagacctgaaagggtgacaagtacagctctagcaattttattttctagttataatagaagttgccaaagg

SEQ ID NO: 9520 - DNA, 2300 bp, Homo sapien
gcctgtaaacccagctacttgggaggctgaggcaggagaatcacttgaatccgggagatgaaggttgcagtgagctgaaattgcgccactgcactccagcctgggtgacagagtgagactctgtctccaaaaaaaaaaaaaacaaaaaaaaaaactacctgaatatgaagaccatgtcttagtcaacttttttttttttttttttttttttgagacagtctcactctgttgcccaggctggagtgcagtggtgcgatcttggctcacctcaacctccgcctcctgggttaaagcgattctcctgcctcagcctcccgagtagctgggattacaggcgcccaccaccacatccggctaatttttgtattcttagtagagatgaggtttcaccatgttgtccaggctggtctcgaactcctgacctcgggtaatcagcccgcttcggcctcccaaagtgctgggattacaggcatgagccacggcgcccagccgtcttagtcaactttctatcccgtccaccccatctacccaacacttgtgaagatccagggccatcttttaaaacttttcctctgactgcacgagtggtacagtcattaataacctgtgctaatataaagctctgtgacccataaagcattatacagatgtgggagctttcacagctgtattctctttggatcctcaaagatttcttataaagtaggtactattataagggaaataaactcagagctaaagtgacatatccaaggtaacattcactaaaacaaacgtcaatgccaagattgaacctatatccagggaacccacatgggatgctctaccaccttccatgaagaataaatattcatatatatccaagaggactgttaattcttggaggcagttaagtaccacttctgggaatccttcttagtttcaagtatgaatctattcaaacatgtttactgaacacctactatgtgctaagtaaggcacctagtgttggaggtgcagcaatgaacaaggcagagaagatgcttaccctcattctagttcagggagctgtcaaacaaggacacaaatacataaacactgtaagtgacagatgctacaaagaaaatacaaggccgggtgcagtggctcacgcctgtaatcccagcactttgggaggccaaggctggcggatcacttgaggccaggagttgaagaccagcctgaccaacatagtgagatcccgtctctactaaaaatacaaaaattagccgggcgtggtggcggacgcctgtaatcccagatactcgggaggctgaggcaggagaatcgcttgaacccgggaggcggaggctgcagtgagccaagatcgcgccactgcactccagccggggcgacagagcaaaactgtcacaaaaacaaaacaacaaaacaaaacaaaacagagtaacatgagaataagtgtgaagtgtgtccttttcgccggcactgcttcagatagggtggtcacagaaatcctctcagaatagtaacatttaagttgagacagagcttggtcttcggtaggtgcttaacgaaaaccattttcccacaaacttagttctggaaacgacaaagagaggaaaaagtgtactcagtccgcacaggggccgctcccaggcctccaaccttcgccgccagactgactggaaagtggacagttcccggcctatccacgccggcaccattagagggcgccgcgggtcctcctagccccaggcactggcaaactgacatctgctacctaacagtcgaggctccgacgccccgagtccaggcagagggcaagggcggcgctgggaagccctgaggccctaaggaatcgcggagggtcactgggcgcctcaaggacagggtgccctccgcgtcgcaaacccacaccagtggcataagaactcgctccctctgggacaccctgtttccggcgcctttaaacctggaagtactgctgtgtccaatcctggccctccttccgcacttagtctttgagtccttccctctcctggcttgtgctggagccaagcaggctatggctaccaatcagcgctcagaaaagacgcatgcgtcttcgaacgaacgcgacgtacggttaactttgacccaaagacaacctcttctctcccgcttctctcgctgtgaagatggcgctctccagggtgtgctgggctcggtcggctgtgtggggctcggcagtcacccctggacattttgtcacccggaggctgcaacttggtcgctctggcctggcttggggggcccctcggtgagggacctgtagcgagaaa

SEQ ID NO: 9521 - DNA, 2300 bp, Homo sapien
ctatctcttagctgccctgagtcatgtgaaataagatagtgaccttctccatcatccctagaggctctctccccgagagagagtacttttagactaatttctttaggaaaagtacatttcgtattctgataacatttttattacttcatatccaaaaatgacatttcttaactgtgatcttgcatgtcattcattatctattgctgtataacaaataacttcaaagcttaatagcataaaacaatcgtataaatcattttcatgattttgtagctcaagaattagggcagtgctcaggtgggcagttgatttctctcttccatatagggttgacagaggtcccttagtgatatttagctgctgaatggactagtctggaaagtccaatatcactcttatgtctggtgccctggcagggatggctacacggctagaactgtcaaccagagtgcccagatgtggcttcttcagtatggcagcctcaagatagtgggacttctaacttgggagctcagggctccaagagtgaggggttctagtaagaatctacatgactttataaccttgtcttgaaggtcacatagagtcactgctgctctgtcctattgattgaatcagtcacctagaatgaaaaaagggcaggatgtagacctcagctctccatgagacaagtgccagagaatttgaggtcatgttttaaaaccaccaaacacgtagataaataaattaaaaaacaaatcgtggccaggtgcagtggctcacgcctgtaatcccagcactttgggaggccgaggcgggcagatcacaaggtcaggagattgagaccatcctggctaacacagtgaaaccctgtctctactaaaaatacaaaatactagctaggcgtggtggcgggtgcctgtaatcccagctacttgggaggctgaggcagtagaatcgcatgaacccaggaggcagaggttgcagtgagccgagatcgcgccactgcagtccagcttgggtgacagagcgagactctgtctcaaaaaaaaaacaacaaatcagttgccttttacatactgggtccacataaggactgtgctatagttagattgtcaacatcacatatagtgtcctggtcaggctgcaactctctccaaagcatgctcttcacatgctttagttcaaaatgagtcattatatctgattgctgcgtggcaggctattctgctagtccttcctttcacatcccatttcagtaatggtgcttgaaattgtgcttcagtgtgtcttataaactttggtctgagagtcacttaagagaaagggctgactgtagtggctctcaccagtaatcccagcacttggggagactgaagcaggaagattgcttgagaccaggagtttgagaccaccctgggcaatatagcaagacccgtctctgcaaaaaaattaaaaacttagccaggcatagtggcctgtgcctgtagtcccagctactcagtaggctgtggtgggaggattgcttgagcctaggaggtcgaggctgcagtgagctgtgatcttgccactgtactccagcctgggtgagagaggggaccctgtctcttaaaaaaaaaaaaaaaaaaaaaaaaactgaaaaagaaaaagaacactgaggtagggaaatagtgtctccatctcttcttcctagtattcatgtctaccaaatgctttctttggcttcctctgaaagaagccagtttcagcaagtgagtttgtgattctttctcctttcaggtacctgtttcccaggcaactactgatcaggcatttctggaccccaaaacaacaaactgatttcttagatatctatcatgctttccggaagcagtcccacccagaaattattagttatttagaaaaggtcatccctctcatttctgatgcaggactccggtggcgtctgacagatctgtgcaccaaggtattcctgcagttaacccttcctacaaatgtggaatcttgttagattcagtgtgcactaaactaggtaagaggagtagtcaggactttcctaacatctacaaatctcttacctcttccaagatacagcgtggtacccacccagcaatacatgatatcttggctctgagagagtgtttctctaaccatcctctgggcatgaaccaactccaggctttgcacgtggtgagcactttgagggcttctcttttccatagcatcaccatgtttcaggtgtttgcttgagctcatactatttgcctttcccctcctatgtggttgtgttacagaaagccttgagccgggccatgcttctc

SEQ ID NO: 9522 - DNA, 2300 bp, Homo sapien
gcccccaccagagtcccagagagttccaggaaattgtagctgtagcaggatataaatgcttgctgcttggacaactggggcaaatccagatttcttaattctttttttttctcgttttgctcttgttgcccaggctggagtgcagtggcgagatctcagctcactgcaacctctgcctgccgggttcaagtgattctcctgcttcaggcctccccagtagctgggattataggcacctgccaccacgcccgcctaattttttgtgtttttagtagagacaaggtttcatcatgttggccaggttggtcttgaactcctgaccacaggtgacccacccgcctcggcctcccaaagtgcagggattacaggcgtgagccactgtgcccggccaagctttcttaattcttacggctctattagttcttggaaagaactgatactatatatgaggggttgcccatgggccaaatctggcccaatgcctgttttgttggaacacagttatacccattgtgtatgattgctttcatgctacagtggcagagttgaattattgcaacagagacctcatggcctgtagagcctaaaatagttactgtctggctcttgacagtttgctgtcccctgctacagatcaatgctatccaatggaattttctgttatgatagaaatgttctgtatctgcattgtccaacagtagccagttgccatatgtggctattgagcacttgaaatgtggttagtggctgggcgcagtggctcacgcctgtaatctcagcactttgggaggctgatatgggtggatcacttgaactcaggagttcaagaccagcctgggcaacatggcgaaacctcgtctctacaaaaaatacaaaaattagctgggtgtggtggtgtgcaactgtagtcccagctactctggaggctgaggtgggaggattacttgggcctgggaggttggggctgcagtgagccgtgattgtgccatgcactctagcctgggtgacagagcaagagcctgtctcaaaggaaaaaagaaaataaagaaatatggttagtataattgagctgaatttttgtttgtttgtttttgagatggagtcttgctctgtcgtcaggctgaagtgcagtggcacaatctcggctcactgcaacctccgtctcccaggttcaagtgattctcctgcctcagcttcctgagtagctgggactacaggcatgtgccaccatgcccagctaatttttgtatttttagtagagatggggtttcatcctgtaggccaggatggtcttgatctcttgacctcatgatctgcctgcctcggcttcccaaagtgctgggattacaggcatgagccaccatgcccggcctgagctgaattttaaattttatttaattttaattagcttaaattgccacacatggctagtagctgctgtattggacagtaaagctgtagattcttatatccagaaaagattaactagagatcctcttcccagctgatgtctaaaaatggattttgtggtcatctgtttaggtatagtcagtctggaggcagttgtatgaaccagctgaagttcaaggtcccttctgacagagcatttaggatttgaagatattagacagttctctagatatagagagcacgtttagagaagaagagttgagagcctagatggatgagaaagagcaagctccccaaacaggtcatccctgagttaataaagcatctctcggccaggcatggtggctcacacctgtaatcccagcactttgggaggccggggcgggcggatcacctgaggtcaggagttcaagaccagcctagtcaacatggcgaaaccccatctctactaaaatacaaaaattagctgggcgtggtgacacacgcctgtaatcccagcttctcaggaggctgaggcaggagaattgcttgaacccgggaggtggaggctgcagtgagccgagacagtgccacagcactccagcctgggcaacagagcgagactccatctctaaataaataaatagaaaaataaataaaacatctctctgtgctcccttctcagccacatccatcctgaagcggcagaagcagctgcggaggaagaatgtacgctttgaccaggtgactgtatactactttgcccggcgccaaggttttaccagtgtgcccagccagggtggtagctctctgggcatggcccagcgccataactctgtacggagctatacactctgtgagtttgcccaggaacaggaggtgaaccatcgagagattctgcgtgagcacct

SEQ ID NO: 9523 - DNA, 2300 bp, Homo sapien
ctatttctgcacatcctctccagcacctgttgtttcctgacttcttaatgatcgccattctaactggtgtgagatggtatctcattgtggttttgatttgcgtatctctgatggccagtgatgatgagcattttttcatgtgtctgttggatgcataaatgtcttcttgttgatcggtatctttaaacccagctaaaatcttaacccataaaaagcccttggctcgctcctttcttaccatgccctaagaatgtgacctctgataagatcagtaacatgaagaactaaactgatactttgggctcgttttttaatttaattacagtttttatcaaatacttgatttttttttttcttccctggcaaatttatttcaggaatgtgcttgtctgagacttctgatggctgaggtttcttaggtacatcttgtgacttgaatgcagaatttgatgcaatctggatagattaggaaataccttctctaaggtacttattacgtctggttgactttgtagagctgatccaagagcaggcaaattgcttccaacagacacagtccagaaaagcagctctgtagcaggcatctcttgacaccacagtatattctgggtagctgctctgcagtaatgcagccctgtcgttctgggcagtgttgttattcctgctgcataattagcaactagtgagatcatagtctggggagattctggcattactgaggcaagggagggttcgtgtctcatcacacatggctcccgctttgacagcatttctgctgagcagattcgtgtccttctggaacttaaatccaaagatggaggaaaaagatttgtacctagggaaatggactatctcagactccttggttgtatgaaagtgtgttgaaaacaacactgcatgccatattgatataaccagaataaatagttacttctcttgctatttgttttccccttgctgatttctttatagagggcaaagattgtaaagctacaatgtccttgcacagaggatggtgacagaccagatgagccctattttatggagcagtatgagattgggaaagattctgggttttgaagccatgcagattctaatcttgggtccattctttggtaccaaatttgacctttatagaagcctggtgaaacactttacacttatgaagatctgggtaaagggttttcctgactgctaatgtccttcaaaattgagtgcctggagcagtatttcccaaagtgtattccaagcattatttgcactctaaaataccttggaaacagtgggttccttaatcacgtttgtagaaacactgcattctgtgttctctcagccttcaccatccttattagtatattaaaagcctctaagaagttccactataggcaatttttaaaacccttttgacacagcagtcgtatttctatgtaaaagctattaataccataagacacgcactttgggaaatgccgggctgtattatcactaggaaaaataagtgggtctagccgggttcagtggtgtgtgccttgtagtcccagctactctggaggctgaggcaggaggattgctcgagcccaggtgttcaagaccagcctgggcaacatagtgagaccctgtttctaaaacagataaatagttgggtctagtcttggtttaggcaaagcctaattctgcttttctttttttccttttttttttttttttgccaaccaaacaagcagcagtgataattgtgtttttgatttcaagttcttctcactggtgccttggagagcttttctatatgatcagaagagcagctactgtgattcctgggctaatgaagcctagaccccagctggattggaagcaaaggcctttccttcactgggaaaggtgctgctgctacccatctcattattctaagagtgattgagaatagaggggctgaagggaaacgaaagtaggagaatgttggccagagctagtagagaaagaacgtaatattgagaaagcagacatcagtgctaggtgaggtgctttctttagagagctgtgtgtatagactggggaggagtctgtctggggacaggaatgctgattcctttttttccctgggcagaatcctaatgtacctggctagctggtggtgagtaggggctttggggccaacttggtgggctccccaaggaaacccctttgaaaccaatggatgcattcacgggctcgggtctcaagaggaagtttgatgatgtggatgtgggctcatcagtttccaactcagatgatgagatctccagcagtgatagtgctgacag

SEQ ID NO: 9524 - DNA, 2300 bp, Homo sapien
ccaagccatccagcctctcacttctaaagctgagatggcttggtagctagtggatctggcttcatagtttcttggttgcagtgaaaaatgtaccaggttttggaaccagcctaacgtgagtttaaatcctgctgtccatccatctatccaataaatatctatcatactcttaaatgtcaactactaggctttgtactgtgtgttgaggatacagtaaacaaaacaattccttgctctcaccgaatttagtcaagtgagacaagacaaaaacaaatacgtggatgctaagaagaaatataaggcacagggatagaaactaaggagaagcaccattttagaaatatggttaggcatttgtgcccgggagtttgaggctgctgtgagccgtgattgcgccactgcactccagcctgggtgacagagtgaaatcctgtctcttaatgcagggaaaaagaaatatggttagggaagatctcggatatggggacattcgagcagatattatgtgagggagtaagtatgtggctagctggtggaagccagacaaaaggccctgaggtaagagaatgattgcccagttgaaggagctgcaatgaggccagtgtattcaagcagagtatggaagggggaaagtagaagcaaacaagatgacagaacaaaatgagggggcggggtgggggtcgggggacaagagaatgcagctcgagcttgccgagccttatagttcaagggaaagacaacaaagaagaaaccaaggctatgtgtccttggcaaatcacatacaacttttgacttcttaatcttggttttccccttttttttctttttctttttctttttttttttgagacggagtttcgctcttgttgaccgtgctggagggcaatggtgcagtcttggctcactgcaacctccgcctcccgggttcaagccattctcctgggtcggcctcccgaggagctgggattaaaggcacgtgctaccaccctcggctaatttttgtatttttagtagagacagggtttcaccatgttggtcaggctggtctcgaactcctgacctcatgacccgcccgcctcggcctcccaaagtgctgggattacaggcatgagccaccgcgcctggcgccctttcttaaaaataggttgcggaagggcgcggtggctcatgcgtataatcccagcactttgggaggccgaggcgggcggatcgcctgggcccaggagtgcaagaccagccggggcaacatggcgaaaaccccttttctatttaaataaataaattagtttgcaaagttgagaagatttttttttttttttttttgagacggagtctcgctctttcgcccagtctgcagtgcagtggcgcgatctcggctcactgcaagctccgcctcccgggttcacgccattctcctgcctcagcctcccgagtagctgggactacaggcgcccgccaccacgcccggctaatttttgtattttttagtagagacggggtttcaccttgttagccaggttggtctcgatctcctgacctcgtgatccgcccacctcggcctcccaaagtgctgggattacaggcgtgagccaccgcgcccggcagcaatttttttttttttaaagaaaacactcaaagcactccctcatataagtagataactcaagatattgcttgtattctttataacctgcgcaggctgcaataagtcatattgctgaagactaagaccccatgagcgaggagaaggggggatcatgttcctaatggcgtgtggtcaggacacgaaagaaaaagggagctttggaggagaattcgtttatttaagatctgtagctgagtctcctctcttcccccattaaaaggttgcagcagagctgccgcctcgggagccggtttgcgcgccggcttcggctttgcagcagttaccgcctacaactcccggcatgctgctgggtgtgggccggcccgtagactccatttcccagccagccccgggtctcggtcaggacgtgccggcgcctataagagccagtgcgctgcggccggatcctattgttagccggagccggggcggttctgggcgtctgctgccgggggcgcccgagttgccggagacgcccggccctctctgcctgccggctgggctgcccaccgccctccctccccgccctgccgccctgggagctccccggccgtcgccgcggggcccgggactcgctcgctcctccctccttcccaccgggctagggcggcggcggcagcgggggcggcagagaccatcacgggaggaggcagct

SEQ ID NO: 9525 - DNA, 2300 bp, Homo sapien
acaaggcatggctctatctaagagaggtttaaaaataccctaagtacaatgctggtttacaaaggattttgaccaccgggcacggtggctcacgcctgtaatcccagcactttgggaggctgcgccaggtggatcatttgaggtcagttcagaaccagcctggccaacatggtgaaaccccgtcgctactaaaaatacaaaaattagccgggtgtggtggtacacacctgtaatcccagctactcgggaggctgaggcaggagaattgcttgaacctgggagatggaggttgcagtgagctgagattgcgccactgcactccagcctgttcgagagaccaagactctatctcaaaaacaaaaacaaaacccaaaaactttgagccctcagatctccatgtgacatctctctttttgtctatgagcccaggacccattcctttatccacagtcacacattttgagatagaactggctcatgggaagaaaagatggcttaaagagatactgaatgtctccagaatgagctaagactttgatcctagggcttaccaaggtaagacggcaggtttaagcctggagccttcagagagatgcctgtggctgaaacaccccataccagcacaacatgttgccatcttcatgtcaacttctctctttttcttggttctcttattcctttttcattcctttttaaattcaataaacatgtttaaaagtcctgttgaaagcaggaactatagtaggagatatttagaacgcaagcctgaaaaagacctattccttattctttagatcaatctagtgagagaggcagatatatacaaaagtataagtcaaggcagattttaaaaaattcagcaacggaatacaacaatgaaccaagactttcacataaaggcaatgtcttgtaacgaaaaatgccaggctttggaatcagctctgaagctggcatgtcaatttagctccggccaatttaagggcttagccttggtttcttactgataaaataagagtcattaaatttagctttataattctaattccaagatcgctttgaggactactcatagtgtaataaagttcctagcagtagttgatacttaataaacaatggccattattactcaatcctcaaaggaggaaggtggagcagataaagttactcccactcccgtttacaaacgaggaagctaaatctgtgacattaagcaattgttctgaagacaccaaagtagcaaatgaagacgccagcctaaactctgattttcagatcttttaaattccaacaccccataccagcacaacaaccttttaaaaaccactgttttttttttttttttttttttttttttttttttttttgagacggagtttcacttttgttgcccaggctggagtgcaatggcgcgatctcggctcactgcaacctccgcctcctgggttcaagagattctcctgcctcagcctcccgagtagctgggattacaggcccgcgccaccacacctagctaatttttgtatttttagtagagacggggtttctccatgttggtcaggctggtcttgaactcccgacctcaggtgatccgcccgcctcggcctcccaaagtgctgggattacaggcgtgagccaccgcgcccggcctaaaaaccacatttttactgatctcatgcttttctgttcaaatgcattagagaggatgccgaagataaaatgaatatacagggaagtgggacttatgcagggtcttgacctccggagaggtgagtttaaggagacaggagtatgggcaggagcaagcgcacacacgtaaggagcgtttgggaagccgtcaagagtccgccaggggtggagtgggttcataaggctagaagaagggctccttccatggctcagggtgacgacttgatgggtagcgaataccagaactctggtaactacacggatacacgtttaaacccggacacttgcacgccgggtcctccccgtgatcgcccagcccatctcgggggcagagccgtggcgcagcccgcctatcatcgctgccgagactgacgcggtctcttctttataggcgaacgacagcgtgacgtcatgttcgccgggcaggcgaggaaagaggacgccatgattggttggcgctggggcggcggacggtggaagggcctggcgagtctaggttttacgcctgtgctggactttctccttccatgtttccaggccgtggggggctacagagggcgagaagtcggctcagcggaaacctggatttggttctaagccgtggggttgagaag

SEQ ID NO: 9526 - DNA, 2300 bp, Homo sapien
cggtccaggcaccccctcaggtttgggcctccagctagggtttggctcttccccatcctcatgtggccttcggcccatcgccctcagaatgctttgtttgtgctcagctgggtctcagagacccagtgtttgcgctgtcaatgttgattttttattttttcttttctttttgaaatcttgtttgcttttgcaggtcttgactcaggaaaacttagccacagttctgacaggagttatggttccagcaggggcagttactcaacctcttcttatccccatcagtattgcaggtcaagtggctggtcagcaggggctggccgtgtggacaattcctacagcaactgtggctgccctcccaggactgaccgctgcttctcctacggggggagtgttcaagccacctttagccggtctccaaggtaacggcaactcttcccaggactgcaccaggccccccaccctctactacacccccgcacgtgtgcttgccatgtcggactcagaacccacggcccacccagggcaaccgccctggagtctggatccggtgtcttgggcatccggccgcagagctgctgcaccacctcgggactgtaggccgtgacgccacgctggccccgcaggcctgccgtacttcggccagctgtctgagactgcccctctccccccacgccagaactcaccccatgaccggcctcctgggaaggactacaagaagattcaacgtctggttcttgaacctacacatctcctggccccagggaggggggataagagatgctggcgtgcgccagcccttcaaggatcaagggaatcgtggctgcctgccccactgagcccactgccccaaccccctctccttcttgtgccagatcccttgggattggagccgctgtgagcagtggctaggcatttgagcacctctgtctctgccttgctccatagcagctgctgtgctgaacaccgctcttccggcaccggtacaagctgccgcaccagtacaggcctcctcgacggcccaaccccggccaccagcccagccccagacgctgttccagacccagccgctgctgcagaccacacctgccatcctcccgcagcccactgctgccaccgctgctgcccctacccccaagccagtggacacccccccacagatcaccgtccagcctgcaggcttcgcatttagcccaggaatcgtaagctgctgccctcacccagggctgaccagggatggacggaatcatgggccaagggtggaactgacccttcccacagtggaggacgagccccccccgaaaacagcccttttccaacacatcagcagagatgggctccctctgaggccttctccttgcagctgccagcccgtccatcccagataaaagcagacaacctctgccaagagggctgggcacattctccagaacctgaaccactggaccaggcttggagggtgggatgacgtctgggggttgaaaacttgtgagctgtccctacggtgcagtcagagcttacagctctatgctggtgtctgtccagtgtagctcctggcttggcagtgggaggcgttagatatgactaggatcacatcagcctctccagtgtggcccttctaccctcccaggcctggcctgaaagattaacccgagttacttttccatgactgtggccctgcccttccctgctgacccctgcagcccctagccctggaaaccatccagccggtagacccctagccctggaaaccatccagccggtagacccctagccctggaaaccatccagccggtagacccctagccctggaaaccatccagccggtagacccctagccctggaaaccatccagcaggtagacccctagccctggaaaccatccagccggtagacccctagccctggaaaccatccagccggtagacatgggcctgaagcccacattcacatctacccaccccaatgccctctgtcctcttccctctgcccggggttcttctcaccccttggcttctgagcaaggctcttcctccacccacagatcagtgctgcttccctcgggggacagacccagatcctggggtccctcactacagctccagtcattaccagcgccattcccagcatgccagggatcagcagtcagatcctcaccaatgctcagggacaggcaagtggccaaagacagggctggagggtggggactgtggagaggctggccaggggatggcggccaggtcttgggctgtgggtcatagaaactcgaacagacgtcaagctgttgttcctatctcctctgc

SEQ ID NO: 9527 - DNA, 2300 bp, Homo sapien
tgtcctcaccaccgtagcattcaggaagctgcctcatgggccagggaagaccaacaattggtcttgggctatgtagcaatgcagcatggggctgagggtccccgcttcaggctgcagatgggatgtcatgtactgctgtggtgacccctccactcacgtcaggctcactccttgtccttctttctctcaatgccttgtgaagtgaagtcacccccggggatccctccgagccctgccactgccattgccaccttcagccaagccccaagccagcctcaggcatcgcagaccctgacgccactggctgtacaagctgccccccaggtaagggctgccctcgggagctggacagaaggccgggggcaggagcgaggcatgggacagccagcatggggaagccatggaatctgggaacttcatgggggcaggacagggaaggggctatggcttgagggagggactctcccactaggcacatccagcctcacccctgcctagatcaggcccatttggaaaaggggatctacatttgcagaatcatctccttgggcctgccaggattgcagaaataacattaactctttcacgcagccagagtttctgtttatcaaatgactaaatgaatgaatacccttgccggccctccagtggatgcctgtaagagttaatggattgttcagagtcctcatttagagccagggagtggccccagcaccatgagaggctgccttcaggatcctgcaggcaggcagagctccctgtccctttcgctacattccctgactccaaggcatccagccaagggtatggtccttcagaaacttctcggaggcctctgtggggccttgaccacttggttccattagcctctgcggggccttgaccacttggttccattagcctctgcggggccttgaccacttggttccatcagcctctgctccctgttccctggccactaagcacggggcctgtcagcaagggctcgcggaaggcctggcaggcagcaggctgtggtgggggaggcctgtgcccccttcccatcctgtgagcagggccgccttgccctggatttaggcgacttctctgaaggcaggatagtcggtccaggcaccccctcaggtttgggcctccagctagggtttggctcttccccatcctcatgtggccttcggcccatcgccctcagaatgctttgtttgtgctcagctgggtctcagagacccagtgtttgcgctgtcaatgttgattttttattttttcttttctttttgaaatcttgtttgcttttgcaggtcttgactcaggaaaacttagccacagttctgacaggagttatggttccagcaggggcagttactcaacctcttcttatccccatcagtattgcaggtcaagtggctggtcagcaggggctggccgtgtggacaattcctacagcaactgtggctgccctcccaggactgaccgctgcttctcctacggggggagtgttcaagccacctttagccggtctccaaggtaacggcaactcttcccaggactgcaccaggccccccaccctctactacacccccgcacgtgtgcttgccatgtcggactcagaacccacggcccacccagggcaaccgccctggagtctggatccggtgtcttgggcatccggccgcagagctgctgcaccacctcgggactgtaggccgtgacgccacgctggccccgcaggcctgccgtacttcggccagctgtctgagactgcccctctccccccacgccagaactcaccccatgaccggcctcctgggaaggactacaagaagattcaacgtctggttcttgaacctacacatctcctggccccagggaggggggataagagatgctggcgtgcgccagcccttcaaggatcaagggaatcgtggctgcctgccccactgagcccactgccccaaccccctctccttcttgtgccagatcccttgggattggagccgctgtgagcagtggctaggcatttgagcacctctgtctctgccttgctccatagcagctgctgtgctgaacaccgctcttccggcaccggtacaagctgccgcaccagtacaggcctcctcgacggcccaaccccggccaccagcccagccccagacgctgttccagacccagccgctgctgcagaccacacctgccatcctcccgcagcccactgctgccaccgctgctgcccctacccccaagccagtggacacccccccacagatcaccgtccagcctgcaggcttcgcatttagcccaggaat

SEQ ID NO: 9528 - DNA, 2300 bp, Homo sapien
taaacacagaaacaaaaagtaatatatgctcatcaaatatttaagcaatgcagaagtgtatacaacataaagaaaaccgtgattaacatttttatgtatgtctccctgaactcctctgatcacatccatatttctttcttcaaactgtcgctgatatccatgctatccaaagcctttgatctatgtgtagcaccaaaccaagtgacataaatgaaaagtttcaaccttcatgtgacaaagttcagcagcaatactgagcccctccttcacataaagagtagtgggaaatacaaacatgagtaagtcacaaccagtgctctcaaagaattcacagtccagggagagaaactacagggactaccggccaaacaaaaaccccaagaactgtaatatcaagccacgcagtagagtttcacagggccattaaaacgagttcaaactattgtacaaggaatgacaccttacagttgtatagagcttgcagctttcagttttttcacatacaggctcacaaacttaaccctatgaagtagtcattataaatgtcattataaatattatccttgttttataagtaatgaagaagttaaattacttgcctggacggctagtggaagagttgggactaaaacctaagtattctgactcctaatacattggttactcataaatccgccgccagcagtacctgctcacttccagatggaaacagcaagctgataacagcctagtccactggccaggttaacgacgaggccgggccattcaatgcccttccaccacgaggccttacggagcagtcccggggaggactgaggcctccaactgcattctcacactgcctctaacccatctacctctagctatcctcagaccaccaaatatcgggagagggtgggagggggaacagcctaggatgacagcaggtggcctcagtattgggatccacattcactggatttacagagcctccttccttcccagttcttctctccattcccacgcttccactttggtcttccaactttttcctctttcagttgtccaccacttctccaatctgctttccctcagccacccacatccaccccttttctggtcccctctctaccttaagaagctgctagaggtttttcaccattccactgaactttgtctttctgttcacatttccttgtctacttggacaagaaggccggaaatctgcttttagacaacacagcccacggccgccaccgggtgagagacctgggacccttcgctgctttggcgctggggcacagctgttcagaggttctccacgttggctgagcgatgtctgagttcccccgcctttctagggagggagggatagacataaacttgactttcaacattgaggacagttgactacctagaggaaaggcggtggccgggagtcaccgccccaaccctcagctgaaggccatgtggcatggagggtccggactccagctcctactctggcaccttccgaaatgaaaccacctccgcggcacctcggaggggctgagtaaccagacccactgaccgtccatccctgtcccgggagagagcctccgggacctcccgctcggccagggccagagggtcccctccccacccccacccctcgctcctggctcccgtgctcccctcccttccctgaccgccctcccagcccgccgcccccggcggctggcgcgggcggtgcagcatgcggcaaagctctttgcataaattatgctcatgacgcagcagctaaaaaaatccaagtagcagaaggagggaaaaaagggggggagggaaaaggggggggtcgtggaagggggaacgaagaaaaatatatacctgaccgcccccccacccggcttccccttcccgcttcccggccgtcccctctccgcccggcttagcctgcggagcccccttcggctctgcccagcccaggctgggggcctgggggcggcggcgggtcccgaccagctcccgggccgagccgagcccagccaagccgcactggcttctttgtctgcgggcggcggccgccgtggccccggccccggccccggccccctggcccgggctgtgagatgaatctctaatcggtggccgccagacacccgcggcgaaggcggctcgggctcgggctccggtaagtagcggggtccggggcggggaggggtttgcacggagggggagggggccgggcaggggaggtttcgggtttggttaatatgcaatgcccgtaattagcataatttatatatttatgataaagagaaaaaaagccgcggggccgg

SEQ ID NO: 9529 - DNA, 2300 bp, Homo sapien
gttaaattaatgtaagaaagaatgtttgataaatgaccaaataaacatcttcatctcattggggaatctacgagaatgaagaaaatgccaaagtttgatcctgttcaagaaagtagctaattactactacttttttttgtagagatgaagtctcactatgctgcctaggctggttctgaactcctggctcaagcgatcctcctgcctaggctgcccaaagtgttgggattacaggtgtgagctgttgcacccagccaccatttacttcttaattccacctgccagagaaagcactggcctgcaactctttcatttttgttagtaatctcatttggctctgccctggttttcccaatgcccaggtcccactgtgacaagcaaaatacccaacaacctgtaaagtaggcctgaccaatctgagggcagtttacatgagcaggaggtaggcccaggagagttcctgggtcctaagagttaaccctttaatcattggacaatggaggtggcaagatcgcttgaggctggaaattcaagaccagcctggccaacacagggagaccccatctctgtattaaaaaatgaatagcacgtgcctgtaatcccagctagtcgggaggctgaggcaggagaatcgcttagaaccctggaggcggaggttgcagtgagctgagattgcgccactgcactccagcctggcgacagaccaagcctctgtctcaaaaataaataaataaataaataaataaataaataaataaataaataaataaaaataaggctcggcgcagtggcttatgcctgtaatcccagaaccttgggaggccgaggcaggtggatcacctgaggtcaggagttcgagaccagcctggccaacatggtgaaaccccgtctctactaaaaaatacaaaatttgccggtcgtggtggcgggcacctgtaatcccagctattcgggaggctgaggcaggagaattgcttgaacccaggaggcggaggttgcagtgaaccgagatcatgccactgcactccagcctgggcgacagagcaagactccatctcaaaaaaaaaaaaaaaaaaaaaaagaaaagaaaaaattaaaactttttttagaaagaaagaaaaccagcctggccaacatagtgaaaccccgtctctactaaaaatacaaaaattagccaggaatggtggcgcacgcctgtaggcccagctactcaggaagctgaggcaggagaattgcctgaacccgggaggtggaggctgtggtgagatcgccccactgcactctagcctgggcaagcgagcaagactccgtctcaaaaaaaaaagaaaaagaaaagaaaacacttaatcgctgccctaaaggatgccatctttgcccttaaggataattaggttagaaagagaagccatacatagagaaaaatagaggtaccatacaggtcacctgcaacaggtgctaaaaaaaggaaagggccacaaacactccatgggtagtgcagttatgtcagtttcagtgccaggtgttgcgtacagcacggaaaacataaccccttcctgtacgtgagaaaggcaacgactgtcctggggaagacagggcagcgaagattccagtgcaggtctcattcaggaaaggatacatgtgagctggagtggcaaaataaattttaacagagctgaagcttaagttgggcttggtggggagggacgcatgataaactaaggtgtggggagccgatttcaggcagtgcgacaaatttgcagaaatctaagcccctcgtggaaggttgccaaggtgaggtgaccttgagtgaatgcgtgtaggtggaaaaaggttccggggaatgcttgcatcgttctgcatccgagcgtccaacagagaaaagatcctgtttccagacaatacctgcatttggtttttctccagctgagggacaccggtagggggggggaggacagaaacgagcagggggtggggccaaggcgagtgggcgggaccgcgcggaccctcccgcggccgactggaggcccggagcaggggcggagtttccggcggcagcgccactcgggcgtcgggtgacgctaggcggacggaccatcatgtgacacggaagtagctccgaacaggaagaggacgaaaaaaataaccgtccgcgacgccgagacaaaccggacccgcaaccaccatgaacagcaaaggcaaggaccgagggtggcagaggccgtcggggggagtactgctggcccagagcgagcggattcggagcccagggtcaccaaacgccaggtttggggtgggctgcg

SEQ ID NO: 9530 - DNA, 2300 bp, Homo sapien
taaacaatcttcaacacataatagaaaatgtgaaagagacagacccaggtccaagaacgatctgaacttctcctggaattcatgatcaaggtggacagctagaagtatgtcaatgccagcaattgtcctcctttggatttagccctctaggattttaatttccttttctcttggatattctcttatctaaggacaagccaggctcacctttcttttattaagttacatatgcatagctggcatatcactttctttgcctttcttggttggattggcattttcccatgcacatatttacatatatttctcacaatatatttatataaaatgaatttcatcacttttttattgtttgttttcctcctgtatttgtgtttgtttttttcttttgagacggagttttgctgttgttgcccaggctggagtgcaatggtgtgatctcgcctcactgcaacctctgcctcccaggttcaagcaattctcgtgcctcagcctccagagtagcagggattacaggtgtgtgccaccacgcccagcggattttgtatttttagtagagacagggtttcaccttgttggccagactggtctcaaactactgacctcaagtgatccacccgcctcccaaagtgctgggagccacagtgccctgccctctggtttcttttataatgaacactttaggaataaaagcaactactcttgctttgcttgtgactttgttttgttttctccctttatgcctctctcctctgagaccttccctttcggtctgttcccggattaacatgcacaatctgatgatgcctgtctttctacagaaagtatttctgtataaatactggtttacaaacctacagaacgcctaggagtgcgaagtaagcacagaagtctatcactgggagggaaagaataatcacaagggttccaatcctaaacgggaagccaaggtaacaagacctagcgtttattgagcacttactatgtgccaggcaaggttctaatgccttacagtacatatttactaacctatttcgtcccaacagtcactctattcagacaggtattgccccagataagagaaacggaacagaagcagcttgtccaagatcacacagcagagctgattccagtgcctgcgctatatactattacatcctcttagtcactgaattcttctgattaatttgggaacatttcctgccacaaacgagtgagtcaagaggtagctaaagcatggcactgattattcaaattgaggtgctcaccatgcttctagaaccatggatatgagatggctttacaggcatgatcactttcagacccgcattttaggaatgaggaaacagattttcgagatgttaatttgcccaaagtcacccagctagcaagcagaagagctggggctgtttgaatccaaagtccacggcactcctaaccgctgctcaacgctgccccacaagaacgtccagctggcaagacccgggtggggctcgttgctctccccgcttcacctccctgcttcacggccgggggtgtgctggctaagttcgctcatctgccaagcttcaggacacagacctatgtgagcaagcgataaacaaatgcaaataaatgtaactttccacattagctaaaaattcagagaacgtcaagcccagggaaatgggacggatcccagttagcccgcggctccaatctggtccccccccaaccccgagcctcgcggcgagaaaggaagcggctccggatggagagtaaagtgacaatcggagaagggcaggctgcctttcctcccgggggagccaaggggacctgcagagggcggtttctctccgcttttcctgtcccaccccgtcggcctgccccccaccccctccggcctctgcgccaaccccgcgcgccacccgcggcttcctccgctcggggtcctcgttcggcctctgctggcctccgcgactccgcggtgcccgcccccgttgagttcaaaaggacgcgcggagcggcgccggcccttcaccagcagcccgtccgactggaaaggtgagcacgagggaagggcgggggcgccggagagccgggtcgcccacattcgccgcagccacctcggccgtggcaggaaccgaaacccggagcggccgaagctcagcgctccgctggggcagagggtcgcggcggctgggaacgccgctccccgacgcaccggccgcccccagcgcagcgcgctccgcggggtgctggtaacgcggggggctcggggcgggggcggggacgggggcggggccgcggggcgaggacca

SEQ ID NO: 9531 - DNA, 2300 bp, Homo sapien
tagctcggattacaggcgcctgccaccacgtccagctaatttttatatttttagtagagacagggtttcactgtgttggccaggctggtcttgaactcctgaccttgtgatccacccgcctcggcctcccaaagtgctgggattacaagtgtgagccaccgcgcctggctgagtctatagttctaaacaatcttcaacacataatagaaaatgtgaaagagacagacccaggtccaagaacgatctgaacttctcctggaattcatgatcaaggtggacagctagaagtatgtcaatgccagcaattgtcctcctttggatttagccctctaggattttaatttccttttctcttggatattctcttatctaaggacaagccaggctcacctttcttttattaagttacatatgcatagctggcatatcactttctttgcctttcttggttggattggcattttcccatgcacatatttacatatatttctcacaatatatttatataaaatgaatttcatcacttttttattgtttgttttcctcctgtatttgtgtttgtttttttcttttgagacggagttttgctgttgttgcccaggctggagtgcaatggtgtgatctcgcctcactgcaacctctgcctcccaggttcaagcaattctcgtgcctcagcctccagagtagcagggattacaggtgtgtgccaccacgcccagcggattttgtatttttagtagagacagggtttcaccttgttggccagactggtctcaaactactgacctcaagtgatccacccgcctcccaaagtgctgggagccacagtgccctgccctctggtttcttttataatgaacactttaggaataaaagcaactactcttgctttgcttgtgactttgttttgttttctccctttatgcctctctcctctgagaccttccctttcggtctgttcccggattaacatgcacaatctgatgatgcctgtctttctacagaaagtatttctgtataaatactggtttacaaacctacagaacgcctaggagtgcgaagtaagcacagaagtctatcactgggagggaaagaataatcacaagggttccaatcctaaacgggaagccaaggtaacaagacctagcgtttattgagcacttactatgtgccaggcaaggttctaatgccttacagtacatatttactaacctatttcgtcccaacagtcactctattcagacaggtattgccccagataagagaaacggaacagaagcagcttgtccaagatcacacagcagagctgattccagtgcctgcgctatatactattacatcctcttagtcactgaattcttctgattaatttgggaacatttcctgccacaaacgagtgagtcaagaggtagctaaagcatggcactgattattcaaattgaggtgctcaccatgcttctagaaccatggatatgagatggctttacaggcatgatcactttcagacccgcattttaggaatgaggaaacagattttcgagatgttaatttgcccaaagtcacccagctagcaagcagaagagctggggctgtttgaatccaaagtccacggcactcctaaccgctgctcaacgctgccccacaagaacgtccagctggcaagacccgggtggggctcgttgctctccccgcttcacctccctgcttcacggccgggggtgtgctggctaagttcgctcatctgccaagcttcaggacacagacctatgtgagcaagcgataaacaaatgcaaataaatgtaactttccacattagctaaaaattcagagaacgtcaagcccagggaaatgggacggatcccagttagcccgcggctccaatctggtccccccccaaccccgagcctcgcggcgagaaaggaagcggctccggatggagagtaaagtgacaatcggagaagggcaggctgcctttcctcccgggggagccaaggggacctgcagagggcggtttctctccgcttttcctgtcccaccccgtcggcctgccccccaccccctccggcctctgcgccaaccccgcgcgccacccgcggcttcctccgctcggggtcctcgttcggcctctgctggcctccgcgactccgcggtgcccgcccccgttgagttcaaaaggacgcgcggagcggcgccggcccttcaccagcagcccgtccgactggaaaggtgagcacgagggaagggcgggggcgccggagagccgggtcgcccacattcgccgcagccacctcggccgtggc

SEQ ID NO: 9532 - DNA, 2300 bp, Homo sapien
ctctgttgcccaggctggagtgcgttggtgcaatctcggctcactgcaacctccacctccagggtgcaaaaaggttctcctgcctcagactccgaagtagctgggattacaggctcccgccaccacactcagctaatttttgtatttttagtagagacgtggtttcgccatgttggccaggctgatctcgaactcctgacctcaggtgatctgcctgccttggcctcccaaagtgctgagattacaggcgtgagccactgcgccccaccagttacattttaaagagaaaaaaaagatgcttattgaaagaacattactaacaactgtcgaaattgtgaaagtgacagcaaatcagtagagtcagtcagttgagccagatagcctctgagtctgtagttctttttttcttttttttttgtcgcccaggctggagtgcagtggcacaatctcggctcactgcaacctccgcctcccgggttcaagcgattctcctgcctcagcctccccattagctcggattacaggcgcctgccaccacgtccagctaatttttatatttttagtagagacagggtttcactgtgttggccaggctggtcttgaactcctgaccttgtgatccacccgcctcggcctcccaaagtgctgggattacaagtgtgagccaccgcgcctggctgagtctatagttctaaacaatcttcaacacataatagaaaatgtgaaagagacagacccaggtccaagaacgatctgaacttctcctggaattcatgatcaaggtggacagctagaagtatgtcaatgccagcaattgtcctcctttggatttagccctctaggattttaatttccttttctcttggatattctcttatctaaggacaagccaggctcacctttcttttattaagttacatatgcatagctggcatatcactttctttgcctttcttggttggattggcattttcccatgcacatatttacatatatttctcacaatatatttatataaaatgaatttcatcacttttttattgtttgttttcctcctgtatttgtgtttgtttttttcttttgagacggagttttgctgttgttgcccaggctggagtgcaatggtgtgatctcgcctcactgcaacctctgcctcccaggttcaagcaattctcgtgcctcagcctccagagtagcagggattacaggtgtgtgccaccacgcccagcggattttgtatttttagtagagacagggtttcaccttgttggccagactggtctcaaactactgacctcaagtgatccacccgcctcccaaagtgctgggagccacagtgccctgccctctggtttcttttataatgaacactttaggaataaaagcaactactcttgctttgcttgtgactttgttttgttttctccctttatgcctctctcctctgagaccttccctttcggtctgttcccggattaacatgcacaatctgatgatgcctgtctttctacagaaagtatttctgtataaatactggtttacaaacctacagaacgcctaggagtgcgaagtaagcacagaagtctatcactgggagggaaagaataatcacaagggttccaatcctaaacgggaagccaaggtaacaagacctagcgtttattgagcacttactatgtgccaggcaaggttctaatgccttacagtacatatttactaacctatttcgtcccaacagtcactctattcagacaggtattgccccagataagagaaacggaacagaagcagcttgtccaagatcacacagcagagctgattccagtgcctgcgctatatactattacatcctcttagtcactgaattcttctgattaatttgggaacatttcctgccacaaacgagtgagtcaagaggtagctaaagcatggcactgattattcaaattgaggtgctcaccatgcttctagaaccatggatatgagatggctttacaggcatgatcactttcagacccgcattttaggaatgaggaaacagattttcgagatgttaatttgcccaaagtcacccagctagcaagcagaagagctggggctgtttgaatccaaagtccacggcactcctaaccgctgctcaacgctgccccacaagaacgtccagctggcaagacccgggtggggctcgttgctctccccgcttcacctccctgcttcacggccgggggtgtgctggctaagttcgctcatctgccaagcttcaggacacagacctatgtgagcaagcgataaacaaatgc

SEQ ID NO: 9533 - DNA, 2300 bp, Homo sapien
tcgcctggcagggcaaggtggttcacacctgtaatcccagccctttgggaggctgaggcgggtggattgcttgagctcaagagttccagatcagcctgggtagccaggagtggtggcatgcacgcaccttagtcccagctactcaggaggctgaggtgagaccatcacttgggcctgggaggtagaggctgcagtgagccctgatggcactgctgcactccagcctggcaacaaagcaagaccctgtctccaaacaaacaaacaaacaaacaaaccctaatcacctattcccagaaaattttgtatccatctctacaaataaattaagcacattacattagaatcacctgattacccacctatctccacttccagactttaagcatctttatttatgtacttatttattaatacttattctttattggttgagaaagggcctcacgctttgcccaggctggaatgcagtggcaccatcagggctcactgcagcctccacctcccttggctcgggtgatcctcccacctcagcctccctgatagctgggactacaggtgtgtgccaccacgcccaattaatttttgtatttttagcagagagaaggtcttgctatgttgcgcaggctagtctcaaactcctgggctcaagcaatctgcctgcctcagcctcctaaagtgttgggattacaggtgtgagccgtggtgcccggccagacttcattaagcatcttaaggtcagggactgcattttattcatccttgtttcagaacacccagcaatgcctggtacacagttgaccttgagtgcagtaatgattgttttggagaaagaagaggaacacagtagcatacaagggcctctaattttgtgtcaggccctatcttccccctccactccttaggaagtgttattttgaccttcttccctgccttgaggaaattttaacctgcactgtaaaatctgagtacgtggttcctccacacctagtgtcctaatctcaagctatcccctcaaacaggtcagggaggaattttttggagaacttctccctaaagaaacaatagttgtcatctcaacagccgcaccccaatttgcacaatctgtgtctgtgttcacattctgcctccatccagtacactgtactccaactagaaaaacttgctcctcatgctcagcacgggcgtccatactatcctcctcagccttttttcaatgtgatcattctcttgcctaagaaccagccccctaccctgtttctatctccagcttagttgttcctcatttatttatttatttatttatttatttatttatttatttgagacgaactgtcgctctgtcgcccaggctggaatgcagtggcgcgatttcggctcactgcaacctctgcctcccgggttcaaacaattctcctgcgtcatcctctcgagtagctgggactgcaggcgtgcgccaccacacccagctaatttttgtatttttagtagcgacgcggtttcaccgtattggtcaggctgatctcctaacctcaggcgatccacccgcctcggcctcccaaagtgctaggattacaggcgtgagccaccgcgcccggcctgtttctctctttcaagcccggctcgggtgtcctgcctgctttctgcactctatccctaccagttccaggcttagagcctacctggagcaagaaacgcagtgtacatggcggcttcgcatgcatactcagagaacctaaacgtgttttcgatatggtaggtcctctcgctgagtggaacccacatcattttctaccctgcggtggcagttgctttgcagtgctcagcgtgatgggaactggctttccggagcgagtgagtgtgggcccaccactgaggacctggttcagtgaggccgaggtttcgggcaggggttggagctcggaagctggcctcgagcgagcgctgcctgagggtaggccccgggcccgcccctccgagccggcctgctccagctgacagtggtgggctgaggggcgggcctcagggctggccaggggcggcctgaggtggctcagggctggggccggatgcgaggcatgccgggagcccgcacttcctcctcgggggcctcagaaaaccacagggcgcggggccagggcggcggcccccagggagttggcaggatggcagagggcaaggcaggcggcgcggccggcctcttcgccaagcaggtgcagaagaagtttagcagggcccaggagaaggtaggtggccgggcctcgctgtctgtctggcccacagggagccgaggccgaggccga

SEQ ID NO: 9534 - DNA, 2300 bp, Homo sapien
cactgcaacctccacctccagggttcaagcaactctccctgccacagcttcccaaggagctgggattacagctcccaagcacagggactacaccacaacgcctggctaatttttgtattttcagtagagacgggatttcaccatgttggccaggctggtctggaactcctgacctcaggtgatctggccctgctgtgatgtaaagaggtaaccttcaggaggccctcaagcctcctcttggactcctcatcctggggctagaggccagaggaagcagggaagcgggaggagaatgaccaaagaggccccgggttccctagcgcagctcacccctcttccctgagtgtgccagaatgctggagggcaggctggagagcaagctcttcaggttatctgagcatcaaagtgcaactcctctgaacagctctagacactgaaaaagtgactgtgcagattccttcaaagagcattttccaggtttctcccacccctgcagccatgaagcttggattctggagtgtttaggcaacaaaagccctgggtgggcaggtgatggtcctgcttctgtctaggttcctggcttctccctgcctaattccaaaccccatgcgttgctaccatgactgctgcacccacagtcctctgctctggagcctgcagtggctctgatcattttgtggccaacccaagggtcctctgcccacctcaaggcacattgcaactcttttctctctctatttatttatttatttatttatttatttatttatttatttatttattttgagacagagtcttgctctgtctccaggctggagtgcagcaacctccgcttcccaggttgaagcgattctcctgcctcagcctccagattagctgggactgcagaagcgcaccaccatgcccagctaatttttgtattttgtttttgtttttttttagatggagtctcgctctgtcgcccaggttggagtgcagtggcgcgatctcggctcactgcaagctccgcctcccgggctcacgccattctcctgcctgcgcctcccgaggagctgggactacaggcgcctgccaccacgcccagctaattttttgtatttttttagtagagacggggtttcactgtgttagccagagtagtctcaatctcctgacctcgtgatccgcccgcctccgactcccaaagtgctgggattacaggcatgagccaccgcgcccggccaatttttgtatttttagtagacggggtttcgccatgttggccaggatggtctcgatctcttgatcttgtgatccgcccgcctcagcctcccaaagtgctgggattacaggcgtaaaccaccgcgcccggccgcaactcccttctctctcctctacgaactgtgatgaacaaagcctttcatctcctgcaggaacctcggctcctaccctcgttctccctctgccctccaccctccatctaccctcatagccctcagactgtcttcacatcccaaggatcccctcctctaccctgcctcatattctcctctgggagccccttcttggctctccatctgagagggcccaagcctgtttctcagtactttcctcccccagaattatctccactgcatctatttggcttttgtgtctgcatttacacctatgcctgcatcctgggggcatgtgccatctccctctttgggcagagagagttgctgtgtcttccttgcccttgctaaccactcccccctcttccactatccccctggcctccagctgctagtgcacagggcaagtctctgcatttatggtgccactgaggacaacgagagagtgatggatgacaaggggtgctcccttagagaaaaaccagccctggttctccatcttatttctgaaaaagagtttgttggatgcttttcaattaaaagcagatgattaattcagccctggccttgttctgtctttgaataacagatacattagtttacttgaaaagaaatattttcatttgtatttccatgtcacttgtgattttccctgccttgcaccctcagccctgccagttggcaagaagacagtcagctttgctgctaagaggagtataaagagggcttggtccaagcaagaaggcagtggtctactccatcggcaacatgctggtcctttatggtaagtggatatggtccagtcgcaaccctggtcctttatggtaagtggatcatgtggcctgaggtctatagggagggggacttgggcaggaaggtcagcaaattttccctaagtccaggccagcaccctgtcccagggcaggt

SEQ ID NO: 9535 - DNA, 2300 bp, Homo sapien
tgacaatattcattcattcatttattcatggtttgaatcctgcctattttcaaaaacaatttcacacagcttctgaaagttgagtatctcctaggctccaggcactttgctgccaaaaagtaactaatggtagctttaacctctgtgactagattgagctctgggggaataggatctgtctttctccgttctgtgtgtccatcatgtagcacgggccctggtggccagtgttacgtgcatcctaggttgaacgaatgaatgagtgccttttagaggataattacatatttccttgacctggtcctagaaggggaagaggacatagtaaaagctaaatgatgagtgagttagtggatgaggggctgcacgtcctgagaaagaggaaaggagggggaggtgggttaggaggggagtccacaaacagctttccccgccaggctccgctcctcctctcccagaagatgcacacacttctccctctgtctctccagatccccgacgtttgctggtggcctcttctccatctccaagtcctactttgagcacatcggtacctatgataatcagatggagatctggggaggggagaacgtggaaatgtccttccgggtgagagtgaagagggctttggggggaaccacaacatcccaggcgacagcttgagaaacatctctcaggcagaggtggcatcagggacatcccatctggaactgaactagaaagggtggctatttcccagtgtgtctcttcctcttttctgctccccctgtccatggcagtagggcttgggcagtcagcctggacagctcaaaacaaactactgggcacaacttctcagaggcaaggaataataggggtaatgaggactggacatctggtgactggggactcttttgcgatgtctgtgggaaagggttagggtgaagatagaaacaggttagtatgttcacaactagggctagaaaaaaaaaacagatgagtaaccagtcatcatcctttttctggaaaaatcaggctccccttcccagttcaaaggacacatgccctggtaacctttgaagtttccctacctatgtacaataagcccttcataacagtcagagaagatggtggccccaactctggtggaccccagaactctgagagattccaggaattaggcaaatcaggattaggtcaggaagcaaggattgcctctccatgaaacctacacaaatctccatgccatggaaaagtaattagtaagtagatgagctcatttatgaagtcacctctcacggtgcctgatgcatattaagcacgtaattgatgcctgctgttactataacgattatgtatttctgttgctgccacactaaaatgaataacaacatactttcccacctaaaacccaaaagaagaaaccagtgggagggatgtcttcagccagcccaccagcatagaaaagggtcacctgccagtcaccccaactcccagcggcccaatcctaggctcctccatgagcctctgacctctgttcaccttcctaggcagccagtgtgctaagggcccaagtgactaccactagccacctagcagccaactatccttgctattaattaacagactgatgctctggtttttatcacctgagggagctgataaactcacatttccaggtcaaaaagccaagtgatcagagctcagagtaggtatacaggcacaggtaacaaaaattaaccagcaggcttttccctaaagtgggccctggtaaacacaggaccctgcagtctccctgtgcttaagtcagagtgaaccaacatcagaaagcctgggatcgtgtagtcatggcctaggaagaagcctggtcggtatcctttttcccagggagagagagcagcatttgcccaagtccttggacctggggtctggtgctctgggaatagaatagagctgcttatggggagactgtctcacctagcccactgaaggcctcatcctgtctcctcttacatcaggtgtggcagtgtgggggccagctggagatcatcccctgctctgtcgtaggccatgtgttccggaccaagagcccccacaccttccccaagggcactagtgtcattgctcgcaatcaagtgcgcctggcagaggtctggatggacagctacaagaagattttctataggagaaatctgcaggcagcaaagatggcccaagaggtgagaggaaatggttctcggagaggtttagatgaagagaagtacggcccccagaccctgttcatgggcctaatggctgggacccacctcatctctaccatc

SEQ ID NO: 9536 - DNA, 2300 bp, Homo sapien
aaagggtgtttactagaggttgcctgtggttgtgaatttacagtgaagcttcccatgcagggtttgtcctcatggctaatccatcagtgacttctcggtctgggagacttctcaaagacaagactcagggcctgtgggggaggaagcaggttggcttccaagtgctcctctgcagttccagcactctctgagcctctcagggtgctacttgtgccggtttaagacccctgggagaggccagagcctcttccaaagtgataggaagccagcctgagcacgactgaaattccttccagaaagtggctgcaggagccaacttcaggtagacaagagcaaccacagggtaacaccagggtcacattcctgggtaggcaccttgatggatcatgcgaatgaacagtgattgggccccagctgtgtgtaaggcacctagataggttctggggttacaggggttctgtatctttctgcttggttgtaccacatgaagctgcccactgagggcagcaaagccctagccatgccaggctggcccaaacagaaaccagcagctgatgattgtgctcctgccatgtctcaccggcccccaccccagcattccatcttgcttatacttccccgggtccgcttcgataccctaacgcttagcccagtccctcttcgaagcaacctggtatctaaattctaggaattagatgtttttgtcaatttatcttatcttgagtccacacctccctgcctgtgtctgaaagccagaatctttttataaccttctaaatgttccctgtagcccaaattgagcttgatctcacctgaccttccactgtttccaggagcaccttttatcagctttctctgttaaaagcaactggcaacttctccccaaatctacagtttctcatgcagtgtaaatcaccagggctaggcgcctactaaaactgtggcttaatagtccctgaggggcaggggccctgaaacagaatggagtcagcccagctgacaatattcattcattcatttattcatggtttgaatcctgcctattttcaaaaacaatttcacacagcttctgaaagttgagtatctcctaggctccaggcactttgctgccaaaaagtaactaatggtagctttaacctctgtgactagattgagctctgggggaataggatctgtctttctccgttctgtgtgtccatcatgtagcacgggccctggtggccagtgttacgtgcatcctaggttgaacgaatgaatgagtgccttttagaggataattacatatttccttgacctggtcctagaaggggaagaggacatagtaaaagctaaatgatgagtgagttagtggatgaggggctgcacgtcctgagaaagaggaaaggagggggaggtgggttaggaggggagtccacaaacagctttccccgccaggctccgctcctcctctcccagaagatgcacacacttctccctctgtctctccagatccccgacgtttgctggtggcctcttctccatctccaagtcctactttgagcacatcggtacctatgataatcagatggagatctggggaggggagaacgtggaaatgtccttccgggtgagagtgaagagggctttggggggaaccacaacatcccaggcgacagcttgagaaacatctctcaggcagaggtggcatcagggacatcccatctggaactgaactagaaagggtggctatttcccagtgtgtctcttcctcttttctgctccccctgtccatggcagtagggcttgggcagtcagcctggacagctcaaaacaaactactgggcacaacttctcagaggcaaggaataataggggtaatgaggactggacatctggtgactggggactcttttgcgatgtctgtgggaaagggttagggtgaagatagaaacaggttagtatgttcacaactagggctagaaaaaaaaaacagatgagtaaccagtcatcatcctttttctggaaaaatcaggctccccttcccagttcaaaggacacatgccctggtaacctttgaagtttccctacctatgtacaataagcccttcataacagtcagagaagatggtggccccaactctggtggaccccagaactctgagagattccaggaattaggcaaatcaggattaggtcaggaagcaaggattgcctctccatgaaacctacacaaatctccatgccatggaaaagtaattagtaagtagatgagctcatttatgaagtcacctctcacggtgcctgatgcatattaagcacgt

SEQ ID NO: 9537 - DNA, 2300 bp, Homo sapien
tggccaagggccaggtgcttgaggataactgctgggaagtgaagcagggatttatcataataatagaaatagttgataccatttattgagggcttagtgtgacaggtgctctgccaaacattttacctacattatctgatttaatcctccccacaaccctgtgagttaggtattagttgcccccactttatagatgaggaaattgaggcttagagggattaagtaaattacccaagggtcacacagctgctaatgatcaaaactaacactttgtgggaacttaccatgtgcagagactgctaagctttgtccatgaattttgtggggaaggagcataatccttgtaacaaccctaggaggtaggtgctactactagaagaggaagaactggaatttgtgcccaggtcccttgccattgatgtctagtgcttaaccagtgagcttatgtgtccagaactctgcacagaaagttctgcaagcattcatcctctagggcatggatccacatgcctgggggtggagcctggtgaacgcccatgcccagccctgccgggaatgtcttgtcatgaaatcttaggtttctgttaaattcttttttattaaataggagtagattacagataacttttatttatttatttttaaagacagaatctctctctcgcccatgctgaagagcaatggtgcgattatagctcactgcagccttaacctcctgggctccagcagtcctcctgcttcagcctcccaggcagctaggactacaggtgtgcaccactacgcctcgctaatttttaaaattttttattgagatgggctctcaatacgttgagcagactggtcttgaactcctgggcccaagcgatcctcccacctcagcctcccaaagtgctgggattacaccatgcttggccaagaaatatttataaaatacgtatagggtctaaagaattacagtccaccagcagccgccatccactttgagaaaaaaacactttgaagtcccccattaaccatctctaatcctgtaccgttttcttcatcttcagaaactggttatgtcatttctttagctttctttttttcgtggggagacggagtcttgctctgttgcccaggctggagtgcagtggcatgatcctagcctactgcaacctctgcctcccgggttcaagtgactctcctgcctcagcctcccaagtagctgggattacaggcatgcgctaccacgcccagctaatttttgtatttttagtagagacagggtttcaccatgttggccaggctagtcttctttagctttctttatagctttatcacatatttgtattcaagaacaagatattgtttaattttagcatgtttttacattttctataagtggaatcatactgtatgtatccttttgtcacttgcttttttcacccaacaacacatccacattgttgcatggagaagtggttcattcttggtcatcactgtagagcactgcacggtatgggtattttgcactttatttattcattctgctagtggacttaaaggttttaccagtttgttgccatttaagtcagtgttggcttaaatgttcttgtacatacctcttggtttgcatctaccagagtttgtctgggatataaaatgaggagtggaattgctggctcaggctgtgttcatttcaaatttttcttgataataccaagttgtttcccaaagccataatgattaaatctcatgagtttaatgattaaatctcatgtagtgtttcagtgttccagtgactctagatccatgcatattaggatcttagggcaggaaagaaacactgcctccggtctcctcattttatggatgaaggaaatgtagatatgggaaagttgtggccaataaggtgatgccaccactcagcaacagagcctggcctcgaaccccaagcacccgactccctccttaccctgtgttggctcacttctctctcttgtcccctcctttctcaggctgaggccccagcttgtggccaccacaacgtatcaagctatctccagggttgggctcaggactcagagctgacgcagctggggtgccccttggttctggaggatgaggctcctccgcagacgccacatgcccctgcgcctggccatggtgggctgcgcctttgtgctcttcctcttcctcctgcatagggatgtgagcagcagagaggaggccacagagaagccgtggctgaagtccctggtgagccggaaggatcacgtcctggacctcatgctggaggccatgaacaaccttagagattc

SEQ ID NO: 9538 - DNA, 2300 bp, Homo sapien
cagggaagagatgaattctgctgggagatctgagaaggctttttggaggggggctagaatataaactgtggggtttggactgtgtcactggctttcaaacttctatgacttgaccaaagtgagaaatatactttatagcgagacccggtacctgtgtatatgtgacagggcatcccaaaaatcttagggcagttttataatttaatcacattacaagcataaattctgcaaaccataaaaactatcatttgaaaatggaatcatttaaacttcttttgtctttagttgtatgaattttgaataacaaatttatcattttaattttgtatcaggcagtgtgtatctttaatagactgaaacaaacattaaaataaaagtttacttttcaggctggacatgatggctcacacctgtaatcccagcactttgggaggtcaaggcaggaggattgcttcggcctaggagttgaagaccagcctgggcagcatagtgagacccccatctctaccaaaaaataaaaattagccggtcttgatgacacacacctatggtcccagctactccagaggctgaggtaggaggatcctttgagcccaggaggtcaaggctgcagtgagctgagattgcaccactgcactccagcttaaggaacagaatgagaccctgtctccaaaaaaaaagaaagaaagaaaaaacgaatacttgcctgtgttacatgtgatacatgatgcactttgatattttcttttcattctattctgggtttttaaaatttatttatttttattttttgagacagggtctcgctctattgcctaggttgtagtgcagtggcatgatcataactaactacagcctcaacctcctgggctcaagcaatcctccagcatcagcctctcaagtagctgagattacaggcctatgccaccacacccagctaactggtctctttttgctaattggtcttttttttttttttttttttgagacagagtcttgctctgtcacccaggctggagtacggtggtgctatttctgcttactgcaacctccagctcctaggttcaatcaactctcctgcctctgtctcctgagtagttgggattacaggcacatgccaccatgcctggctaatttttgtatttttagtagagaaggggtttcaccatgttggccaggttggtcttgaactcctggcctaaagtgatctgcccaccatggcctcccaaagtgctgggatttcaggtgtgagccactgtgcctggtcctaactggtcttttaaagaaatttttgaatgctaatttgcaacactctgaatttattttataatatcacagtggattgtaatcagcagtttgatacaagctgggctgggtaaagcctcagttccttacaccagtgagagaaggtaagtttgtgttctggccggtggggccagggaagcaaatcccatttgttcaatctaggcaggcttttcagagaggatttctggcatcatctcgggatcaaagccaaggatggtccaaagagttgcaggcccaagggtagctggaggaaaaagacttgggaagaagtgctgagccacagcgagagggaaatgagtggatgggggctgcgggcacacttgccaggaaagcaggaggccaggtgtgggagcccaaaggtgagggagatatacaagacaccaggggcggatctcgtgaagctttgtacttgaaacaatagcaaagaatagcagctattctttctccaaggctggtggaggggcgacctccacgaccttgctaaccatacttctgggaatcatctcctacacagggagcagaaatccttaaccccaaagtcctgtggcttgcactagattctgtgtctcttctaagggactcttcctgttgccctcatgctaagcaaacaaactagagaatgagtgcctcaccaccaaggctaatcccaggtgtctcatttcggttcaggatgtggttagtaccttgaggaactgtaggtttgagagagaaagcttcaggcagccagatgggattgagagattagatgcctaggaagagctcaatttaaccctatatttctttctccagggaaaataaaagaagcaaaaacaggccctgctgtgagggaccacgaggcagtgccaggatgaaagagttggagtaacctaggtgattctgagtgaatcagtcaggaggccttcctggagggggtgagtcttgagcactggcaacagttagtaactacaatcttaccatgcctttgtttctaactgtgctccctctttcttgctgga

SEQ ID NO: 9539 - DNA, 2300 bp, Homo sapien
ggctgagatgtcggaacacatccgtgggagccagaaaatgttaagaagaataccatcaccattttaaatattactgcttaccatatcaaatcaagttacagttatcttctctgttttacacagaaggaaactgaagcacagggaggtcaagtaacttgaccaaggtcacacagctagaaatgtggcagaggcagaatttgcattcaggcctatgtatctccaaagcccactctcttaactatgacatcacattgtcttgcatttgactggtgcttggagctttgccaaaacacttcatatacaccttctcatttgctccccacccagggagtgtttatgtgttttggctaagattatatatcgaagttagtgacagggctgagtcagctgcctgccttcatgatactcactgcctccctgcactgagaggccctcagccctagggttagctgcccctcctggtcctgaggtctgttcgaggcaatggttgcatggactaagttcatgctcatatttcctgtccccacttcttccagctgaacttgggcaaatatgtttctgacctcacagggcacctgacacacatcagggcctccccttctctgccctgagttcttccatgctgctacaggtaggagtcagctgttccacccactgtaggactgtgggcagcattactgaggtgaggtcatcttgagcagcccagtctcctgcacacttccctctttcttttgagggtcttgtcctgttctctgccctggtgcccctggaagcaactttctctgattacctctgggttcctaaagtgcatggcaccattaaggaactggagctagggaaatgcctgcaatgctactggctcctgctaggcaattggaatcaaagcatatttctttctttctttctttctttttttttttttttttttttttgagacagagttttgctcttattgcccaggctggaatgcaatggtgcgatctcagctcactgcaacctctgcttcccaggttcaaacaattctcctgcctcagcctcccaagtagctggaattacaggcgcctgccaccatgcccggctaactttttgtattttttgtggagatggggttttgccatgttggccaggctggtctcgaactcctgatctcaggtgatgcaccagcctcagcctcccaaagtgctgggattacaggcatgagccaccacatgtggccggaaccaaagcatatttcaaacccctcacctgacctggttttcatcatcacatgaatttccctgtctcatccttcttaacctttcctttgatgggaagggagacagctcatctgtctggagcggagaatagggcctgtgtggtgcacacacatctctggtagaaggcgcaaaagtcctcgaggctctttggtgtgtccagaactatgaacctcacccagtgcctgtaaattgtgtgtgtgggcctgggggcgagctcagagcacagagttaacatcctttctgagagtgctgcaatgggttgtcggctgctagaaggggtctgctgtaagctttgtgggcaaactgaccaccctccacccccatacacagaagagccccatcctaccctctgcagacgtctgggtctgcgatgattggccctggatgcaagtaaaagctgtttctcctttttgtcagcctgggaatctgaacaactgaggaaatagggaagtcggtgacagtcacagtcatgaacacccagcagattccatttccccacagcaggaggcagatcccttcccacccccaaaagcccccaggctctggagggaattcaaccaagcagggctcagaccgacctccaccagcgaggcttctccttgctgtccccttctgctcaggcgcaacgtggcagggcaggaggaaacctctctgcaagagttgccgtaccagagcacatggggtggcccgatctggggagacggggcacagaaggaatgcagggcatgggtgggtgaggggaagagggtgtggagccctggctctggcttgtccccctctcacccctccaagttccagaggtctgggctcctcattcatctcgtaagcgccaaggtggaggggggtcctaccgagggaggagctacaggccaccgcgaccagcagagagcgaaggcaggagggaccagcctggcccagccccttcattttactgtcgggggtagtgaggaggaagaggaagaggcgaaggctggcggaggaggaggtgagagcgaggactcggcagaagcgagatccgccgaagggaagtccgagcagtcgggg

SEQ ID NO: 9540 - DNA, 2300 bp, Homo sapien
tgcctgccttcatgatactcactgcctccctgcactgagaggccctcagccctagggttagctgcccctcctggtcctgaggtctgttcgaggcaatggttgcatggactaagttcatgctcatatttcctgtccccacttcttccagctgaacttgggcaaatatgtttctgacctcacagggcacctgacacacatcagggcctccccttctctgccctgagttcttccatgctgctacaggtaggagtcagctgttccacccactgtaggactgtgggcagcattactgaggtgaggtcatcttgagcagcccagtctcctgcacacttccctctttcttttgagggtcttgtcctgttctctgccctggtgcccctggaagcaactttctctgattacctctgggttcctaaagtgcatggcaccattaaggaactggagctagggaaatgcctgcaatgctactggctcctgctaggcaattggaatcaaagcatatttctttctttctttctttctttttttttttttttttttttttgagacagagttttgctcttattgcccaggctggaatgcaatggtgcgatctcagctcactgcaacctctgcttcccaggttcaaacaattctcctgcctcagcctcccaagtagctggaattacaggcgcctgccaccatgcccggctaactttttgtattttttgtggagatggggttttgccatgttggccaggctggtctcgaactcctgatctcaggtgatgcaccagcctcagcctcccaaagtgctgggattacaggcatgagccaccacatgtggccggaaccaaagcatatttcaaacccctcacctgacctggttttcatcatcacatgaatttccctgtctcatccttcttaacctttcctttgatgggaagggagacagctcatctgtctggagcggagaatagggcctgtgtggtgcacacacatctctggtagaaggcgcaaaagtcctcgaggctctttggtgtgtccagaactatgaacctcacccagtgcctgtaaattgtgtgtgtgggcctgggggcgagctcagagcacagagttaacatcctttctgagagtgctgcaatgggttgtcggctgctagaaggggtctgctgtaagctttgtgggcaaactgaccaccctccacccccatacacagaagagccccatcctaccctctgcagacgtctgggtctgcgatgattggccctggatgcaagtaaaagctgtttctcctttttgtcagcctgggaatctgaacaactgaggaaatagggaagtcggtgacagtcacagtcatgaacacccagcagattccatttccccacagcaggaggcagatcccttcccacccccaaaagcccccaggctctggagggaattcaaccaagcagggctcagaccgacctccaccagcgaggcttctccttgctgtccccttctgctcaggcgcaacgtggcagggcaggaggaaacctctctgcaagagttgccgtaccagagcacatggggtggcccgatctggggagacggggcacagaaggaatgcagggcatgggtgggtgaggggaagagggtgtggagccctggctctggcttgtccccctctcacccctccaagttccagaggtctgggctcctcattcatctcgtaagcgccaaggtggaggggggtcctaccgagggaggagctacaggccaccgcgaccagcagagagcgaaggcaggagggaccagcctggcccagccccttcattttactgtcgggggtagtgaggaggaagaggaagaggcgaaggctggcggaggaggaggtgagagcgaggactcggcagaagcgagatccgccgaagggaagtccgagcagtcggggagctcaggggggccctcccggggagagggtcgcgggctccttctgccgcttacctgtcgcgccgaggcaaagccgcagccgcgccgcggggtggctcccgggtttccccaccggacggccgggagggtgggaccggggcgggacctcccccagctgcactaacgcgcccgccccgcccctccctggccaggtgcagcgggtcccgccgtgtcctcagcctgctgcgggcccgggaactcccggcggaccggcagaggggcgccccggcttctctgcgtctcagcccgccccgggggtgcggtctttgcggccaggctttcagcgcggaaaaagattggagggtcctagtcaccccaaagaggacaggcattagcagagccgcgggcgg

SEQ ID NO: 9541 - DNA, 2300 bp, Homo sapien
gttaacacccggctggcttccctgcctttcccagtgcgtgtcagaacttcttgctaggatctactcactcatgctcctgctcccaggtcttagggtcttagaaatacaaattcatggctggactcggtggctcatgcctctaatcccatcactttgcgaggccgaggcaacaggatggcttgagcccaggagtttgaaaccaacctgggcaacatggcgaaactccctctctacaaaaaaaagttagctgggcatggtggcatgcatctgtggaggctgaagcaggagaacagcttgagacccggaggtcaaggctgcagtgagccgtgatagctccactgcactccagcctgggcagtagagcaagaaaagaaaagaaagagagaaagaaagagaaaaagaaggaaagaaagagaaagaaggaaagagagagagagaaaggagagacagagagagtaagaaagaaagaaaaaagaaaaaaggagggaggcggggcagcagaaagaggaagaaaacagaaagaaagaaagacaaatttatttaaatatcaaaacaaaagagaaactgaactagtggtagaagtttctaccatagaaagttttcaaattattggctatttggagtcatgcgcgctccttctctgttgctaaggccccaaaagattgcagcacacgaggcagcgccggagaggaccactgagcagcacgggccctggcggggtaattccgaacaccggcttaggaggcgggtttaccaggattctcattccagccctgccactaattgttcagggttctcaaggtcgagcatgcacaaaatcacccggagggcttttaaaacacaagtcgccgggcccaacccgagtttcggaatatttaggtctgcggtggggcccatttcttttcttttcttttctttttttctttttttttttttttgatacggaatctcgctctgtcgccaggctggagtgcagtggcgtgatctcggctcactgcaacctccccctcccgagttcaagcgattctccggcctcagcctcccgagtagctgggattacagacgcccgccactacgcccagctaatttcttgtatttttagtagagacggggtttcaccatgttggccaggctggtctcgaattcctaaccttgtgatccgcccgcctcggcctcccaaagtactgggattacaggcatgaaccaccgcgcccggccaaaatttctaataagttctcaggtgattctgactggcgctgctggtgggggatcccactttgagaaacaccctctgctgtgtgagcagctgcctccccggtacattcggaataatcatagtaggtttaaagtttgctggggctgggattcacctgatacctggcacttggagcccttgacacagttcatggcacacggaatacgagctcttgttggatggagcacaaatgagaagcaaacctggggcaggaccccggggcccatggccgccccgccgcgtttccccctccggggcaggcctccgggctccgagcgctccaggctggcgcgcagcacattccggttccatgcacccgccgcccgcggctctgctaatgcctgtcctctttggggtgactaggaccctccaatctttttccgcgctgaaagcctggccgcaaagaccgcacccccggggcgggctgagacgcagagaagccggggcgcccctctgccggtccgccgggagttcccgggcccgcagcaggctgaggacacggcgggacccgctgcacctggccagggaggggcggggcgggcgcgttagtgcagctgggggaggtcccgccccggtcccaccctcccggccgtccggtggggaaacccgggagccaccccgcggcgcggctgcggctttgcctcggcgcgacaggtaagcggcagaaggagcccgcgaccctctccccgggagggcccccctgagctccccgactgctcggacttcccttcggcggatctcgcttctgccgagtcctcgctctcacctcctcctccgccagccttcgcctcttcctcttcctcctcactacccccgacagtaaaatgaaggggctgggccaggctggtccctcctgccttcgctctctgctggtcgcggtggcctgtagctcctccctcggtaggacccccctccaccttggcgcttacgagatgaatgaggagcccagacctctggaacttggaggggtgagagggggacaagccagagccagggctccacaccctcttcccctcacccacccatgccctgcattccttctgtg

SEQ ID NO: 9542 - DNA, 2300 bp, Homo sapien
tgttttcagacttagctcgaatccatgtcctctgtgaaaccttcctgaagatcattttctcttctgaatttttgcaatcttcatggtttatataatattactcattaacatataccctgtttccctgataagcctgttaagctcccttggagatatatattttagatttctctgcctctacagtgttacttgggcctgttcattagtaggtgttcaatacattttttattagattgaattaaaagcattcatatttactaagtactttctatgtgcctgggattggttgaggctctgttgagtatacagaagggcataagaaaaataatcattgctttcaaagaacttataatattttagtaagctaaagtcaacatataaagtacttaaataaccacagcatgacaactgctataagaaaggtatgaagtgccttgagaattctggggagggtgagatgacatctgttaggggtatcagggacagtagaataaagaaaggcttcttggaagagggtggcttttgagattaactttgaaggatggttaagattttgatggacaaaaatggggatgagggtaggatgtgaattccagattcaagatgacaggattagtaaagagattgatggagtgtgtggcaatgaacactaaaacgcagagactagacaggaggcttatacaggacatcagaaatacaattctgcttcagggatactgaagcccaaccttgtttccaatttcaggaccaacacaaaggatggtaagcaggggtggaaagttttaacatgtatcagactaccttccccaactgtagcttctttaggggctgagaattatttgcaacaattcttcccctgaccccaatttggacctacctgaagtctggtatgatagtgcatataaaacaaaaggccccacggccgggtgccatggctcacgcctgtaatcccagcaccttgggtggctgaggcgggcagatcacctgaggtcaggagttccagaccagcctggccaacatggtgaaaccccgtctctactacaaatacaaaaaaatcagccgggcgtggtggtggggacctgtaatcccagctactcaggaggctgaggcaggagaatcgcttgaactggataggcggaggttgcagtgatccaagaacacgccattgcactccagcctgggcaacaagagtgaaacttcgtctccaaaaaaaaaaaaaaaacaaaaaaaacaacaaaaaaaaaacaaaaaaaacccaaaaggtacctttctttttcttgaggagagagggttgcttcgattttagccagcctctcttttcttataaatccaaatcaaatttaatgcattattcatgatattctaaccttgtgttaagtcagtagttctgttgctaaataatagtttgccttagatcatttcctggaaaagttcgaagcctttttgtggaattgcttcaacagtcatccttagctcgaccctgtccgtgtgttttgcttctgacttgagactcaagaagaagacctaagtcatagtgagactgtgagggagcctgacactgcctgccttcttcaatttaatgctctttaatctggccattagctcaaggaaaaacaattaattttagaaggccctctcccctcatccgcaattacctcctcctgcaatcgcgaaggatgtttgcccggaatttaaacatcatctcccaaggaatgaaatcagaataggcaaaaccgacactttcccagttttcaagggtcaggtgcagctgcaaatagaagcagagattttctagcaagcagttggaaggaccttcacgcccagaggcccctgaagggagggaggcggtttccaaggcaaccgggcccgggagcggttggctccccggctcctccccctccccgcggtagcccagggtaccgccggacagcgtcctcccgtgctccgcgccctgattggctgcgcaggcctctcgctgattggttgcggcggatgcctcgcgggccggtggctatggaggcggcggcggttgatggttgaccgttggctccggggtgggggtcgccgttcgagtgatctgctcagacccgaccagagggcgcgggctgctgatgcttggcttggagcccgtgggggagacctagttcggctccgccatgccggccgccgggagtaacgagccggacggcgtcctcagctatcaggtagggccccgcctcccgcgcctcccgctcctccccggggcgcagcctcctcatcctctgcccaccctccttccttctgcccccgagcccaggctt

SEQ ID NO: 9543 - DNA, 2300 bp, Homo sapien
ttacttgggcctgttcattagtaggtgttcaatacattttttattagattgaattaaaagcattcatatttactaagtactttctatgtgcctgggattggttgaggctctgttgagtatacagaagggcataagaaaaataatcattgctttcaaagaacttataatattttagtaagctaaagtcaacatataaagtacttaaataaccacagcatgacaactgctataagaaaggtatgaagtgccttgagaattctggggagggtgagatgacatctgttaggggtatcagggacagtagaataaagaaaggcttcttggaagagggtggcttttgagattaactttgaaggatggttaagattttgatggacaaaaatggggatgagggtaggatgtgaattccagattcaagatgacaggattagtaaagagattgatggagtgtgtggcaatgaacactaaaacgcagagactagacaggaggcttatacaggacatcagaaatacaattctgcttcagggatactgaagcccaaccttgtttccaatttcaggaccaacacaaaggatggtaagcaggggtggaaagttttaacatgtatcagactaccttccccaactgtagcttctttaggggctgagaattatttgcaacaattcttcccctgaccccaatttggacctacctgaagtctggtatgatagtgcatataaaacaaaaggccccacggccgggtgccatggctcacgcctgtaatcccagcaccttgggtggctgaggcgggcagatcacctgaggtcaggagttccagaccagcctggccaacatggtgaaaccccgtctctactacaaatacaaaaaaatcagccgggcgtggtggtggggacctgtaatcccagctactcaggaggctgaggcaggagaatcgcttgaactggataggcggaggttgcagtgatccaagaacacgccattgcactccagcctgggcaacaagagtgaaacttcgtctccaaaaaaaaaaaaaaaacaaaaaaaacaacaaaaaaaaaacaaaaaaaacccaaaaggtacctttctttttcttgaggagagagggttgcttcgattttagccagcctctcttttcttataaatccaaatcaaatttaatgcattattcatgatattctaaccttgtgttaagtcagtagttctgttgctaaataatagtttgccttagatcatttcctggaaaagttcgaagcctttttgtggaattgcttcaacagtcatccttagctcgaccctgtccgtgtgttttgcttctgacttgagactcaagaagaagacctaagtcatagtgagactgtgagggagcctgacactgcctgccttcttcaatttaatgctctttaatctggccattagctcaaggaaaaacaattaattttagaaggccctctcccctcatccgcaattacctcctcctgcaatcgcgaaggatgtttgcccggaatttaaacatcatctcccaaggaatgaaatcagaataggcaaaaccgacactttcccagttttcaagggtcaggtgcagctgcaaatagaagcagagattttctagcaagcagttggaaggaccttcacgcccagaggcccctgaagggagggaggcggtttccaaggcaaccgggcccgggagcggttggctccccggctcctccccctccccgcggtagcccagggtaccgccggacagcgtcctcccgtgctccgcgccctgattggctgcgcaggcctctcgctgattggttgcggcggatgcctcgcgggccggtggctatggaggcggcggcggttgatggttgaccgttggctccggggtgggggtcgccgttcgagtgatctgctcagacccgaccagagggcgcgggctgctgatgcttggcttggagcccgtgggggagacctagttcggctccgccatgccggccgccgggagtaacgagccggacggcgtcctcagctatcaggtagggccccgcctcccgcgcctcccgctcctccccggggcgcagcctcctcatcctctgcccaccctccttccttctgcccccgagcccaggcttcccaggccgctccctgagggcgaggggaggccagcccgggacaccagggggcgctccgggcggttggggaccaggccagggctgcgagagagtgaccttgggccgaacctgggatctggcccatctctgccgcatcccttgcgccgcccgcccaggagccctgacagccggcgggcggcgacctc

SEQ ID NO: 9544 - DNA, 2300 bp, Homo sapien
aatttgaaagctcacattattacctgctttgttctgtcatctgccaaatttcccctacatttccttcctccaagattttaacattgctgtaattgtcaagaagaactataactgtagaactccaaagggctatttagaagagaaatctataagaaaaattaagttaactaaccactcaccccagacaattaccaccaagcatcacatttaaacctatcaagcccaacagatttgaggaggaaaaaaatctcaatacctagtgttaagtggcagtaaacatagcagttatcagtatgagttctggagttaaaggcccacattgtttccctgttctaccactttttagctgtgtgatcttgagcaaggtatataatctctctatacctcagttcttcatctgtaacatggagctcatattatctgttaaaaggttgttacaggaaattaaatgagatgatatacagtgctgatttccttttaggcactttacctatcagtatccctaaaatattatgaacatattaggtacctgatgtgaagaatcatagcacttttacttcagtcctatgcacttcttcaaaagcctcccaaaaatctgaacctatcctcaatttctaattctattcatgactattcaagtactagaagaaataaatgaggaaaatctatttaatattcaagctgaagagccatatttctgtatttttaacctttatattcattgtttccttccccctatattataatcatgcttcaggacccttcatcttgggggaaaaaaaagaacatccacctcatgtctccctctatctatcacctcctgtctctcttatcacttaaagttatcagaagaaaaattatccatcccttactgacactgcccacagtgcaggtgatctcacctgaactactgcaatagcctaatgcatttctcccatcaactcaccctccatattgctgccatcattatctttctaatatgcaaaatctgattgatcattaccctgtccaaaactctcccgtgactgctgttgtttacaaagagttttaaacagcttcaatagctcccagggattcttctccctaacaaacaaccttttaaggaacattcatgggatttcagacaaatagtcaaaagttagcaaaatgtgactccaatgatgaacatgagaatttcatttttcccaggcagtcagagtgatacttctggggtacctccctgaaaaagaggggggcccaatgtcccatcagtgcttacccctcccctgggtcctcctatgatcccagagagacagaatgacttggatacttgaaatagagaaagatttggagaaatatttcttaacctgtccagccaaacagaaccaattcaagagaaaactcccccatgcatccaggtgtttctccattcaggccccaaacataataacttaacactcaatcacatcaggaagaacaatcagatatctccccttcacatcttactgaagaggtaggggcactttggctcaagttcctgaatatctgccctagatgctatattttaaagtctttaattctctttactccttttttccacacaacttccagttgcccctttctctaattattatcaagcatgtctctgtcgttgcactttttttaattgttatttccatggctatttcccccacttgaaggcgagctccttgaaggtaggaaccgtttctttcttttactttttttttttttttaagagacagggtctcactgtggggaaaagcaagagagatcagattgttactgtgtctgtgtagaaagaagtagacataggagactccattttgttatgtgctaagaaaaattcttctgccttgagattctgttaatctataaccttacccccaaccccgtgctctctgaaacgtgtgctgtgtcaactcagagttaaatggattaagggcggtgcaagatgtgctttgttaaacagatgcttgaaggcagcatgctccttaagagtcatcaccactccctaatctcaagtacccagggacacaaaaactgcggaaggccgcagggacctctgcctaggaaagccaggtattgtccaaggtttctccccatgtgatagtctgaaatatggcctcgtgggaagggaaagacctgaccgtcccccagcccgacacccgtaaagggtctgtgctgaggaggattagtaaaagaggaaggaatgcctcttgcagttgagacaagaggaaggcatctgtctcctgcctgtccctgggcaatggaatgtctcggtataaaacccgattgtatgc

SEQ ID NO: 9545 - DNA, 2300 bp, Homo sapien
ttagagatgacttctgaggagacatctgagtagagacctgaatcaagtgagaagcaaattatgagaatatctgggagtaagaacattccagggcaggggtacagaaaatgcaaaggtcttgaggaggaatgagcttggtgtgtttgaggaacaccaagaaagccagtaagactggaagggacagagtggtagcagggagaccagctaggaggctggcagcagctcaggcaataggggagggtggcttatgctaaggtagaggtgatgaaagtggctgaattgggtacttattttgaagatagagctgacaggttttgctaatgatggtgggcatgggtgaaagaggaatcaagtatgactcttagatttttggactgaacaactgaatgaatggttgtgctatttattaagatggggaagaccaaggagaacagcaggtttaggaggaaaatcaagagatctcctttggatgttaagttcgaggtggctggtagacattatattccttattttccaaaattcctgaagtaagtacatatttgttaacacgtgttactttataaaattattttaaaagctaaatgaaataaaagaaaaaagtgaagactttttctccacctcatagccaacattcatgttcatttctttatgttgttttcaattttttaacatagttttcatataactatgataattatataattgtgagtttgtatttatatatatagcacatatatattctgatttttcccctcaacctgatttcataagacactttcatgtttctatttgtatcatgatattttttaaatggatgtataatgttctatagtattatctcatacttaatttaaatatttttcctttgttaaaatttttagttgttttatattactttgaacatctttgtacagatagttttttctctgtaattattttctttaaattagtgggattattttcttttctttttttttgagatggagtctcgctctttcgcccaggctggagtgcagtggcgctatctcggctcactgcaagctccgcctcccgggttcacgccattctcctgcctcagcctcccgagtagtcgggactacaggctctcgcccctgcgcctggctttttttttttttctttctttctttctttatttttattattattatactttaagttttagggtacatgtgcacaacgtgcaggtttgttacatatgtatacatgtgccatgttggcgtgctgcacccattaactcatcatttagcattaggtatatttttagtagagaccgggtttcacggtgatagccaggatggtctcgatctcctgacctcgtgatccgcccgcctcggcctcccaaagtgctgggattataggcgtgagccaccgtgcccggccagattattttctaagaaaacattttattatggatttctaaaaaaagttattttagattcagggcatgtgcaggtttgttacatgggtgtagtgagttatgctgagctttgggcttctaatgatcctgtcacccaagtagtgaacatagtaccccataggtagttttccaacccttcccctgtcttccgccttttggagtccccagtgttttttgttcccatctttgtgtccatgtgtacccaatgtttagcctccacttataaatgagaacatgcattatttggttttttgttcctgcgtcagttcacttagggtactggcctccagctgcatccatgttgctgcaaaggacatagttttgttctctttgtggctgcgtagtattccatggtgtatacatactacagtttctttattcaatccaccattgatgggcacctgggttgattccatttctttgctattgttaatagtgctgcaataaatatatgagtgcagatgtctttttgacagaacaatttattttcctttgggtatataccaagtaatgggattgttgggtctaatgctagttctatttttagttctttgagaaatctccaaactgctttccacaggggctgaactaatttgcattcccaccaacagtgtagaagtgttcacttttctccacaaccatgccaaagtctgttattttttgactttttaataatagtcgttctgactgatgtgaaatggagtctctttgtggttctgatttgcatctctgatgatgcatgatgttgaccagtttttaatatgtttgttgactgcttgtatgtcttcttttaagaagtgtctgttcatatcctttgccctttcgcttctatgcaccaataacacccaggctgagagtcaaa

SEQ ID NO: 9546 - DNA, 2300 bp, Homo sapien
atagtttttctcttctcttctatgttgcaatgaatgtaaagtatttgggatccagtgcttataaacctttccttcctttgtgcacagaatgtaactagcaagcccattagcacccagataattctatcatgttagtttcccatcctggaaaatctttgtacagtgggaagttccccgatgtgtttttctttcttaggtgaagggttggctatatcactttattgaattttgcattccttagacttttaaaatatactaatgtattctagtcttactctaaagacctttgatgttaaaggaatccttcatttatttcatattccctatctcatagggccacaattattttaatacagagatgattttcaaaatattttaacaactggtacaggacagatgccagccactcagaagggatgcctgctgtaaacaagcagtatgtatggttgtaccaatgcctattggctgaacattatgctactttcagatattaaaatggtgttcctttgaatcgtgggtattgttcctggtttgtctcatttctatcacaaggctgttttgggcacagccttagcttcctttcatatatatatggtgcagacaggataggtcatgcttcttggaacctatatgggcattaaaatcttcatgagccaaagcttcacattttagcactttaggataactgtagtaattgtactcatttacctacctaattgggaagaattaaaaggcagcccatctggaggataagctttcttgcagacttttcccttgtccctctctggctgcctccttgagcttgccactttttcatcttcattgttccctgagaacatctcccctttcttgctctatcttgcccctcccatcttttcctgccacctctgtgtggggaggttgatgaccatttcacctctttccctagcctcagcacagctgtaaggagtgtatcaaaactgggtgagagtatcactcagaaaaatgcctcccctaacacacggatgtcttgtgctgccttgaccgcttgaggggaggagccttcattaactctgtgtagtgcaggtacaggaccacctgtgcactttagggtacttctcgagctagaccctcctggatcactgcgccttaggaatgttagctactttttaaaaaaaatatgatttggtgcgttgttggggtgaactccatggggaagattgtgagtgaagatgggaaggaatttgggtggttttgccacgaggtgatggttggggttgggcgaatgggttggatgatcctggctctgtgggtgtggtgctcggttgcctccgtacagttgcagttcacctttgtgcatggtgattaccagtcactctagggattgtaggtcccaacagcggttccagcagcctgcacagctggtacgaggacagctggaggagggtctgatatccctgcaagtgatgcaggataaaacttcccggccgggcgcaatggctcgcgcctgtaatcccagcactttgggaggccaagatgggcggatcacgaggtcaggagatcgagaccatcctggctaacgtggtgaaaccccgtctctactaaaaatacaaaaaaattagctgggcatggtggcgggcgcctgtagtcccagctattcaggaggctgaggcagaatggcgtgaacgcgggaggcagagcttgcagtgagccgagatcatgccactgcactccagcctgggtgacagagcaagactccatttcaaaaaaaaaaaaaaaaaaaaacttcccaataggaggtattccttgatggctctcgaatgcatgaatgatatatcaatttgaagtttctcgacctttccatcaaggatcttgaattttttctcaattatgcttgctaatgtgtcaaaggccaagtacactgtatcaaacttgccgtctgtaagatgcaagatcaatctagtgtttcagccagttcactactgacatcagactcaactttgtcccctctctttcttttcatgcaagagactttaagggtaacctcttcagttgaaactgtcttggaagtgcagccctcctcctgtgtggctagagaaagagatggcaccaggatctcttaacggcaagtgctcacggggcatgggtgattttgtctagtctggtccttttggacgtggtgatttcctgtcatcctcgtggtctgacattgcttctcactggatactggttgtggcctttgactcattagctgattgttggatctctttgtgaggttcgattttttaaaaatccatgggtccctatggactgtcacctgt

SEQ ID NO: 9547 - DNA, 2300 bp, Homo sapien
accaagcaaatggaaaacaaaaaaaggcaggggttgcaatcctagtctctgataaaacagactttaaaccaacaaagatcaaaagagacaaagaaggccattacataatggtaaagggatcaattcaacaagaagagctaactatcctaaatatatatgcacccaatacaggagcacccagattcataaagcaagtcctcagtgacctacaaagagacttagacttccacacaataataacgggagactttaacaccccactgtcaacattagacagatcaatgagacagaaagttaacaaggatacccaggaattgaactcagctctgcaccaagcggacctaatagacatctacagaactctccaccccaaatcaacagaatatacatttttttcagcaccacaccacacctattccaaaattgaccacatagttggaagtaaagctctcctcagcaaatgtaaaagatcagaaattataacaaactgtctctcagaccacagtgcaatcaaactagaactcaggattaagaaactcactcaaaaccactcaactacatggaaactgaacaacctgctcctgaatgactactgggtacataatgaaaagaaggcagaaataaagatgtctttgaaaccaatgagaacaaagacacaacataccagaatctctgggacacattcaaagcagtgtgtagagggaaatttatagtactaaatgcccacaagagaaagcaggaaagatccaaaattgacaccctaacatcacaattaaaagaactagaaaagcaagagcaaacacattcaaaagctagcagaaggcaagaaataactaaaatcggaggaggagccaagatggccgaataggaacagctccggtctacagctcccagcgtgagcgacgcagaagacgggtgatttctgcatttccatctgaggtaccgggttcatctcactagggagtgccagacagtgggcgcaggccagtgtgtgtgcgcaccgtgcgcgagccgaagcagggcgcttgcctcacctgggaagcgcaaggggtcagggagttccctttccgagtcaaagaaaggggtgacggacgcacctggaaaatcgggtcactcccaccagaatattgcgcttttcagaccggcttaagaaacggcgcaccacgagactatatcccacacctggctcagagagtcctacgcccacggagtctcgctgattgctagcacagcagtctgagatcaaactgcaaggcggcaacgaggctgggggaggggcgcccgccattgcccaggcttgcttaggtaaacaaagcagccgggaagctcgaactgggtggagcccaccacagctcaaggaggcctgcctgcctctgtaggctccacctctgggggcagggcacagacaaacaaaaagacagcagtaacctctgcagacttaagtgtccctgtctgacagctttgaagagagcagtggttctcccagcacgcagctggagatctgagaacgggcagactgcctcctcaagtgggtccctgacccctgacccccgagcagcctaactgggaggcaccccccagcaggggcacactgacacctcacacggcagggtattccaacagacctgcagctgagggtcctgtctgttagaaggaaaactaacaaccagaaaggacatctacaccgaaaacccatctgtacatcaccatcatcaaagaccaaaagtagataaaaccacaaagatggggaaaaaacagaacagaaaaactggaaactctaaaacgcagagcgcctctcctcctccaaaggaacgcagttcctcaccagcaacagaacaaagctggatggagaatgattttgacgagctgagagaagaaggcttcagacgatcaaattactctgagctacgggaggacattcaaaccaaaggcaaagaagttgaaaactttgaaaaaaatttagaagaatgtataactagaataaccaatacagagaagtgcttaaaggagctgatggagctgaaaaccaaggctcgagaactacatgaagaatgcagaagcctcaggagccgatgcgatcaactggaagaaagggtatcagcaatggaagatgaaatgaatgaaatgaagcgagaagggaagtttagagaaaaaagaataaaaagaaatgagcaaagcctccaagaaatatgggactatgtgaaaagaccaaatctacgtctgattggtgtacctgaaagtgatgtggagaatggaaccaagttggaaaacactctgcaggatattatccaggagaactt

SEQ ID NO: 9548 - DNA, 2300 bp, Homo sapien
aaaatttgattttgttatgatataagttcttcccaagttgatctacagattcaatgcaatcttgatcaaaatctcagtggatttttgttgaaatttgacaaggtgattctaaaattcatatggaaatgcaaagaacctagactagcaagatcaatattgaaaacgaagggcaaagtcaagggctgaaagtacctgatttcaagatttattataaaggcagagtaatccagacagtgtggtattagtgccaagacagaaaaatatatcaatgaaacagaaggagagtttagaactagattcttacatacttgagtaaacgattttttgcaaaggtgcaagggtagtcagtggagacaggatagtgttttcaacaaatagtatggggacaactatatatctatgcaacaaaacaacaaaagaacttcaaactacatttcataccacatacaaaaatcaattcaaaatggattataaacctaaatgtaaactctagaactataaaatttccagaaggaaacataggataaaatatttggggccttgtgttgggcaaaaacttattagacatgacattaaaagcatgattcatagaagaaaaaataataaactgaacttcataaaaattaagaaggtctaatttttttttttttaagagacaggttctggctatgttggccaggcttgagtgcagcagctattcacaggcccaattataacacattatagcctccaacttctggcctcaggagatcctcttgcccgagcctcccgagtagctgggactacaagtgtgcaccaggacaactggctgaagaacctctgcttttggaaaaacactgttaagagagtaaaaagaataaaaagataagcctaaactgggaaacaatatttgccaatcacatgtctgacagaagatttgtatccacaatatataaacaactctttaatttttttaaaaaaattttagaatcagagtctcctgtgttgtccatgctggacttgaaatcctaggtttaagcaattattcctgctcagtgtccagagtagctgggacaccaggcatgcgtcactgagcccagccaggatatataaacaactcgtaaaactcaattaacaagaaaaaaccccaccaatttttaaataggctaaagacttgaagagacacttcgccaggaggatttacagatgacaagtccatgaaaagatgttcaacatctttagtcactagtgaaatggacgacagacccacagcgagataaaactacacatctattcaaatggctaaaattaaaaagactgatcactccaaatgttggtgaggatgtagaacaactgaaattcatgtgctgctagtaggaatggaaaggcacaaccactttggaaggcagtttggccctttcttaatatgttaaatatacacctaagacaggactcagttattccattcctagatatttatacccacgagaaacgaaagcatatatatccatacaaagacctgcacacgaaagctcataacagctttgttcgtaacggacaaacattggaaataacctaaatgtcatcaacaggtgactggataaacacattgtggtgtatccccataaagaatactactaagcagtaaaaaagaactcttgataggcaacgactgaataatctcaaaacgattatgccgagtggaagaagccatacaaaaaagagagtttgtactgtatgattccatttatttaaaattccggaaaatgcaaaccaatgtacagtaatagaaagaagatcagtggttgcctggagagggtgtgtgggggcgagcgatgcagggagtgattacaaagaagcacacggagaaatttttggaggtgatgggtgtgttcattaccttggtggtgatggtttcatgagtgcacacataactcaaaattgtacaatctaaacacacgcaaatataccccagtaaagctaattttaaatgtattgtagagggcacattatgtgataagcataccatgtgcctggctgtgttagcaatgtgtgaagtgcatgctccccgttagtacaaacaagaagtttataaggttgctactgtgactgtttccttttacagacgagaacactgaggtttggagaggttgttacaccctttttccctcttgtgattggtggtaggaaaatattaagtagaggagagacacagtaaagtgccaagagctctggcactcattacctagatcctcgcgagggtggagtgagcggtcgaaatgctcatgcctactttacagatggacagactgaggatcgga

SEQ ID NO: 9549 - DNA, 2300 bp, Homo sapien
tatgttggccaggcttgagtgcagcagctattcacaggcccaattataacacattatagcctccaacttctggcctcaggagatcctcttgcccgagcctcccgagtagctgggactacaagtgtgcaccaggacaactggctgaagaacctctgcttttggaaaaacactgttaagagagtaaaaagaataaaaagataagcctaaactgggaaacaatatttgccaatcacatgtctgacagaagatttgtatccacaatatataaacaactctttaatttttttaaaaaaattttagaatcagagtctcctgtgttgtccatgctggacttgaaatcctaggtttaagcaattattcctgctcagtgtccagagtagctgggacaccaggcatgcgtcactgagcccagccaggatatataaacaactcgtaaaactcaattaacaagaaaaaaccccaccaatttttaaataggctaaagacttgaagagacacttcgccaggaggatttacagatgacaagtccatgaaaagatgttcaacatctttagtcactagtgaaatggacgacagacccacagcgagataaaactacacatctattcaaatggctaaaattaaaaagactgatcactccaaatgttggtgaggatgtagaacaactgaaattcatgtgctgctagtaggaatggaaaggcacaaccactttggaaggcagtttggccctttcttaatatgttaaatatacacctaagacaggactcagttattccattcctagatatttatacccacgagaaacgaaagcatatatatccatacaaagacctgcacacgaaagctcataacagctttgttcgtaacggacaaacattggaaataacctaaatgtcatcaacaggtgactggataaacacattgtggtgtatccccataaagaatactactaagcagtaaaaaagaactcttgataggcaacgactgaataatctcaaaacgattatgccgagtggaagaagccatacaaaaaagagagtttgtactgtatgattccatttatttaaaattccggaaaatgcaaaccaatgtacagtaatagaaagaagatcagtggttgcctggagagggtgtgtgggggcgagcgatgcagggagtgattacaaagaagcacacggagaaatttttggaggtgatgggtgtgttcattaccttggtggtgatggtttcatgagtgcacacataactcaaaattgtacaatctaaacacacgcaaatataccccagtaaagctaattttaaatgtattgtagagggcacattatgtgataagcataccatgtgcctggctgtgttagcaatgtgtgaagtgcatgctccccgttagtacaaacaagaagtttataaggttgctactgtgactgtttccttttacagacgagaacactgaggtttggagaggttgttacaccctttttccctcttgtgattggtggtaggaaaatattaagtagaggagagacacagtaaagtgccaagagctctggcactcattacctagatcctcgcgagggtggagtgagcggtcgaaatgctcatgcctactttacagatggacagactgaggatcggaaagactgaggtggcctgggggctgtcagggaggcagcgcctccccgctcctggcagcaggtccctgtgggctgaaacacgagcctccacctgccgctgattgacttctcgttttttcagtgggcccaagatcctgtaaattgagttccctgcgcttttggatgtcagaaacttcactgagcgcggcactgttggggggcaggagaaaggtaagacttggcactgacgcgggccacagagcacgcgggtcaccacgacagctttcgggtctcgccgcccggcgctggcgagcagccagccagcgtctcgcggcgggtcccggtcctcagcccgcggcccctcccggcggctcggcgggggcgtagtggaggcgggcccggggacgctcgctggcgctcccgcgcggcgccccctgccggcgccctgttccctcttgcccctgatccgctcccggcggcgcggagacgcgagtctgagagcctgcgggcgggcggcgcgctgcaggcgagcgggcgagcgggcgcgccctgcaggggtaggtgggccgcgggggcgcgggcgggcgggcgcgaagcgcagggagggggcgggggcggtggcagcggcgcttgcgggccggggccggcccgggcagggggcgcgcgcggaggggtaggcgcgggggcggg

SEQ ID NO: 9550 - DNA, 2300 bp, Homo sapien
cagagtctcctgtgttgtccatgctggacttgaaatcctaggtttaagcaattattcctgctcagtgtccagagtagctgggacaccaggcatgcgtcactgagcccagccaggatatataaacaactcgtaaaactcaattaacaagaaaaaaccccaccaatttttaaataggctaaagacttgaagagacacttcgccaggaggatttacagatgacaagtccatgaaaagatgttcaacatctttagtcactagtgaaatggacgacagacccacagcgagataaaactacacatctattcaaatggctaaaattaaaaagactgatcactccaaatgttggtgaggatgtagaacaactgaaattcatgtgctgctagtaggaatggaaaggcacaaccactttggaaggcagtttggccctttcttaatatgttaaatatacacctaagacaggactcagttattccattcctagatatttatacccacgagaaacgaaagcatatatatccatacaaagacctgcacacgaaagctcataacagctttgttcgtaacggacaaacattggaaataacctaaatgtcatcaacaggtgactggataaacacattgtggtgtatccccataaagaatactactaagcagtaaaaaagaactcttgataggcaacgactgaataatctcaaaacgattatgccgagtggaagaagccatacaaaaaagagagtttgtactgtatgattccatttatttaaaattccggaaaatgcaaaccaatgtacagtaatagaaagaagatcagtggttgcctggagagggtgtgtgggggcgagcgatgcagggagtgattacaaagaagcacacggagaaatttttggaggtgatgggtgtgttcattaccttggtggtgatggtttcatgagtgcacacataactcaaaattgtacaatctaaacacacgcaaatataccccagtaaagctaattttaaatgtattgtagagggcacattatgtgataagcataccatgtgcctggctgtgttagcaatgtgtgaagtgcatgctccccgttagtacaaacaagaagtttataaggttgctactgtgactgtttccttttacagacgagaacactgaggtttggagaggttgttacaccctttttccctcttgtgattggtggtaggaaaatattaagtagaggagagacacagtaaagtgccaagagctctggcactcattacctagatcctcgcgagggtggagtgagcggtcgaaatgctcatgcctactttacagatggacagactgaggatcggaaagactgaggtggcctgggggctgtcagggaggcagcgcctccccgctcctggcagcaggtccctgtgggctgaaacacgagcctccacctgccgctgattgacttctcgttttttcagtgggcccaagatcctgtaaattgagttccctgcgcttttggatgtcagaaacttcactgagcgcggcactgttggggggcaggagaaaggtaagacttggcactgacgcgggccacagagcacgcgggtcaccacgacagctttcgggtctcgccgcccggcgctggcgagcagccagccagcgtctcgcggcgggtcccggtcctcagcccgcggcccctcccggcggctcggcgggggcgtagtggaggcgggcccggggacgctcgctggcgctcccgcgcggcgccccctgccggcgccctgttccctcttgcccctgatccgctcccggcggcgcggagacgcgagtctgagagcctgcgggcgggcggcgcgctgcaggcgagcgggcgagcgggcgcgccctgcaggggtaggtgggccgcgggggcgcgggcgggcgggcgcgaagcgcagggagggggcgggggcggtggcagcggcgcttgcgggccggggccggcccgggcagggggcgcgcgcggaggggtaggcgcgggggcggggcgggcggggggcccggcagtaggggcgcgcgcgcggtggcgcgcggcgggcgcgagtcatcaattatgcaaggactcgggcggtgcggggggcgggcgcggggagcgctccaagatggcgcccaccgcagtcccgcccgccgcatcctcggcgcctttgcagtccggccgcgcctcccgggccccgcgttagggccgccgctgcctccctcgccgccgccgctgccgtaagtcgccccagagcccccgccctagcgctgcttcctgccctccgggtttcccttctcgcctcgggacccttga

SEQ ID NO: 9551 - DNA, 2300 bp, Homo sapien
tttagcccatgtcatttaattgtcagtttctttgacataaagcgcatcttctccacatgggcttcacgtggtttggagatgggtgggggaaaacaatcaggtttcttcaggctgaggaggacttgctcaggccgattccaaacattgtgctcgttcaatgcgtagaaatgatttgcatgatggcatgccgtgatcagaagtcatgcatgagatccatacaccacaggacactactaatctagtcccttgcactgggtcagcctttggacaggacccagccctgcaccgttcactgtatttggagaaaatggtaagagttccataccggctacaattctttgagttcttaaaagtccttcatacaccttctgggtagggaaacaaccaactaattgactaacaccaccaacaacaaaaaacaaacccaatccaacaagcagatggatccgttgcgtgtatatgtttaacagacatctctaacatacagccattgttgcacattttgcaagatgaactatttaatgctgctctgtgtccagtacatgggggagactttgatcccaaatggcttgtactatttatgtcactgtaaaaccaaatcctagggctaaaaaaaaaattcatttgtatcttgcaatatttatgacgatcgtttagccttcatactggagaattgacacttatttggggtagagataaaagtgcttttcaaagtagcaccagttatctctaggggtaatttggggaacttaaaatgacctttcattgggagttatggggtgctcatttcatttcgtatcatgtcctctgcattgtggctttctccaggcatgggtcgataccgcgaggggttcagatattctgaactgacctctctcttctgcagaggggtcatcgcatactcacacactgcatggctccccctgcctccatcacatttctccactgagcagggcttcccttgcccacagaggtgggtgagggtagcagcattggggttacggctgtggtttctttcacttattattagaataatagtcactggtgagacctgaggtagagatggagccgcctctgaaccaagcccacttggtttctttactgcactggttttcatgagaaagcaatttaatattaattctttaggatgttccagcttccctcagtgcattcccttgcagccagttttgctatctgcttagcgacctgcccattgtcattgaagtgtggcttctgggggagcgtcatatcttccattccatctcctgctttaggaaagacagtttttagtccaggggtttctcacctaatgactggatttcaaagccaagatgctgcagttgaatgtgtcaggaagtctctatacaaagagtgaaaagagactttagcatgtgaaccaaatccaaataaattcttcctgaaccatacactagagggggaagaagaaccaacccataatcagacacaccgatctgccttgcagtagaagcactttgaaggtaatttcacagtccaccagactagttttgcatagaacaaaccacagtaagtcggcaagcagagctttctatcttgttggaccactagaaactgtccagctctcttaagcctgcttctgcagcagcatccgtagaatttttgtactacacccaataccagactgggaaggcctatctttcagtgaccctgctaactgctaggatgaatgtatagtaacatgtacaggctacattgtaaacagcacaaaacagaagctgacatgtgtggttattctttttaagagaattataaatactgtaatatataattttattttattggcatgcctttttgtaaatacaaattattaacttattaaataggaaatggcttctggcttatgccattgtcatgtttatttttattttttatacttttctttcttcttagaacttagatgctgtcagccaatgtacatccccaaaccagacagacagacaaaaaattttttattgctaatggtcttttccaaaacaacaaaaaatatatatttttgttccaatgtgcaataaattctaaccacgtctatgcaagatttggctaaacttaataattgttcttaggtcttgagatgggcaacagagctgtaagatcccgccaagtacaccatgtgctcatgctagtgatgtcattaagctactagggcatagtgatgagatttttctgagatctaaccgtttccctccgctagctcctgaccccagcccagcaggctgtctcctcagtaacacatgggccttggtatctggcacccatcagcc

SEQ ID NO: 9552 - DNA, 2300 bp, Homo sapien
tccatttgtctgtccattcatccatccatccgtccatttgtctgtccattcatccatccatccgtccgtctgtccatccatcctgtagtctattgagaacttaatctgtgccgggcactgtcctaggtgcttgggatataacagtgaacaaaacaaagtccctgctctcatgaactttctagtgggtacacagacaataaagcaacaaataggactgtccccttcaacctgttgttccataatctgatggatgagtgttacagggaacatcaggttgaaggggacagtgtctgccgaggcaacggctaagcagagacttgatgctaggcagggtgcaagcccagggaaggtgtgttccaggcagggcagaggcaggggcactgaggtggaaagcagcgtggcgggaggagctgtgaggaggccagggtgtggaagggagggaggaggggcagtggcagcaggtgaggccgagaggtaatggaagccgaccatgaggaccctgtatgccaatgagaggactttggcttttattctgagtgagatgggagccactggaagcttttggtggaagaatgacttatggaacatgctttcaagagttacactggcaactgtgttaagaaaagagaggacgatgtagaaagggggaggtgagatggaagtgaggccaggcacagtggcccatgcctggaatcccagccctttggaggccaaggaaggaggctagcttgagcccaggagctcaagaccagcctggacaacacagtgagacccccatctctacaaaaaaattttaaaaattagctgggtgtggtggcccaccacacctatggtcccaactacttgggaggctgaggtaggaggactgcttgagcctgggaggtccaggctgcagtgagccgtgatcacgccgctgcactccagtctggtcagcaaagtgagaccctgtctcaaaaaacaaaacaaaaaaaagagagagaggctgcagctgtcgtccaggtgatagcatccctgaggtggtgagaagtgattgaagaatctaatttgctgttctgaagagtgaaagagaagttaaggatgaccgcaaggtttctggcttgagcaactagaaaggatgcagctgccatttcctgcagtggggaaggctgagggagggctaggttgcggatgtgggagcccggagtttcacttttgggcatgttaattatgccaattaaatattccagtggggatgtcagcaagaaggttgaataaagtgcggagtgcaggggagaaatctcagctggagaactatgtttgggaaacatcaatacacaggtgatggtcaaagctaggagatgggatgggatcatgcacggaattaccatggagagggaaaagaaggctgcaggactgagcccgaggtctgcagggtttagaagggagtgggtgatgggagggcagcaaagaggctgtggaggggacggcagcaggggccaggagagcgcaggtccctggttttgcaagaggagggcagagcatcagattcagctgtgtggttatgaggcaaaggtagtggagtgttgggggtaaatgcctgcttggaaggggttcaagaggaatggaaggacaggaataagaaacagtagcatagaaaaggtaaaaacaagcaaagagagagagatagaatgtagctgaagggggattcagaaattattttggggccgggcacagtggcacacgcctgtaatcacagcactttgggaggctaaggcaggtggaccacctaaggtcaggagttcaagaccagcctggccaacatagagaaaccctgtctctactaaaaatgccaaaattagctgggcgtggtggtgggcacttgtaatcccagctacttaggaggctgaggcaggagaattgcttaaatccaggaggcagaggttgcagcgaggcaagatcgtgacactgcattccgcctgggcatcagagcaaaactctgtctcaaaataaataaattaaattaaattaaaaattagctaggtgtggtggcatgtgcctgtagtcccagctgctcaagagactggggtggaggaatgcttgagcctgggaggtggaggctgcagtgagctatggggacactactgcactgtagcctgggcaacagagcaagaccttgtctcaaaaatgtatatatattttgggctttttttcctaaaacgggaactacaacagcatatttgcgagctgatgagagtgacccagcagagagggaaatggatcaggtaggagaagggggaaccgagggaacagtgtctttcttg

SEQ ID NO: 9553 - DNA, 2300 bp, Homo sapien
tgcactccagcctgggcaacaagagtgaaactctgtctcaaaaaaaaaaaaaaaagaaagaaagaaagaaagaaagaaagaaatctgatcagtttaaacagaaagggatggagaagcaggcttaggtccaggaacaacccccagctttgagagtcacatgacctctgcctgtgattgagaaaacaacagtcactactacaggaagctgatgaatcaggaagctgctcaccagagccttgctgctgctgccatgacctgtgacagcaaaacggatgtcccatgctacgtagctctgttccaaatttatatcttgcacaagagcaggacgcaaaccacagagtcatagctcaagggaatctgggaagggttgttttagctttccaacttctgcagcgcagaagaaacactgaaagcagttttagattaatgttgaggagcccgtctattatggacaacataccattcagctttttggttactaaaaaccaaatgcacatccaactgatacactgcacctaaagcaataaggatggagcttaagtgaaaaagaaaaaactaacagaataagttctatagcacaattcataacatgttagttaaaaacacatacaagcagagcatggaggctcatgcctgcaatcccagcactgtgggatgccaagacaggaggatcacttgatgccaggagtttgagaccagcctgggcaacaaagtgagatccccatctctacataaaaaagttagacaggcgcggtggcacacacctgtgtgcctccgagaagctcgtagcttctcgggaggctgaggtgggagaatcacttaagcccaggagtttgaggctgcagtaagctatgatcatgccactccactccagcccaggtgacagagtaagaccctgtttctaaaaagaaaaaaataaaataaaaacacacaaatcagtactatctttttcaatgaaatgtacattttcaaggatatacaagtgccagttggtaaagggtggaggagaatgggatgtggggattaagggtgaaagagagaaactaaagaaagtaaaacaaaacaagagagaggtcttgtacagtctgatgatgggagtgataccaatgggggaatatcattggctccattttctacatctgtggaccaagaccaatccatcaagcttaatatgtaatataaatattaaagaatattttgataacaatttatcattatattaacagatcatttaatttaaatatttcatatttaatttatcacactgaaactaatctattaaatttcatacatcataatttctggccaatccctccctcactactgcctgccgcactttgtgccccgactgcccacctgcactagacacataatgtcggtactcacaatttcgtttgtttgtttgttttgttttttgagaaggagtttcgctcttgttgcctaggctggagagcaatggtgcgatcccggcttactgcaacctctgcctcccgggttcaagtgattctcctgcctcagcctcctgagtagctgggattacaggcgcccaccaccaagcccagctaatttttgtatttttagtagagacagggttttgccatgttagccaggctgttcttgaactcctgacctcagataatccacccgtcttggaatctcaaagtgctgggattacaggcgtgagccaccccgcctggccacaatttttttttaaaaggaggtctccctctgttgcccaggctagagttcagtggcgcgacatcggttcattgcagcctcgacctcccgggctcaagcgatcctcccacctcagcctcctgagtcgctgggataacagacgtgagccaccgggcccagctctatactcataatttgacaattatgtttttatttccccagaacctcaaaaaataagttcaggtgacccccctggagaccccaccccagggtcattctgagagtaccaaccctatttaatgagatacctgcattcactcaccccctctcccgcaaccaccccttcagcaagtcgcgctccacccaattaggaggggctttaggctgggcctaaaaagttgggccaagaccccacgaggcagcatctccgccggcgtccccaaggctgagagtgggcgcgtccgtcaggaggagtcgtctttgtgagcccgccccggcggggaggagctgcccggctcaggccccgcccacccggaggatcttggggctggtctgagtccgctcctgagacgtgaccacccgccccgcatggggccccagtcccagctgcttgatccggctca

SEQ ID NO: 9554 - DNA, 2300 bp, Homo sapien
gttcacaagagccccaaagagcaccagtcaggggccagagggctcagtgctctggggagatggggaagattccagcactgatgaacagactccagccccccctgggtcctctcttccagctcccaaaatgtactctatttttatctgtttcacgaacgctggtccagatagtcttccatcccccactgactgttagaagtgactctcagcttttgtccatctcgaagtttctgtgctcagtgtgcctctcagactaaaggcttcctttgggaagccccgactctcgcttctcaggacagagatccaggggttgggggaggaaaaggttgaccagaagccatagcggagcagggagagagagtgtgaaagacagacccgcggccaggctcccagttctccagctcgtagagggcccaagtggccgctataatctgaaagagcagatatcgtaatcccatagtacttcctattggctgcaggacacagttctgtcctgacactgaaatttgggtgtgtcagggttctgggaattcacaacgctcacaacttgtgaagcagctgtggggtgggggatggggagggtttcagcagaggaagtgaggtcagtcaataattgatgcctgtctgagcttttagccattatctcccccagcctctattcctgtcaaaaggtggggcggggcaggaggaggggtccctggctcatcttgtagaatccccatattagagtaagacaccttagaggtctactcctgcttctaatacccacgtctttccaagtgtctctgaggccaccccctccccagccttttcatttattcatttaattaacgaacgccttcattgagggcctcctctgagtcaggctcagccagccagcatctttgctatgagctgagataagcatcatttccgtctattctcacaaccaccctatgaggctggcacggtttactatgcctatttagcagatgggggactgaagcatggagaggtgtcactagcctacggtaacacaaccagcctgcattcctagtaggtagtttgacttcagagtctctgtggataaccaggaggctaggactaagaccagagtcctgcaggtacttagatggttggagcaaagcagggcagtgaggtcagtgctcccagcctgtgcaggagcatcaggaagagtctgtgtccccctcccctgccggtatgaagccattctgcttccctccccagctgccttgtgtcagcagagttccagggaggctccattccccacctctatctaaagctccatttgctggggtgggggccctgcctggaaggggaaggtccaaggctgctcccagcgtgtccctccatcctgactgtccctggcggggcgggggtgtctttgtcacccagctgcacaacggccaggaagggctcaaaccatcctcagggctaacccaaggccgtcctctgggcctgtatacccctgtgctgagtgcggatcgggagaggctgctgaagacaggaggggacaaatgggggacgaaggggcccgagggaggggactgaaggatttgggccaagtcgggagttcccgagggcggagtcaaaacgcatctggattttgctagccccaaactctgccctcattgctgcaagcctcctagaccgaggacccccgggctgagggtggggtaaggataggtagtgtccctccccgtcccacccccgcctgtcccttcctcggtggccccttcccggcgccccgattccaggcggcccctccgctgctgccagccgatccccctctacccccacccactactccggccgccagacgttgcctacagtctcggctctgtctcccacggctgtgggtccggaccccacgggacccctatgggacccccacaggacccccacggcctgagtccaaggcccgccccctcggggaggcggatgtgggaggcccggcccgggtgcgggccagcgacccgggagctgcgggcggctgggaggggaggccgccctgaggggctgggagcggcgcgggggtgggtcccggtcctgcagccccagcgaggggcgagcggcggccagtcggcgagctgggcaataaggaaacggtttattaggagggagtggtggagctgggccaggcaggaagacgctggaataagaaacatttttgctccagcccccatcccagtcccgggaggctgccgcgccagctgcgccgagcgagcccctccccggctccagcccggtccggggccgcgcccggaccccagcccgccgtccagcgctggcggtgcaac

SEQ ID NO: 9555 - DNA, 2300 bp, Homo sapien
gaaccagacttagcgttgtgcccacacaaactgatcagaactccctggggaacttttaaaaaatgcatgtttcttgctgattccaggactgaatcagagtctggagtgagggtgaaaccagtgaatatgcttttctcagtgagcacttcaggtgattctgatgcgtgataaagtagaaggagggtggactggggcacggccagagaagtagaggtacggacagaggatcctagaggaatgccggattttagccttattgttagccactttttcctttccacctcaaaccctctcctttgcagctttctgggctagcaaaggctgccaaggatggcttcctgctagtaccccagtgggcagattcagctcctctagggtgctctctccatcccatcccaccgtcagtcctgccgcacagtgctagccagagtcctcactggctgcgggaggggcaagaggcaggaggtcaggcagaggctggggacacagctgcagcagcccagggctctgtttcctcccccagcctgggcctctggggcagaggaagcccaggcaggaaggccaggcctgccaccagccagagaggcctatgaagcccccctaccccacccctagccatactgccctcagagcctcagcatcttgggtcttcatttggcaccattcttagactatgggctttctgaagcctctgtggccatgtgcccagccctgtcaggctcaccatgtcatgccaaaggacagtctccctgccttgtgccctgcctgaggatccagtccccagacacacacctgcacatgctccaccattcagaaagtcctgttgctgtctgaccagggtccttcttgctgcagctttagccaatatcttctggttctaaacctgtgagaaatgaagactgggtggcttcagaagcactagttggtgtgggacctggattggggactatcatagaccagaattactccccctaacactctccaacaaacttctggaaaagttcaaccctagtcagccatggaaggtcaaacattcagtgtctaagtgtgtttcacttcccctgccacatcactggccctccacccaccctttcctagatggcaaggggaaagaagggggccagggaacagctccgagagggcagcttatactctggtgagcttgcagagaggtttctctacacctggcatgaccctgccccgtccgagctttgcatggttgttatagccctgagggctcagacatgggctgccaccactggatagggacagagcgaagagagcacttgattaggagtctggaaacctgggatgtacgcctgctggtgccagtgagtcctgtctgacccgggacaagtcttcttccctgtatgagccttactcctctcttctgtaaaacaaggagctggattttgtgattcacaggatgtccacctagaattctgtcatgtgggtgtcccaggcacaaggaactaagggtagcaaggaactaagggcatatttaaaaagcccctccagaccttgtggctgctgcagcccaccctgaaaatatgccctcagttccctgctgtgcgtgactcctgcctgttctatccagaccccaatctaaacaatcttgattcctgttcctggcttggcaggaccctgaatggcaggaagcgaagacaggagcctgtttatgtttgaggcagccagggctgggggggcattgagaaagggtaggcaggggtggaagctgtgagggagtgggaaagagacacagaacagaaggggagctgctggagagatgctccttctaccccaattgggtgctccctgcggctctcccaacctgcctgcagtctgagctcagcagcaggagtgcagagctagggtttccccaagctctcagtcacttaaacattgctctccacccttcacctctaacaggatggtttccatggggaagtgaaccaggacttcccctgcaggccccgccccaaagccaggcggcagggagtagggaggcggcctccctgcctcccctccaaaaaaaactctgtgatttcctctgggcaggagggagccacggccagcggctgtcacacttcatggctcttactccacctctcttgctcctctctgcagggaccatgaccttgggctcccccaggaaaggccttctgatgctgctgatggccttggtgacccagggtgagtactgggggagcagttaggaaacaggaacctggatacagaaagggctatctgggcccagatcagctctgcctggggctgaacttgagaagctggggagaatg

SEQ ID NO: 9556 - DNA, 2300 bp, Homo sapien
gtcattctgggattttaagaaccttcaccttccctgtgaaaagtcagaggctatctgtggctctgtgtgtgtgtgtgtgtgtgtgtgtgtgtgtgtgtgtgtgtttgagagtcagggttttgtttgctcttgtcacccaggctggggtgcagtggcacagtcatagctcactgtaacctcaaactcctcggctcaactgatcctactgcctcagcctccccagtagctaggtgtagtgcacaccaccacacctggctaatttttaaaattttttgtagagacaaggtcttttatgttgctcaggcttatctcaaactcttgggctcaagtgatcctcctgcctcagcctcccaaagtgttgggattataggtgtgagcctccacacctgaccactgtggtatttttgttgctatttgtctttgtttgttgctgttttgttgttgtttgtccttgttttttctcaaaacacttcacttgtacaaagacacacacacgtatatcaacacatacaagcgtgaatatccttctgaacatacactcacagaaatatacacatgcgcatatatgccagactgttggccccgtgaggacaaagaacgtgtcttttgctcacccttatgtccctattacctatcatagtatctggctcacaataggtgctaataaatatttactgaaagaatgaatatattctatacatgtatacatctatgtgtacatagacatacatttctgtacaacatatccgcaaaaagccacatgtatgcattcctgtacacacacacatacactcactttcaggagccagaagtggggccagctcatttcaggccctgggatgggttgatgagcttcctgggatgggttgatgagctttttgggatgggttgctccctggacacttgcatttttagggcagttcccacttccacagtcccctgggcccagccatggctgatggaggggctggaagacactgccctctgcactggggtcttaggctgtggatggggatgtgggagcccccaggcttgaagaatcggccccttcctatggatcttggcaaaggtggggatgggggtaaggtgtttcacagacactgcttgcccaagggggcttgagtgctcctgaagatctgagttctctctttctgtccgccctgtctttctccatccctttctcactctactctcttcctcttccattttttatttttttgtcatcctctgttctctctctcaccacttgtctttcctctcgctctcctttccaatgctctcatctccctcctctcatcctttctctcctgcttatgtctccccattaccggccatcctcctcatcttcttcccatcttctctgacccacctccctctgcatctctctcccgaccccctcctcttctctgcatctctctctctgcctcctctcctctgcacctctctcccaacccccaggtcctctcaggcctagctcagatgatgcgggagtgctggtacccaaacccctctgcccgactcaccgcgctgcggatcaagaagacactacaaaaaattagcaacagtccagagaagcctaaagtgattcaatagcccaggagcacctgattcctttctgcctgcagggggctgggggggtggggggcagtggatggtgccctatctgggtagaggtagtgtgagtgtggtgtgtgctggggatgggcagctgcgcctgcctgctcggcccccagcccacccagccaaaaatacagctgggctgaaacctgatcccctgctgtctggcctgctcaaagcggcaggctccctgacgcctggctctctccccacccctatggccagcatggtgcaccccctaccactcccgggacaggatgcaaaagaggctccagagtcagagtgccaagccagggaatcccagtcccagactcagagcccgggcctgcactttgccccctgcccttgatcaaccccactgccccaccagagctgccagggtggcacagggccctgtccagcccctggcacacacttccctgccaggcctcagcctctagcataagctccagagagccagggcccatcagtttctctctgtggatttgtatctcagctccatgatgccttgggctttctgtctcctcaacaagagtgcagcttgctgaatgtcagctgcctgagagagctggggcctgacttactagggcattaaatcctaagaggtcctactgaggtgtggcaggatcacaggccagtggaaaaagggcaggtcagatgggcaaggcccaggactttcagat

SEQ ID NO: 9557 - DNA, 2300 bp, Homo sapien
agcaagaaataaggaaagatacctccctcccccctggcttcagatatgtgctcctgaggggttggctttcccttcttaactgcaggggttggtgactgtactgggttgaatagtgtccacccaaaattcgtgtctaccaggaacctgcgaatgtaatcttacttggaacgaggatcttagcagcagatgtaaccaattaagatcatttgcactcatactggattagggtgggccctaatccaatgactggtatccttataagaagagaggaatgtggacagagatgtagatgcagagggaagataaccatgtgaagacatggggttatgcttccgcaaaccaaacaacaccaaggatcctgggaaccaccagaagctagaagaggcaaggaaggattcttccctagagccttcagagagcacatggccctgccaacaccatggtttcagatttctagcctccagaacagtgagagaatacatttgtattttaagctacccagtttggtagtaggaaactaacacagtaacctagcactgtgtgcaccacagcttggtggatagagcatggattggaaaccacttagacggactgggtggggtgtgcctatttgggggagatgagggagaggagaataagttatttactcatccagctacactgaccaacttgtagacaatgcctccccatgactttatgtgattgtgtgtacactgtgtctggcgagtgtgtcttcagctttattttttccggatatgacgatgggagttcttcaggttggtgaaacttagaaggtgagaattccatttaagcaactgttctccctatctcttggccatcctttccacccctagatctcagatggtgaagctgtgcttagagaggttcaaaccttgcccaagttttcacagctagttagtaggaagcagaattcagatccagaattctctggctgcaaaaattctgccctttcctttatatcaagttctttctcaagctaaagaaactgacctcttttcagaaagatacggagtgatttgtttactttcttaagcatttcttctagatttgaaagtaacatttatttgaaaaatatttagaaattattgaaatgttaaaagtaaaaaaattatggcaataactactgttactattgggtaaatatccttccagtctttttttcctataaacacatattatcagtacaatttgaataatactgtaaacagtgttgcattttgcttttttaatttaacattatcttgtaagcattttctcatgtcaatagtttttgtaaacaggattttaaattactaaataatgttccatcatatggatgggccataatttaacattttctattattgtctacttagtttctaccttttttacaatgataaatatacagttaacatttttcataaacatctgtcctcttattatttcttgaggacaggggacaatactgggtaaatggatatgaagattttaaggcatttgatgcataatgccaattgtttaccaaaagggttctacctaccagcccaatcagagtgcctcacacggcaccctcacccatactgtcatcaataaagagctttgctatgttctgaaaaggcgcgtgccgcgattccatcacacaggctgccgcgtccagaggatggcagggggcgaggcgaggcagggaaaccagttaggagaccgcggcgatgatcccaggggacgcgctgggggcttgaggctaggcgcagggatggaggaactggaacacgcacgggattcgtagaatattcgacgggggcgggggatcgactctgataagataattctgcactgcgtggggtgcaggagagggaggagactgcacgttcggctccggcctcctccgcgccgggctcggcaccgatccgcgaagttggccgaggcgtgagccccgcccacccctttaacagggacactcccctttaaggcgggcgcccgcgcgcgccccggccccgcccttcgggggcgcgcgcggcggccgcggcgccggctccgccgggagcgcacgtgcaggcgccgggcggaggagagggaggcgggagccgggccgcgggaggaggggaggcgccgggggcgcgcgcgcgcgcgctgggcgctgctgggctgcggcggcggcggcggcggcggtggttactatggcggagtcggccggagcctcctccttcttcccccttgttgtcctcctgctcgccggcagcggcgggtccgggccccggggggtccagggtgagtcctgggacggggggcgggggccggga

SEQ ID NO: 9558 - DNA, 2300 bp, Homo sapien
atagctggggtggctccttcacagaggaggttgtgcaagatgcccttttgctgggtccctttggggataagcaatggaatgaatggaatatacatcattgcctctccgctttgcgtctccccctcccaccccccacagatgctgtctgtcaggagcaggcaacagacggtcctggggtccatctgtgctaatgcttcacaatagagtcccatgtttccccactgacaccccctcggcccctcagctgatggccacttggtggtgccaaggcgggaggtgggaggagggagaagaaggcactaagagagctacctcttagctcctggcagtcctcaatccaccccggccccccacccaacaagcatcctgccatctggacttgtgcaatcactgaggggcggaaaagcaccctcttccacccacacctcttgtaggggatgggggcctagaggactgggggtggggaggagaacacagagtcaaggagactagagaagaagactgagccaggcgcaagaactgagacaggcaggaggcagaaagtctttcctggcctcgcaggtggacgtggccattgcccctctgtgctccttatgccacgtgtctaacacagcacatgtgcaaggtaccactccctaccaggccaagagcctctgtaaccccagtgcccagccagtacctggcacacagcagggcttaaatgttggacaacatcacagagtggttagattgcaggctctggaaccaggctgcctggctttgaatctcagctctgccgctgagtgacttagggcaaattacttatcttctctgggcctcagtttcctcatctgtaagggaggataatggtgcttatttcgtagggttgttatgaagaccaagtgagttaatgcatgtatgtaaaaggacacacagaacaaacagtgtgcatagcacatgctaagtgctcaataaatgttaactgtgaaggcataacagatttgggaagactgggggaggagggaggggacagacaagggcaccgcattgccgcctctgcttcttggccgatgggtgttgggacatggagtccccagcctgtgctgctgacgccctgtggtggctagccgctctttagacaccagacgctgccttccacttcctcctctcacttcttattcgggcaccactgacgacagagacttcggctgggccattcccgcctctcctaccgcctggcagccatggtaacagcctgggggatggtccctaagatggggtcagagaacggctgagcatggccatccccccagccctgaactcccactcagcctgggctcatcccaacctcctgagtcaagtccacagtaagcgtctgtctcctgggaagggggatctgaccccggcatcaggagctgaggaaaggtgttgccagcagggatcactcaagccccttggaggggacaggccagaactaagcctactgctttcagggtttccacctcttcccttcttcctagacgtgcgaacagggggcagcctctttcagctcttctggggcagctgcgtcaagggaaaatcctgggccctctccctccctgggggcttctgcgcagtgagttcagggagtctcctccctcctccatcgggcctccacccctactcctgcgcagccccgctgccgctctccctgccctggagtctcctgcagccccttggatctccgtgactctccctacctccccgactccccaggcttcttacagtgacctcttaccgtgccccactccatgaatcgccagagctattcgtccctaaatttcaaaccttgcgcaatgtcccttcacagacccctccaggtatcacgcagccccgagccccgagccccgccccgggggcctcatcccgccccttcgcgtccgcggctcgttttcccccactgagcgcccagctcccgcagtttccccggccgtcgagcgccgtgggcggggctccagggcggcggcgcctcgcggggagggtcctccgtgctgggggcgaggccacccgaggcagctccccgcccgcccccaaccccgccccgctctcggagcctataaagggaggcgacccgcggcccgcccggctggcatcccccagccgccgccagccccgccgaggggagccagcgccgtctctgaggggcgtccggcgccggagccatgaccctccgccgactcaggaagctgcagcagaaggaggaggcggcggccaccccggaccccgccgcccggactcccgactcggaagtcgcgcccgccgctccggtcccgaccccggga

SEQ ID NO: 9559 - DNA, 2300 bp, Homo sapien
ccggactcccgactcggaagtcgcgcccgccgctccggtcccgaccccgggaccccctgccgcagccgccacccctgggcccccagcggacgagctgtacgcggcgctggaggactatcaccctgccgagctgtaccgcgcgctcgccgtgtccgggggcaccctgccccgccgaaaggtgcgtcccccgcccgccttcaggatctgctcagcccctctccgactccctacagggcctgctgactccgcagtgccctctcctcggcgtccgcggagtcccccaccttcttccccggcccgctgggtgcctcgactccccgcgttccccgctgctgcgaaggccgtggccctcgcctgcacaccgcgcccaggctcggtggctcttaactccgcgccccatgcacgccccctctctccctccttgactcctcccagcaccccccttctcctacccgctccatctggctttctgccccccatgccccgcctccccgtggccaggtgtcctgggtccccaggagcccctcgcccgagggacagagacagccccaggcaagttgaaggtccgagagcccccggtgggagaagcgggccggtggctgcgccgcgtgcgttctcactctgaggaagtgcgtggggagccgctgactccggatagcacacccttccgaggggactccccgattcctgggctgggggcctgccgcctggccccacgtctgacgtacggggcgcgagggccactgctccctggacttctgtcggaaccggacgcagtgggaggggtcgcagggcgcccgcggggcaggaaggatgcgggccgcgcccacctctgagtcccctctgccagcctcttcctctggccccaggagacctgaggctcagaacctacacaacaccaggttaagaagaggggcctggtggcctttcctcacccagccgccctccttcgccccggcccccagctagcccccacacaatgaacagcttgttgagaatttgcattttatgaaaatcatgttgaaagacaaaggggtctctctgtgctgcccagtccttcctccctggccgtttgggaactgtccccacccctgaggccaatctggttctgaaccttctcttccttgccttgggcagctttgggggagggttagcaaaggcacagaacagaaaggccctgggctgtgcaggctccaaagaaaagggctgctctgggactggacctcctcccaggaccaaaaagttagggagggtgagagactactttagtttatcaaggaccctgaagagacaggaaccttcatctctcatccttcctccacaccccccaccaccacccctaaagaactcccagtctcggtcctttagtgagacttgctgacaagtttgacatctaagatgttttgtcccagaaagcacaaaatatatggcaatggagagagagacccaggtatagctgggcacagctggtcacctgcagctgggatccacaactggtccttgaaacggcctgtaccttaggagacctggcacctctgaccccacattctggctgggattgccagcccttcgggacagggtccctgaccccagccctcccaagccactgtctgtagctgagaaattagatggagagacccaactggcagaaggtcctcggagcaccttgataggtgagcccaggggacacctatcctctgaatcccactggggaagagcccctgcctcagctttgggagtctggatggcctgagcctctacagacatgggccctaggggtggagaccattttagaataatgatctccccacctgctgccagtgtggaaaccagcaagggcttagaggttcatggatctggaacccaggaggatggttgtgtccctgcagtcccaggtatgaaggtaaggcctgtagagaaagttgaggagtggtgccagtagtggcacttggcaaatagttccaccagcaccaaaacaggtgtggatgtggagctgggaaggggcagacaggaagtgggtcgctgtgtccagggtaacctctcagtgtctgctcaaggacagtcccgccttacctgctccttctgaccatcttactgcccagggctcaggattccgctggaagaatctcagccagagtcctgaacagcagcggtgagtcaccaacacccagcccctgccatggtccaaaggggtgaggtgctgggttggggggtgccaggacagcatctcagcctagcgagggtagtcattctcctagcctttaaacatggctcccccgctgggagtgagggcaggtggg

SEQ ID NO: 9560 - DNA, 2300 bp, Homo sapien
ccacccctaaagaactcccagtctcggtcctttagtgagacttgctgacaagtttgacatctaagatgttttgtcccagaaagcacaaaatatatggcaatggagagagagacccaggtatagctgggcacagctggtcacctgcagctgggatccacaactggtccttgaaacggcctgtaccttaggagacctggcacctctgaccccacattctggctgggattgccagcccttcgggacagggtccctgaccccagccctcccaagccactgtctgtagctgagaaattagatggagagacccaactggcagaaggtcctcggagcaccttgataggtgagcccaggggacacctatcctctgaatcccactggggaagagcccctgcctcagctttgggagtctggatggcctgagcctctacagacatgggccctaggggtggagaccattttagaataatgatctccccacctgctgccagtgtggaaaccagcaagggcttagaggttcatggatctggaacccaggaggatggttgtgtccctgcagtcccaggtatgaaggtaaggcctgtagagaaagttgaggagtggtgccagtagtggcacttggcaaatagttccaccagcaccaaaacaggtgtggatgtggagctgggaaggggcagacaggaagtgggtcgctgtgtccagggtaacctctcagtgtctgctcaaggacagtcccgccttacctgctccttctgaccatcttactgcccagggctcaggattccgctggaagaatctcagccagagtcctgaacagcagcggtgagtcaccaacacccagcccctgccatggtccaaaggggtgaggtgctgggttggggggtgccaggacagcatctcagcctagcgagggtagtcattctcctagcctttaaacatggctcccccgctgggagtgagggcaggtgggggtgagggctgtgtgaagggggtggcagagaaaggaggtagggacttttgagtcattaggtgctcttcaacacacccccagtccctgccagttacccctccctggggagatctggatgaacggatgtgggagttgggagggggtgtaggcaaagtctatggggaacgtcctaacccaggcctcctgggctcccctgagccctcctagccttggcaaaccccacgggcccagaccttagccaggctgtgtccagctgcttggggctggctgcccctgcctccagaatgtcagtcctcttctggtcccagcctgtggcagccctcttaggagggatctgagcgtgggcagaagtaggtgctgactccaggccctgggaccccacagtttcccttctctactcatgtcccatccctgatttgggcttgactttctctaaaatggatcagcaaactgacctgctagccagattggcctgtttggcccttgagctaataatttttaaagagttgtaaaaataaaaacaaataacaatatatgacagagatcataaggggcctgcaaagaaagcctaaagtatttaccatttggccctttgcagaaaaagtttgctgacccttccaaaaaaccctagaacattggggtagacgcggaactcccagccaccctgctccctgccccaatagtacagagaggggaaaggcctgctgttcagagtgagaggggctcgagctggagtggggaggtgctgctcagcatttgggggaatctctgggtcaggctggaagcggagaagcctggtctccagggcctttccgaggctgagctacttgaaggggcctttggaggctgctttaactgtgcctctggctgggcgggaaggaagggggtgggagtgggcagaggaaactctgggctcccccagcaggcgaggatctggagcagctccagaccattgtgtccagcgggcaggccttcagtgcgggaaggggcggcctcgaggctcccctcccccagcccccacatctggtgggctggccccagcatagctgggaggagcagctgtggtcttgctgagcctcgtgactggcctctgggggtggggccagtcctctctccaaagctgtggaacagaggaggctccaggctgtggctgaatttcgggccttagctagtcagtaagtggtactgtagggctcactggaaagctgggatggggctaaaaaactcagccggctcatccttcaggggaccggcccttctctgtgcttccctcccaccactagaggctggattggttctctgtggctccatgaggctgatttcaattgggtat

SEQ ID NO: 9561 - DNA, 2300 bp, Homo sapien
tttttgaagcctcagtttctttatctgcaaattgacctaatacttgaacctgggagagaaatgtacaggttcttgggatgtgattttgagagacaaactctgcagaggttcttggaatcattatgaagaatgagagaaagggaattctgagttgcgccaagagtttaggatttgtccagcaaaggatttctgggggtgggcagtggggtggagagaggaatgcagcccctggaatgagggctgagtggaggtgtggggcctcttttggagaattttgagcacagaagagattctttgctgcgtggggcctgggctgggtgctggagattgtatagcatgctcataatttaaggtggctccaaaaaggatcaggggctagtggctggcacagcagagcacatgactggatcctccctaatgggtgttccccaatgaccttgcctgtacgggggtataggagcagagatggtaacccccaaccccacccagccagccccaatcccattgctccaactttggccgggccttcctgaccagcctctcctgagtgggcagctgctgggggagaaggatttgctcaggacaggatggttcttccatttccaaagagggctccagtcacatgggagagagaaaccttccaagtgcctgcacccccaggaaaattcttaccatggaagcctgggcctgaagactctggtcagaggagggtgggcttcccagggcttcctggtcacggtggtgggcctctgagtgcatgaagcactcctttggattggggagagcagggagaactaactcagtatctactgtgtacaaggcacctccacagctgttatcatcctgacagccagatatggtggataatctgatcatatcatgttttagagacgaggaagctgaggctcaggaggtcaagtgactgtcctaagtcacacagtggtatgggagcagccagatcagtgaatccatcacctgggctttgccggggcctgcacccccgcctcgggaagtgccctcttcaggagaaagtcctatttctctgtaagctgccttctcgtgtggaagctgggtgccctgctacctgggttccttgcccttggggtggcatgaatgccaagcgatgcaggcagggcgcccgcagactcaaaggccaggccctgtcctcgccagcagccgaatcgctgtgactttggaccgccaccgagtctctctgggcctcgctctttccacctcttcctggggaagccccggctaagtttctttataacctagccccaggtgcccagcctcggaaggtgtgagcgagacctcggcaccctcacctgagaaccagctccccggctctggccgcgggttatgtaaccgggtgtgcggcgtggggggagccgcggggcggggcgctcgcggctattccgggcgccgctatttttagccccattgatgaggctgcgtcggccgccgccgccgggattccggagacgtcaatgggcacgcgtcacggtccccgccccgcccgccgggggaggcgcgccggggctgggacagcgcgcgggcggccgcgggcgcgggggcggggggcgccgcgcggccggaactgcgggcggggggcttcccgggggcggggggcgctgagcggctgcggcgcggctgcaggagcgcgaggaggaggtggcggcggcggcggaactggcgggggtcccctcgcggcgcccgggacccccggcctccaggcatgggcgcccctgcggtgcagagcagctcagggccggctggtgcgcgaccccggaaagcgggggtggagaggcgagcggagcccgcggggccaggtgaggggctgccggggtggcgggaggtgggccccggagaggccgggcaatctcgggtcttcggtggatgcctttgggcgggctcggggccacgccggagtcccgcttggaaactggggagtcgggggggggactggattcccagcggaaccgctggctccgagtcagcccccaagggcgacggccaaggctttctctccccagtccgccaagggtggggtttggcccacgaggggcgctggaggtggccaggccagagaaattccttccatttctccgccggctgcgggaaccggttccaggagcgcgggagctcgtctgccaggagacccagccgggagggaccgatgctgcgtgatgcaaccccttcgagggactgagtcaagaaaccaaggctgggggtctcgtggagtcaggcggagctggggattaggactcggggcttgtgtctcccaggcgtgtttttttgtt

SEQ ID NO: 9562 - DNA, 2300 bp, Homo sapien
ctggaagcagattgcctggggcctcggcccccaggctccaatgcctaacccggggaggtccttgggcgctggcttgtccccctcttgtggcctaggtcctgccactgctcccattcctgcgtgtcctgggcatgctgtctccagggaatgtgcctgctggctggtttctcttcactcacatcgactctccctctgtaggcctccaccatggacagaggccaggccctgcccctcccaggcagcctggctccttctgctgggccctgaaggcagacgggataatgtggttggccaaggcctgttggtccatccagagtggtaagtgctctgctattgtcctttgtacacccctccagcaggtggggttggggggcagaggtgggggtggagctgcccaaagcggatgtggttagggggatggaggggaagccctggggaggtggcagccgaggtgctgttcagtgtgcgggatctgatttctttagaggttggggtagtgtgagtgtggggactggggaagccttattttcttggcaggataggctggagggctctctgggcctaggtgacacgggctggtgggagtaggggatgacagctgctcccaaggcagcatgtgcctgattccaggaagcagatagggtagaatagggtgtctgggggctgggctgggagcatcatggggcagacgtggcagcggggaactggcctgtctcccaggtgtagacacttctccaggtgagtgcatgaagggaaggctgggacctccccttcctcgtggaaagcatggtgcctgcccctcctcactgtggcaggccagagggcctatggagtctgtggtgtcgggggtggcctctgtgaatgggaaggcagggacagcccttccactactggtgttctagcacatctccttcacttacagaagaggagacttaggtacagaggggagaaatgacttttccaggggtcctgcagtgaggatgtgtagagccaagcccagaaccatgcctcctgggtggctggcaagcacaggcacctggtctgactgtggaagacataccttccttgactgagggtgcttccggagaaggcccacactgatctggggctgagaggtggaggacgggaatgggattttcagcaggcctttcctggggacatgagatggggccaagggcactgtagtcctggttctgtgcctaaaggagctggagctctgccttgcaccccagacaggggtcatgagattcccttcctccttccctggaagagggccatctttgggcagcagccctcccaggccttgagaaatcccggatgaagcacgcactggctcagtatctccctcagcttcccaaacactgttgcctcatggggggtcagcgttcagggtgcagagagccccagagaggtggctggggtggggaggatggggtgtctggtcccagcctggagggaagggggaagccctgggaagcagggcctcctgttctgggggcagggctgggtgtgtgcctggcctcctgatggcagcaggtgctgtaccaccaacctcgggctgaagacagggagaggaattactgtaagggggagaggcaggtgttctctggtcagctggagatctggacttgggaagcacgtgagtgaggatgacagcagtggccaggtgtccctccctcaactcggcccctacatccgcccccagtccagacccagcttcctgagcactcagccctccctctgggtacacagcagccctggtgggcagaattccttgtgtttacctcgttgtctgggtgatggtggtgattgggtggaactcccatgccagatatactgccaaggccaccctgaggggctgccaaccggggccccatgagtgctagagctgctggtcttgtgacgtgggcacctgtctgccaggcctgggcacgggcccagggtcacgctcatgctggggctcccgtcagctgactattttgggctcttgctgacctgggccaaagtcaggtccagtcaagagggcccaaagtggctccccccatccccagaggccggctctggtttctgctatataaacagaggaggacacgccggcttggaggcagcaccacatccagagctcgctcagctgctgcccagcctcggctgtgaggataggctggctgggcagcacgtctctccccacagggctccctgagaccaccaggaagagcccccaaccaatcttgggattctcccttcgtgcggttgtctgggacctttttccagggtcaaagcagatcgtgaggaggaagctg

SEQ ID NO: 9563 - DNA, 2300 bp, Homo sapien
cagttcaaacgtgttgttcaagggtcaactgtgtatgaagactgctccatctgtggtggacagtgaggctttagaaagaggagacaggcaggctaatggatggtcttcatgggtgtgggaaaggaggagtggtcactgggcgcaggcagttggtctgtgggaccagtgaggcatgggctgtggctggcagtaggaaagcgggagaggctgagtgcagtggctcatgcctataatcccagcactttgggaagccaaggcaagaggcttgagcctgggaggtccaggctgcagtaagccataatcatgccactgcattctaggctgggcaacagaacaagaccttgtctcaaagacaacaaaacaaaacaaaaacggggagaggaaaggacccaagagatgttccaaaaaagaatttcaggaaacagtgaaaagttgcaaatggggcatcaggagccaggagcagagattaggtggcaggcagggggtgcagaaatgacaagttctgtctggaacagatgaaatttgaggtgcttgtgggacctttgagtgggcagaagcgggggctggagacaagggtgtgggaaaactgtgatgggggttgagggtggaaatcgggccggcagagcctccggggcagagaaagtcctatggggtgaccagatgagttgagaactgggtgggtgggtgcaggctcaatggaagcagaaactcatggatattgacttacatgggagaaggggaatggatgggggtcgcagtggggtggcagggctctcttttccttgtttttgtttttttgcccttccctcttctcttacttttccgtgagggctccccaggctcaggagagatcagggtggaagggtgacggccaaaccagggaaggctccaggtggctgaagcctggtctgtgcccagcagggccctggcgggctgttcctcactccaccgggcaggtgataactggtcagagctgcctccccacaggtgctggaggtaggctgggagggccggtgctccctgatgtggacagggggaggggtattgataagaggcgtggagagatccctagagatgcagtctgtggccctgggttccaacccagtgtgccaccacctggctgtgtgaccttcagcaagtgccattatttctctgagcctgtttgtttataaaatgaggaagagttggcacaagtttgaaaagatttctcaggctccacccggttctgaaattcggtaatttcccaactagggtgcactccccctgtaaggggctggggaggggacggtgcgaaaccaagttcagcttgtggagcggagccagagctgttggccgagcttgggcctggccaacgcctgccctcgggaaggtcctgtgtagggagactgcctggagggactaagcgagggctctaactgacgtctcaggggcagcctctcagcctgagaccctgctggggaagccgcgtcctgtgcactagctgcgcctagggctgaggtgagggcgcaggctccccagggtgtgtccgaattgcccgcctcagcccgcggcctgtcctgaccgcccagcagcggcagcagcgacaccctagggctccaggaagggcttgggaaggtgtaaaggcggggctaggctcggagggagccggagggaccgggcgcggttggctcccgggagcaactggagagtgaggagatcctcatccggggaagccccgcggccgcgtctctacagcgccccttctcgggctctggccctcccgctggttattctggacctgggggcccccagctgggacccgagtccggtgcggggagcctagtgggcctgggagctgctatttttagcgggcgcggcgggcgcgaggagcctatttatagatcaaacaatccgcgctccctgcgtcaatggaaccccgcgtgcgtcacgcgcgcagacattccaggccccccctcctcgccccgccccctcgggctccccgggccgcacctccccctggccgcctcccgccggaaccgcaccgccccccgcgcccttgtatggccaaagctcgacgggcggcctgcgtcagtggcgcccccgcccctccccgtgcgtcacggagcgcttaagaggagggtcgggctcggccggggagtcccagtggcggaggctacgaaacttgggggagtgcacagaagaacttcgggagcgcacgcgggaccagggaccaggctgagactcggggcgccagtccgggcaggggcagcgggagccggccgggtaggttcccttcggggaacgtgcatctgtttttagga

SEQ ID NO: 9564 - DNA, 2300 bp, Homo sapien
gtgagccaccatgcccggcccaatttcttatctatattgcaggattgattagtatcaggtttaaatttatatgtacacatatatggtatttaaaatcatgacctttccattccacctaataaatgttatctattatcgttttgggaaataaaagcatgtgttagaaaaatcagctttttttttttttttgagacagggtttctctccgttgcccaggctggagtgccgtggtgcagtctcagctcattgcaacctccacctcccaggttcaagcaattcttctgcctcagcctcccaagtagctgggattacaggtgcctgacaccacacctggctttttttttttttttgtatttttggtagagatgaggtttcaccatattggccaggctggtctcaaactcctgacctcgagtgatccatcagcctcgacctcccaaagtaccgggattacaggcatgagccatcacacccgacttttttttttttttctttttgagacaggatcttgttttgtcattcagcctgcaatgcagtggcgtgattatagctcactgcagcttcaacctcctgggctcaggtgatcctccacctcagcctctgaagtagctgggactacaggggtacaccaacacgcccagctaaatttttaatttttattttaaagatgggagtctcactatgtcgaccaggctggtcttgaacccccggccccaggtgatgctctgtcctaagccttccaaaatgttgggatcacaggcgtgaggcaccccaatgggccagaaaatgagcatggtaatccccagctaacaccttaagaatgcctcctggccggtcgcggtggctcacgcctgtaatcccagcactttgggaggccgaggcgggcagatcacgaggtcaggatatcgagaccatcctggctaacacggtgaaaacccgtctctactaaaaaaaatacaaaaaaaattagccgggcgtggtggtgggcgcctgtagtcccagctactcgggaggctgaggcaggagaatgacgtgaacccaggaggcggagcttgcagtgagccgagatagcgccactgcactccagcctgggcgacagagcgagacgccgtctcaaaaaaaaaaaaaaaaaaaaaaaaaaaaaaaatactgcctcctattggaggtgggtgcattaaccgagctctcgaagccctgtctgctctgggcttacaatctacatggagaaccaaatgcgctccaggaagttacacagcactaaaaatacacttgtattcatattagactttacaggtcacagaaatctttcatatgagttatctcctgtgatcctcacaacagccacctgtttatagagagcatcagaaaggatgagtgatgttgagggtcacgcagagaagcaatggccgaattactagcctccgaaggactgtcaccagattggtcaccatggggtatcaagtagtgctgctgcataaaggcaacactgagagatgaagcccctttctccagcatctgtgtgggtggagggccagggatcccgtctgttacgcacattcaacaaactcaagttttgccatccactgggcgtcctgcagtacagcggtgtgggctcatctccaggacctctctctacggggtacgcccctcatcttgcggtgatcagtgttccttccagacctctcagtccggactgagttgggcaccgcgtcagcgtctcccggccaggctcgccgccgatgactccgctcggcctagggaggcggccgagagcccgtagggctcctccttccctccagtctctatggcggaagtgagttgtacgggccgaaacaccacagcgttctcggtggtgggctgaatggactcgtccacatgagggggatcttcatcaccatcaactcttaaaatccgagacataaccacgaaaggagcagcccccagatcagagagcaacgcatgactatctgcgtgtgcttctgtgactacgcggatgttgtgggcggctacatgcgtgcgggggcccggcgagctgggcaggtgccccctccggggccgtgggatctggtgagcttcccggcgcgcggggggcggtgcggcttccggtcccggctcagcctccgacccaggtggtctggagcctgccgggagagtggtggcatctgagaggctggtcgtggactgtggttgggggaggtgggagctgttttaaccgtgtgccccctctcctgtgccggcgtgggcatcccccggggcagtggaacgcgggcgctcctccagcttccgagtccagccagcct

SEQ ID NO: 9565 - DNA, 2300 bp, Homo sapien
ggggtgggtgggtgggattaaaggtgtatgaaaatggacagattttgtacttggctggatattcacacaaaacaggtgttacccagatgtggctatagccagtctcgtgaaggaaggtgcattgtagggtgagggtctgttgcttttggatgtgactgagctgttcctcccttttcccccccagcaatcgactccctatttcaacacctccaaactcactttgctttttttttttttttgtaaacttttgcagattattttatcactcaggtattaagcctagtacccattagttatttttctgatcctctccctcttcccatcctccaaaaagctccagtgtgcattgttccccgctgtgtgtccttgtgttctcatcatgtagctcccacttataagtgagaacatgtatttggttttctgttcctgtgttatctccaccttttctaaggaagctgtgacatccctggcctttatgttgtctggtcttgcttcaccatggccccagagagtatcttctctgtcttcatagagcacatagatccccatgtgcaccagaaaggtcatttgatgtgggtcatgtctggagacacattggccagcttgagactatccggcatctggtgacacttcttccagcttgggctggcccttgccattgcctcggtaactcacattcatttctgtacccccatactcaagcccccattgtgtgctatgctctcatcaatacagtccatgttttacaatgctttttggctgcttctgggccagttctaaccagactaaatgaattgtgtgtagggagggatgctgagggagaaatggggtgggagtggggggtcttgtccatggtcctggagcagggtaggtagtcaggatgaccaggaagtgtttgcacttggaatgcgcttttcccattccgagtcacccttggccacgtgatgtttctactcttgatctctggggcatcagagagttggaggactcaggaggggggtttatagttgaagaaggccaatttctagcaagtccttgatagcatgtgaccccccacttggcctgctgcagtctggggactcttcctgttttcctaccagacagccatcagctaatctaatcccttctgaggggactggtacaggtggttgactggcagtgactttattttttagaagaggactcaaggcttgctacagaattttttggtagacctggcaggagggtcttgcttctctgtccacttttccagtctttctgcttttctgcagctggactctgctccactctcccaccctggcttggctgtgggacacctagctggcaatgggctaccctagtagatgggacagtaacattcccttcccttatggcattgcgattttctgaagtgggggactaatttatccagggtcaggactgcagtcctggtggatcaaatctgtgctctcccattggtctgtaaatgtgactctccttggcctatggggcctgagaaaaggagtgggggtgggccttaaattccccatgctctgctctgctctgctgtacctgaatgtctccctgctgtggagtgtggaggaggcattggcctgcttgtccagccctaggaggcttctgaaggggatgatggacgaggaagggtgggactcactcacccttatggctgcccgtgtgcctcctggctcagcagccacctgggccacctagcagcatagaactttggtctagggataaaaagcccaagaatggggacaatcacctttgtcttgtgtcctgctcagaggggcagcaccccagcctgcagctgggatggggtctgaggatcttctcagggctctgcccaggtgtacctcttggcccactttgcgaaggggagggactcttggggacagggctcctggttttggctgactggacttgcatgggggtgcctgtgggccttggggatgagaagaaatacagcaggcccggagtccgggcctatggagaaagggccgtagccacaacggctggagctctttgtctaggaagtgcccgagcgctctgcgcaaggggtaggggcgtagggcgcctggggtccgccccttggttccctccccgacgcagccgccggcccgcccgccagtctgggctcctgcacatctggcgatcccgccacatctgggcagccggcgctggagcatgaacggctctcaggcgggcgccgcggctcaggccgcctggctgagctcctgctgtaaccagtcggcgtcgccgccggagccccccgaggggccgcgcgcggtgcaggcggtggt

SEQ ID NO: 9566 - DNA, 2300 bp, Homo sapien
aatctggctcaaggtggatgtgtctgcttcttggaccggtttgcatgataagagccactatattcgctgggaacttccctgcccgagccatctgctcaaatgccagctctgttaggatggggatttctgctgttttgcactgcacatggaggaccatggagaaatatgttattgaacgttattgaacaagtggaactgccccttaaatttttcctttgatcatagagtggggaggagggcggaactgtagatgtatgatagctccttaactttctcaaacaaaaatgtatgaactcccagaaatgtcccagaatctaacggaggcacattggagttggtcatatgatatgctgctggcgtgaacagaagatttagggaagtgttaacaacaaagtttaaggagggcagttggtagacttacagatattgtcaggctcatcttttggatttagcaataatgaagttttgtgaggaaatcaaataattccaaaatgttttcaaggctgtcaattctttaaataccaccttcatggatttgcgttttctcccagcgtgcaggcggagtggagagtgacacggccacgtaattggttgaaaatttgaacggcatgctcttgtacctgggagggcgttccaaaggctatgaaaacattgggaacagactcaaccacttcaaaggcacaggtggctggtgaatggaaccctttgctgcctgctggttcccaattttgaatgtatctttttgtttaaaatgtctttgttacaaaccaaacgttacaagaattgtaggggaaatgaattaaaagtagaaacaatatttcatcctttgtcatttgagagaaatgatgaatatttcaaaaccatttgtcagaaagcagggagttatgtcccacttctcctcccccagagaccaaggcggtgtttctttcagtgggttccaaggtcctctagcgccaagggacttttatgggtgttacttgaaaaaagggtggttaataacttgaggattctgtgttaagcaaagataaacaggcttctttattgtagttctttaaagaggcattcctatgccaatattaggatgaatctaaaagggagaggatttcaaagcagatttggccaaataattctttcacctccttctttttttagaggagcatctcatgggaccaccattccaacattcatgctttgggaaacattctaaaaccttccctttggaagagtagaacaattttagaaaaaaacaaaaccaaaccaaaccatgccacttcagatgcatttcctttgctttgtcaggacaacagcataaaattaattttattcccaaggattgtaatgccatgttactaaatttaaatttacttttttttagtaaagtagttttttaaaaaactcttttaaagagtgatttagaaaaaacacattttgggctgggcatggcggctcatgcctgtaatcccagcactttggtaggtcgaggcgggcagatcacgaggtcaggatatcgagaccatcctggctaacacggtgaaaccccgtctctactacaatacaaaaaaaataaagaaaaaattagattggtgtggtgcggtggtgcacagctgtagtcccagctactcgagaggttgaggcaggagaatcgcttgaacccgggaggcagtgggtgtagtgagctgagatctcaccactgcactccagcctagcgacagagcgagaccctgtctcaacaacaacaacaacaaacaaaaaaccccacacattttggaactacaacttacataaaacaaatctctacagagagtgttgaccaaggatgttcaatagtttcatacaggatggaaatgtagccccagaatttcatttttgccacaactattttacccaaactttgttgtactctgtggttccggcaacttggctggttttcctgtagcacggttgtcacaaggaaggcctgttccttgcaggtggactattttgtttgctgatctctgtggcagcccggcaaccctgttgtctaaaatgaactgacccagagactggggtcagtaggctgcgccgttggctgaggtatggggattcggggccaaacccagggagcctaaaggcctgacttgctgtctctgctgggaagttggctgtattggccgagagactggtaatgttttactaaattaatcaagcttatcttgatatgtttttatcatgttatacatttggaactttagcttctgggttgtaatgctggcttctgtggttatggctgaagactgtcaggtcggctctattgctggact

SEQ ID NO: 9567 - DNA, 2300 bp, Homo sapien
actccaccctcagtgtaaacatggggctcctgcttgtcaaaacggaggcaaggtggggtgagcagatacctgcccccccaacgctccctctcacactcacaaggcagggcagaaaccctcttgacctccatccctactgaacctgtttggctgtgagtacagcagagagcaggattaaggttggcttcaagcagaacctaccagtacagatatgcaggggaatggcagcccgcaaataccgtcaaacgccatcatccagtattcctgctggcgttgtctgctgtgaatgtcgaagggtcgtcagagcacttcaggaaaaacaaggacaccctgaagaagcagagcagagagagaggggctggccccacctgaccgttcgggagcctacgaaggtgcagagagggcagtggccatcagatggggctctctgggaagctgggccaccgagttgctttgtgaccctggagaagtcacttgacacccctggcctccattgcctcctctgcaaatgaagggcccagctcagctgatccaaaaggctgctggcagctctcgcaggctacgattctgggagcctgggccagcagcaccggcagtggtgggagaaggcccagctactcacctgtgaccatagggagcatcactgggctggttatcaaaacatcctcatgacaaacaacccacactgacgggagccaggccccaaccaggcctccaacctcatggcctgccctcatggcctatccctggcaccaagggaggagaggccccaagggggagcagatggctcccagtgtgatggggaaagtggtgggtcaggacaaatgagaaacaggtaaactgggggcctttcaagatatgagtcatggagggcttcctgcaggagggagctggaagaacaaatggggaggagaggaggacctggtgatgggaaggagagtagagaggacagccagggtggggaggagggaggcagggggagccccaagctgagctgggctggactgggtagaaggaaggagaggactgcgcaggaccctcccagcaagaggcatatggtaggcagagtctgagaggcgcagctgggctcagagccctcccagggtttcacctcgaggcaaaactgtccctaactggaggcagaagccagcccatgaagggtagctgggatcccagggcccacagtgaccagcaacacacaggacgcatgtgtcatagtggttaaaaggttctaaacccaaagttcctggattccaggcctggctctgccacttgctaattttgtgaccttgggcaagttccatcacctctggtttcctcatctgtaaaatacagcttataatagtacccacccatgggggtgctgcagggatttcatgggtcaagcatgtagagcaaggcctggcacacagcaggggccacatgagcacctgctgttgtcgtatcccaaagcacatccccaggtgtccccacagtctcatggggagagtagtggctcaggacaaaggaggagcagctaaactgaaggcctcagtgctggagggaagagggaagtctttcaacctgagtcacagagagcttcctgcaggagggagctggaagaacaaatggggagagcagagggcctggtgatgggaaggagaatagagaggacaggcagggtggggaggaggcagggagagccccaggctgagctcggctggacagggtggagggaaggagaggaccgcgcaggcaggtgttatcattcctaacttctagctggggaaactgaggttcagggagcctctgtcatcgagaggatgagcacttaaggacagtactaaccaggccctaccctgctgagtttccaggacaagatgggaccacacttgtcgtggtggcaagggggcagataggcctctgacaccccatgttccctggggtctcccgccccagccccaggcaggcatggagagcctgtcgcatgcttggcactctcacaccctcttacccccttcctctgccagccctgccctgccctcgcctggaaacctttgctaattggctccaccttgctctgatcctgtccttatctcaccatcttcagttttaacaatcagtcattggaggtgctttctgctgagtgagcgccctgggtggtgtgcataaatgagctgccacttcccagggagccctccgtgggctcttgctggtcagcccggggcctcagcccccgactggtccacacctgacccattcgccgccttcctgctctcccaggtgcaagccctggaacagcgcaaccagctgctggagac

SEQ ID NO: 9568 - DNA, 2300 bp, Homo sapien
ggagctgactgaggccaaaggaaggaagcaagaaatagatttaagtcatgcacaggcacttgggagaaaaaagcgttcggctccgagagaattaggtggcggggctgccctaaactgcaccccagacagtaagaaggcagcttccttctctaacccgctaccctttctaggggtcctaaaacttagaggctcagattaaagagctcctcaccccaactgtccaggttcccatccatcataatcgtgtggccttagactagacactccagccccctgagcctcctcctctgtcatttggagtgatgagaattaaagtgtccacctcaagtggtggttgtcaggattgaggagctaattcctgcaaagcatctgggacatatctgatgtatcagctgttattctggccttggcagagcccagacgccactgctgccccctcccttccccacagagtacacaggggtgacgggtggggggcaaggtgctgtgcttgaccacatgccattcggatgccaggccagagtgaggacggtgggaggccaaggtggccccacacgtgggtgttgagtggggagcgtggcgcacgtcagtcacccaccagtgcctcgctaccctacccggcaccagatcctgggatcaggcttaggatggacccgtggcctctagacagggtcctgtgcccttgtgagccagaagtgcctagtgtgtgaaaaagatgtctgccctggaggtggaggcccagggtccgcgatgtgactggcaaatggttctccccgctcaggggctctctcttcctctgggcccagagggggctgctaccccttctatctctgaccatctgtgactctcccagacacactcctctctctgctctggcccctgccacccagagcaggattgagccaggtccaggaaagacatgcagatccagccaccagggccagaacatcaggaccaccaggccaggaaaggagacgcagggctgggagagctggtaaccccctggggtgggagagtggggtctcaggaactgtggaaaggtaggcattgccctgggccaggtgggcctctgccgccctgtcagaggctctgtgggggcaaaatggggtcttttctatttctacttcacagatggtgtaaaagaggtcaaaggaggcagagaagagaaagaagagtggggaggaaagagtgtgaggaaggcagggattctcattgccccagagcagagctgcattcagccatacccatcgcccctgctagactcagcacccggaaggcagtaccactgattgaggccaactttgtcccctgtcctctaccaagtgctttgtacatgctacctcctgtgaggtgggtgttttcatccccactttacaaatgaagacaaaagtcaagtaacgtgcctgaggtcacatgagtggtgagcagtccagctgagtcttgaaccaggtctcacatttccaatgctgagagctccttggccttgaccgtctatgtcctcccagcctctgagacagtagggtgtacatagtaggtcctcaatcaatgctagttaaagtgaaggaaggaaggaagggagagggggtagaaggaagggggaagataagccagggagactctttggcagccagaaaataaataataagtgctgttttccagtgccaggctggcacggtgcccaggatagctgccctacactcgggagctcaaggcctatgcttgactcatcttttccagaagtatgtgagcccagatacgtcagccttcaagtatgcagtgaggtctgcggtgaggcgctctctcttctctcctgcccccttgaatggccttccttttgccaactccccacccccaacccacccggccagtccagccttggccccctccccagagctaggcctgctttctttggggcagggggctgtggaccagccccctaagcaatgcagatacctgttgggagggagacctacatgctgctgggggaggggcgggagcacccacatcatccaacaggttggtcaggctgggaggcgtcccgccctcctgcagctaatgagcactgtgcaacaggtgtctgctcctcagtccccagcccgccccagctgtgaccagagcaaccagagcctgccacccgacgcaaccccaggctcactcgctcacccccctgggccctcctgcttccggccgggggcaccatggcctgccgctcctgcgtggttggcttcagcagcctcagcagctgtgaggtgaccccggtgggcagcccccggcctggaacctcaggatgggacagctgc

SEQ ID NO: 9569 - DNA, 2300 bp, Homo sapien
tcagaaaagaagcaagcacatcagaacggcagcaagagggatcgaggtgagacggcaagacgttctgacttccagggctgcatgtcatcaacacgtgaggggcgtgtttcctggagagggagagctgcttaccagctcagtcgggaagtgggaggatggacggcccacggtggggtctctgttcaggcttgtgtgtgagcacctgtgtgtgcatcatgtgtgtgtgcccagatatgtgtgtccacagtctttagtgaggcatcttctgcctccacgggctctgagatctccagcagtgtctgttattgcgagcacaggtccccccggagaggactgtttcctttgctgatggtctgaaaggtactttatgttcggatgcagtgctgtcttgattggggaccattctttttcctcaaatgtcctccaatttggcagaccatgtattccaatctggaaaactccacccttactttcaggaatttttctctgccccttctctaaggacctccattccctttgcctttccttgaggataaacgcctttccttgatatgactcgttcgtccctgctgcgttccagcttccacaggattggatccactgtagcgagtccacacatgcttagtagcacggatgcagggggagaaggggtgcatgaatgactgtgtgtggctgaggacagccctcgggtgctctctgtcaggtgtcatgttggcagctggccctgtctgcccttggtgtccaagcctgtgccccgtgtcagggtctggggtcagattctgtgtttcaagatccaatagcaacacacacacacaaattcctggatgtcagggccaggtgggaccccagagaccacctaggtgcatctatccttcattgatatacaaggcaccccccagagagggaagggccttccttgcccaatatcacacaggaagttgaggggatacagccgggtctcctgactcctagtcacagctctcttcaccattccacattctctccctaattttgacaaccccctgtcccttcctctctctctctctttgctgtcatctctgtacttttctcatgccctcccctttcagaacctgcccatttctcaaggcctatcctggccctccttcactctggaacctgcctgattcctctcccctaacttcttctgcaccattagtgacaagtcctgctaattctcatcccctaattgtctgtaacacaaattaatgcttgattacttgatgctctaatgacctgggctctaaccaggctcaattgctttctagctgcgtgaccttgggctacttacttaacgttcttagtcctctgttttgtcatctgtaaagtggggctggcttttgagcctgagtaaatagcagaagccaagactcagaggggtaaacttcaaaaacggcagtgttaaaatctaagggcagtgttaaaatctaaggtgtgatggtggtgtgttgggagcagtggtgagaaggcaggcaggggtcaaactgggggagcctcagctgtggggggcttatgttattggtaatggggcttccatgaggctttttggaagggaagtaacaaacccctacctagagcttgaagtggggtagaaagggcaccggctttgcagctggcagatctggattgaaattccagctctaccactgactagctgtgtgatgctgcacacattgctagatctctctgagcctcctttttcaatctataaaataaggattatactcaccctatggaattgtggtaaggattaaacaagaaaaggtctattaattgcttagcttggagtcttgcacttagtaagtacttaacaaggagtagccgtgattactggtgctgtcgtcattacccagcagcgcgtgtctgcctcctgacctgcctctgtcctgggtctctctgggccctgggtgtcaggctcattcctcatttcccaacctggaagcttcccaagggcagggctcacatgcatcatcttctcgctctggctgtttcaggaagtgatgggagtggggaaggctgttgaactggtgatgtcacaatttggggcttctgggtggttctgcagaggccccagggacctgtaggcaggtggagaggggatgggggaggtctcaggtcctcttgctcacccatcagctgtgtagtgtctgaagtgattaaggagcttggggaggttggtgttgacaagatgttaagccatttctcccagggacagtccctggggcctcaggcactgtggtgggcctaccactgctccggaaccccatggtgggggcaggccc

SEQ ID NO: 9570 - DNA, 2300 bp, Homo sapien
ggctggcaggaacaccccactcttaccccaactcacagtgatcgccggagggtggtgcactctgctccagcacctgccacctgcctaacacgcacttggggacagcttccaataggatgcaagtggcagacaaaggtaccccaggagggcaggtgggggagggtgagaagcactggggaatgggcacccctcatctcccacaggctcagcggctccctcaggacaaggagaaagctgggaaccctaagacagaactggaggttctcgttgcctaaatctctcctggcttgctgcacatggaacccatttcttcccattcagggctctgcagaggcagaagatgaacagtaagatgcaaagatctggcaaccttcagagctgggtgagtcctggggtcctcaccccattacgcctaagctacaaccccatattccctgtcctcccagccctgggggccctggtcccactacgcaggggtggctcaaaagcccaatgagctggaagggtctgagagagcaccccatgtcacaggggaggtgaggcagccttggacctgggatcttgtttgcggctctttatcatggacacactcctagaactccccagtccctccacctcctcctgaagtactccaagagctggtcaacaccgagagcccacctcaggctgtggcacggctcttggtggggcctggtgggtcatgggcttgcctctcccataactcagggcccagttggagacaccgtgactgttcactaatcagacacctgagtgtgtaggagaaaggccttgcccactctattcttcagatgagaacactgaggctcggcgaggcgacaagtctttctgagggccagtggagcagaccagcctgggaggcctaagggaagtgctggcagagctgaagccgcggttcccctgcctggtcttgcagtccagccctccacctcacccttccccctccctcagccctgccctgggctccaaactccgacctgatggagtccccacaccctctcacctgggcaggcccacctcagactgcctgctctagacccacacaccccatcccctcctccctctgcaggagcatgcccctgccatcactcccttgctccatgaaacccaaaggcagacccctcgcaatcctccccattcccatagcactgcagcccctgcatctgaccacatcccttcctgcttaaaactcttcaacagctcccagcttcccttggaacagaaagctcactcctcatgtcagcattcaagagccccgcatacttttctggcttcatctccagccactgtcaccccctaccatcacctccacacgaccctcttaacaccctggtctgctttccaaacacacaactgcttgcatgtccctggctcagcctacagggccagctatgtctcacccttacaaaacttcacacggccattctagagaggccaagtgcacccctcagggctcccgtagcccccaggcttcctcccttcctggtgcgtatcctctgtgtgcttgtctgaatcctcctctaaactgtaacctctctgcaggcaggggcccagccaaccttgccaaatgattgtcctctgcacccagcacacccgtgaacccctagtaggtgttaaagaaacactgtctaacattaggctctaattatttcattgatagtgtggtctggctcccccctccatccgcatgggccaaggagacactcagccgggggtggggaagctgtcagtcaagttcccctcagctcccacctccatgctccctctctgggggacgggcctgcccccaccatggggttccggagcagtggtaggcccaccacagtgcctgaggccccagggactgtccctgggagaaatggcttaacatcttgtcaacaccaacctccccaagctccttaatcacttcagacactacacagctgatgggtgagcaagaggacctgagacctcccccatcccctctccacctgcctacaggtccctggggcctctgcagaaccacccagaagccccaaattgtgacatcaccagttcaacagccttccccactcccatcacttcctgaaacagccagagcgagaagatgatgcatgtgagccctgcccttgggaagcttccaggttgggaaatgaggaatgagcctgacacccagggcccagagagacccaggacagaggcaggtcaggaggcagacacgcgctgctgggtaatgacgacagcaccagtaatcacggctactccttgttaagtacttactaagtgcaagactccaagctaag

SEQ ID NO: 9571 - DNA, 2300 bp, Homo sapien
tggaatgcttcagagaggggaggagaggccaaggggtgaatgtcaggcaggccctggaatgcagaaatgttgctcaaagtggcccccacccacaaccccagatgtgagcctgaaaagcccagagaccttttctccttcccattgtcctccccagtcctctctaggtatggaatctggagatttcatcttgggtgaaaaatccatggcccagggaggggcagtgacatgtccagggcctcaaggcaacagcagtgccctgacaaagatttcccagccaggctttaggggagaagtggatgcaggaactcctggtctaggtgggcacagcctccagagcgcagatcctgtagggggctggagatggggacggatgagagggccagaggcagaacttgttagtggaggtatgggagagcaggcgttggtgtgagaggcagtggtaaaaacagagttgaagatgagccctgaggggtgaggaagttggagtgtgtgtgtgtgtaaattaaacaattggtcttttttgcctgcttgggcgttggggaaggagggcagtgagattcctatgaatgcaaatatcacaggaccaggtaatccgtatgctcttcaagctacaaccaggcacaattccaggtcgaatctctctcggtcttatgcacacatacatgctccacagccgataccacagcaggtctccttgggcacccctccgcctctggcctgagctgacccaacaccaatggctagggtcaggaggggaggcagggagggaggctggtgagccttcactaagatcactgagaaggagtgacagtctttagcctcactggaagtccttgtgctttaactgaaatggccaagcaggaaggacattccgtccccacccttgtctcccccaagggcttaggtctgaggtaacgaacctggccagcttattgggaggggctagaggtgggctaagggcagacggaagccaggcctgagaacagggtgtggcaagcatggctggccctaccgggaagtgaggccaacactcaggctttgtccggtattcggttccagcactaggattacccctcttgactgggtttgaaactgctgggaattgtttggtggtggcttcacgggagaaagatgatgaaagctgagggcctttaaacaggaaaatggtggagggagcgggaggagagttgagtgctaacagaagcacacgcactcaggcaggcatgaaaatgtgtgccattgtgtagccacagctgccccctcgcccaggatgcacgcacagacccccatctgtgtaagcaggctcagacatgcgggtgcatatgcctgggggtgtgagcacagcagagcccagaggcctgcaggcgtgtgcacacatccacaaagtgtccacacatccacaaagtgtcacaaatacacacaagtgtccccttcctgtacagggacgcataaaataaatgggcaggaatatgagtggagggtccgggaggtgagggtccagggtaagcattcccaaggtccctgggattccgatgcctactggagtggggaggggaggagccagaggtgcggtcggtcgtgtgtctctctcagcctagtttctatgggaaatgaagtaggaaggaacgcagccagggaaactagctgggccaggaggggtcagacccctgaacaagtgagctgatctctcaaggaggagctggatcggtgtgagggagagcggtaaggaatgcctttctggcttcagcagcctggaggatggggacgtctgggcgttgactcctgggttggaacttttcagcccaccccttcccccagtctcttgccactgggtctctctgcttgggcctcagggatctctaggttcttcactccctctccaagcatcctcctccgggaagccttccctcactgagtccgtttccaatgggctggaactgcggtcccccgctgttctctgcggccgtctagggatggcgctcctgcctactccggaccatccctgcttggactgaaagcctgggcttcggcggggcgggcgggcagagggcggagggcggccccaggaggggcctggcagcagagaaaggtggcccgcggcagccccgcccctacctgtggaagcccagccgcccgctcccgcggataaaaggcgcggagtgtccccgaggtcagcgagtgcgcgctcctcctcgcccgccgctaggtccatcccggcccagccaccatgtccatccacttcagctccccggtattcacctcgcgctcagccgccttctcgggccgcggcgcccaggtgc

SEQ ID NO: 9572 - DNA, 2300 bp, Homo sapien
atcaggggttgcgaggatttatcctgccctttatcccttctggactcaggaattcaggacaggctaaggattcgggaggaggtgggggtgagtcaatcaggattgaccttggagagacatgggatgatcgcagcatttctaaggaagggggattgggtgggactggaaggaaccaggaggaggtcaggggactccaggttgtgacagggttcaaaggtgggctaggtagggccagcaggggagcccaagtcaggagagactggattgcctgagcatttactcccagaggggctgggtgggtagctgcctgccaactcaccactctaatgtcctcccttcccttcttattctctccctctcacccttgtcctccggggtttccagctctttttcttcaaggggatttaaaaatctctccactctcatcagtgtgagtctctggccttaggcagaaggtagggtggccagtcacctggcagaggctaggctgggcataattagcttgtgaggttaattacaaaccagttcttcagcctagtctttgcctgaacgtccagtctccaccagcccctcagagcaaatgtccacagattcattaatttcaggggaagtttctttgaggcttgcttcaggcacttctaatctcaggtcttcctgggtctatcacatggtttatttatgtgtaaacacacatgtgtacacacacacacacacacacacacatatatataaagttttcttttcatggtgaaagtttagtttatttatgtgtaaacacacctgtgtgtatatatataaagttgttttcatggtgaaagtaatacatactcattgcaaaacaaccaaaaaattaagtaaatcgtaaattgaaaatggattacttggccaggcgtggtggctcatgcctgtaatcccagtagtttgggaggccgaggtgagtggatcacctgatgtcaggagttggagaccagcctggccaacatggtgaaaccccgtgtctactaaaaatacaaaaattagccaggcatggtggcgggtgcctgtaatcccagctacacgggaggctgagacaggagaactggttgaacctggaaggtggaggttgcagtgagccaagattgtgccactgtactccagcttgggtgacagagcaaaactctgtctcaaaaaaaaagaaaaaaaaaagaaaatggattacttatacccaatgctaccatctttgtgtctacctttccagacttttctgtgcttacatatacataaagatatagaaatatacattttcaataaaaatagcatcatgctttattttaatttttattattatactttaagttctagggtacatgtgcacaacgtgcaggtttgatacataggcatacatgtgccatgttggtgtgctgcacccatcaacttgtcatttacattaggtatttctcctaatgctatcactcccccctccccccacgcccccgacaggccccggtgtgtgatgttccccgccctgtgcccaagtgatgtcattgttcaattcccacctatgagtgagaacgcatcatgctttttttaatgcaacagtataccatgggcatattccccacaggtagttggagccatatcatcggtgtacagactgcagagtattctgtagcatggtggaatatgataatttcatccattccccatggcctccctcacaatagagctcgtgcacctacagaacctcacagtgagaagtcaccacagcgcaccacactgtccctttccttatcccctttaaccctgccagattctcgtttgagacactgctaatgggccctcagggagccaagggtgggcagaatgaagtaacttaatgtgtgctgggtctgggcccccttgctgcctggtgactcagcccactcccagctgttctctcttttctttcctttgtgagtggggaatcccagggtgggcgtgggcataggatcctgccctaagtcctgatgtcccgtctggtccctacaggagttgacagagctgcagtcccagatctccgacacatctgtggtgctgtccatggacaacagtcgctccctggacctggacggcatcatcgctgaggtcaaggcgcagtatgaggagatggccaaatgcagccgggctgaggctgaagcctggtaccagaccaaggtgtgaggccaccaggggcgtatttcctcctgccagggtccttggtggcagcttcccttactcctcaacttgtctcaagccttcagggcctgggtcccactgttctggcaggcaccagtggtttaagt

SEQ ID NO: 9573 - DNA, 2300 bp, Homo sapien
atggatccagatacaaacccatccctccactaaggtcctaggcacagacctgttaccggggatctagactctaggaccctcctcccatgcacacacacacctcccccccacaaccactacctccacagaattcaagatgcagaggacctctccagggccccaggcctggctgaccatgagcctggcagacccagcaccaggaagggctgaggacggctggcatgaaagttggctgggccacccgaaactggaagctggggcagctgaacgtctgtggcctcctcacaaaaggaatgtgctctggcagctctgggcatggggggagggaggcaaacagcctttccacccccttagcagggcagccctccaaggcccaattgctggcagagcctgcatttccccgtggctcttctgggcttcctcaggagaatctttgggatcagccccagacctggaggccaaggctcaccctaggtaagcgtcctgctccttagagcagcaccccatcccaccatgtgccttctcagtctcctgcacaaaaggcttcctagtcaccagggagaccctgccttctctagtcccgtcttttcccctgcccagcctcatgaagccaggataccaggcacgtggatcactcaggcctcagaatgaggctgctttattggaagctattctgacatcactttccagactgtctcactgtcttgggaccaggcatgggaggcaggggtgggaatcttcttgtgattgtgggtggtggctggaggagtggagtggtgggaggcggctcagtcgcgggcactcctgcgactggcggatgcggtccggatggaataagccttcaggagcccaggacccgcactgctggagaagctcagggcattgctgcccatggttcccccgagggtcagcccaatgccaccgccactgctactgccaccagtggaattcatcacagctgggagagaaaagaggagggctctcttcagcgtgaggctccctaccagggaccccatcccttcactgcaccccaccctcctgccccagctgcccctctccctcacccctgcccccctccatgggccaacccagaaggagcatctgacaggggtagggctgctccccaggtgctcctggccccaccctgccctcttgtagtgcttcccaggccattgagcctggcagtatgtgctccaggggacctgtcaatccctgtagaaaggaaggagtctcctggcccctccagcagggccctgggccagtctgccattctctagacccagccccatctaaacagcacaagggatgcttcccatgggccgcagccaaggacttacagatattcacggctcccactccatctccagccaacctgggggcagaggacagacagtgaggacggctctttcctagcgtgggagggaagcgctctcagccctctctccttccaggccccaagcaggatcattgatttttccttcttgccccacacttccagcctgccttcagccttgtaaaaggagcgaggaggcatgcaggaagggagtgttcaccttggcccttctatccactggccacctgaccccaggcaatgtctcagggcctccatttcccacctatgccttgggcccaactacaggaccaaattcatgggcctgtgagggttaaatgacataatctgtctaaagccctgagcacctgggattcggtgaatggtagctgtatgtgttatttatgtagatggctgcctttcctcaccgtatcataaaatcctaaaggtgtctgtggcctattgatacttttatccccagtatgaggcctggagaagtcattgcttaatatatgtcaaaataattcgtgaatcgttgactgattgaatggggctccagccaggactaaggaaggagcagggagtgggggtggctttaagcagccagtggggctgaaacaggtcttgcagtagaaattaaaaatccattcgggacagctggctatgtttgttttgtgactcacagtcccattgtcaccaaggccttggccttggggatcagtttgctctgtgggggcagggaagacctcgctttggtggagggaatgaagggagcctcgctggcctctgcggccccaagcccaggaagcaggcagagcaaaggctgagggaaagagagaggtttgctgaaagcttccagggggcttgcttaaatggcccctgctggtgctgggagttgctggcacttgtgggtggggagagggagccaggttgcagtcaggcagcaactcgaagaatttctggtacgatg

SEQ ID NO: 9574 - DNA, 2300 bp, Homo sapien
agcccctgtttgagggctacatcgagactctgcggcgggaggccgagtgcgtggaggccgacagcgggaggctggcctcagagcttaaccacgtgcaggaggtgctggagggctacaagaagaagtgagtgcgggcaagagggatgctgggcacaggaatggggtttaggttaaatacactggattagacaataagaactcccaggtagggtgagtggccatgaccactagattgaccgagggtggcggggtcttttcctttgtggaatctttgcccagacacctgtgtaagaggagggctgtgactcccatgacctgtctctgtcccacttcagccttctctccctgaaccacatcacccagcagctctcccctgcgctgggtggggaggaagcctctgcagggtccaggccttctctcctgaccctcagcccctatacttgtagcacctgtcagatgtgagcccagggtctctcatgagtgacaggtcttgggctctgggtgtcccactgccttaggttctaagtcctgagggtctgcgggtccaggaggccccatacctgagctgggattgataccagtgaggggaggctagggctacaggccctgagagtccacgctgtccactcccaggatggggctgggggctgagtcctatttgcctcctgggggacctcagagcccctttgggaacaggactgggaggtcccagatgagcactctccatccccagttcaaagtggatagagaatcccagacacatcccacatccaactagaaagcactaagctaggctgccaggccggggctgtgtggaggtgtttctagtactgtccccatggctgtgatgaagtgtgatgtgatggtggctctgcagagacctgccctgccctgacctcccctctcttccctctgctctgtctcaggtatgaggaggaggtttctctgagagcaacagctgagaacgagtttgtggctctgaagaaggcaagtgacacaggattgagaagcacagatctgtgggatctcagaatgacagattcttcctggggacacacagggggtctcaacctcagcgtggggcacaatgacctttccacagcaggctaggactgcccagatgcaggcctttgtattgagcatccagggccttgacaaagggcaatgacttgggaatatctaccagcacctaccttgggcaaggggatggctgcactgtcctctgtgtgtcctgctctgttccagaggttgtggtctattgctgaggcccctggagccatagcagatacaatgtctctgctgagagacagtgcagtctgtctagcattttggggagtctgaccttgaggcagagacacaatcccagggtctaaggggggatggagaagaaccaggagcagccactgggctcttggagcacttgtgggggacaggaaagggtcagggtgtgagagctggggggtcagtctgggcaggcttcctggagcaggagatgagagaagggagagacaggagggcaaggaggggtgaaaggctggtgaggcatggtcaaggcaaacagggtttgtcatcagagggacagaggatgccagctcatcccaggaagggcagaaggggaggaaaggcatgggaatgggacaccagggactgctttcccctggctacatggaatggatgggcagagagaggagtctgggggctggatcaccagggtccttgagctccaacactccccacctttccaggatgtggactgcgcctacctccgcaagtcagacctggaggccaacgtggaggccctgatccaggagatcgacttcctgaggcggctgtatgaggaggtgcgggctcaggggccagacagaaacctggcagccagcagagaggagagttgggggtgggagtgttggacaggatgtgggtagaggttgcagtccctgaggctgtgtgagggggcagggttggggaccagagaaagcctgaggaggtggagtcaggacatggtgggtggggctgtattctcaactaaagtcactgccctcacctcctgcaggagatcctcattctccagtcgcacatctcagacacctccgtggttgtcaagctggacaacagccgggacctgaacatggactgcatcattgccgagattaaggcacagtatgacgacattgtcacccgcagccgggccgaggccgagtcctggtaccgcagcaaggtgagtggcacaggacacctgcctgctagacgtgtcagtgggagggatgtgagatatctattaaataggcttccttttctgg

SEQ ID NO: 9575 - DNA, 2300 bp, Homo sapien
atactccttcccagcccccaagtagcctcacatcgccgtgtgtccctaaatgacccctcatggttctaaccatcccaatccactctgactctgcccgtcttccttagatggactctctcacaccctaaattcacagatactcccctgtaaacaactttcactaccctcttgaacttatccaaagattaggaagtcaaggggttgtcacagcttataagtgagaaggcaatgcaactcctggctccatcacttaccagctgggagacttcgggcaagttatttaacctccctgacccttggtttcctcatcagtaaaatggggataatggcacatacttcatatgattgatgtgagaattagagatcatttacgatatataatgatgatcacatagtaggtgaccaattaaaaagaaacatattcttatcaaactaagatccatgtttctctacacagttctttctaattctaattctctatacagtttttcctaatacagggggaaatgtactgaagtgatccaacctccatctcctgggttcaagcaattctcctgccttagcctcccatgtagctgggaatacaggcacgtgccaccataacgggctaatttttgtatttgtagtagagacggggtttcaccatctctggtcttaaactcctccactgaggctggtcttgaactcctgacctcaggtgatccacccccctcagactcccaaagtgctgggattacaggtatgagccactgcgcccagctgtgattcaatttagcatcaccaatctgacattttatgcttcctggggtgatataataagagttacacagcatattttatgaagtattctgtcccaacaatgtttaatttaaacctaatccagcctctagcccagtgctgtccaacagaattttatgtgaaaataaacaataaataaaataaaaataaataataaagaagtgttctttatatgcactgtctaataaggtaggcactacttacaggtagctgctgaggactcaaaatgtggatagtgcaactgaataactagatttttaacttatttagtttttactaacttaaatttaagtagccacatctgcctattgtctaccaaattggacatcccagctcaagatttactttctaatttatagaaaatacaagggctagagccacaaattaaattatgtaaaatgtagttttaaaatccttaggacagttaggaaaattgaatctgagatgaatagtaagtggtgctttggaattattgttaattttcctgaataagaaaatagtactctccttattcttaagaaattcctgctgatgtatttaagggtgacatgccatgctttctgccactcaaataattgggcaactgtgaaagcaaatatggtataatgttaactgttgaatcggggtaaacaggtggagcatcaatgcatgtgtgttgtattattccaattttcctcaatatttgaaagctttcatcataaaaaagataaaagacaaatatttaataatctgctgactgttcccatggtaggaaaagtgagatggttttcagctgccaactgaaaaatctggagatggggaaatccagatttgtgtttcaggagcactttagccacagctgtgatggaaatgagagatggtatttattaatgcctcagcctttcctgaaacccctctccccacatcacacttaacacacaggtctcctcctcccagtttctcccagcacctggcctcccttctcttcccctcgccaggctctactcctccttctcgtcctctcctctgccttccccttccctccccaatgcctgcagatgaaggaatgccctgctggcaagacactttgaagatgaaacatgctgactcccccagagcccaagactgacatcttttacaaagaagagggtgcaggccactcccccattaaagcacattctggagaggcgttagacccggctaaccacccaagcccataaagcgcaaattgccccaacatcatcttcacagccaagccccttcagaatctgcgcataaatagggctgcggtgccctgaggagcacattggagtttccatcaggactccaggtcccctatcctgtcctctgcaacccaaacgtccaggaggatcatgacctgcggatcaggatttggtgggcgcgccttcagctgcatctcggcctgcgggccgcggcccggccgctgctgcatcaccgccgccccctaccgtggcatctcctgctaccgcggcctcaccgggggcttcggcagccacagcgtg

SEQ ID NO: 9576 - DNA, 2300 bp, Homo sapien
ttttgcccattttaaaatcagattatttggtttacttgctattgagttgtttgagttccttatatattgcagctacgaattccttgtcagttgaatagtttgcaaatatttcttccattctgtaggtcatttcttcaacttgttgattgtttcctttggtgtgcagaagttcttttagctcgatgtgatcccatttgcccattttttgctttggttgcctttggttttgaggtctcaatcaagaaatctttgtccaggtcaatgccctaagcatttcctcaatgttttcttctagtagtttcatagtctgaggtcttatatttaagtctttaatccattttaatttggtttttgtatacagtgagaaatagatatttcaacttttctgctgcaactataataagaaataattttacatggtgactgagtatgcacatacatatacataggccatacaactgaaacaaaaagggcatgtaacaagttattcccatgacataaggtgcaatctgctattttctggtctattctactctatttgattttctcataatcaatttcattaaaataaaattctggttggttcaattagtgggtcagaacatgaattctgaataaacactgcccctgagcccaccgcttcctaatgattgtaatgaagcccatctgctctgtgctctggagtccactgagcatgtacacatttctgtaactctaaggcagtagtaggagggaaagccttaacctatttcccaggagagtcaagtgccttcccctagatcacacaggggtactcagggcagagccttggttcctacccagcctttgtgagtttaagacccacactattcacactggatggatggcacatacaaatatagatctgttctctggcacctgccaagggtactgacaaacttctgtgcaggagtttcaaggagtatagtgcagaaagcagcagggactcaggggatgatggcaggggctggatgctctcctcatgtggctctatttgatctcatattctgagccagatactgtatagatgcataacagtggtgctcatcccagaccttctaggccctggaggttacacagaggcctgagaggacatccagacattcaatccttgtctagggccttgtgggaggtaattgtgctttcctggggccagtgggctagtgtgtgctcctgaggccgcatgggacactctgagggagggaatgcctcctctcagccgaggctggccaatatgacctaataaggtggcctgaggactagtctacatgctagttgaatgtgcaggtgaggacctgtgagtgtgtgtgtgtgtgtgagatggtgggtagaaaggccagcatgtgaaagcattgtgtgtgtgagtgtgtatgtgaaagagagagggggggttgtgagtaggaaggccagcatgtgagtgcattgtgtgtgagtttgtgtgtgtatgtgtgtgtgcaccagagagtgggagagagagagagaaaaaaacatgttgataggtatagataagggatttgggagtaggtgtggaggaactgggtccctgagaaggtgactaagttagagattctgtaaacgtgggtcttttggggtgcagaaacaggtcatctagttcggagaaaccaccaagcgccccccaagttccacatcaagggattccccctcccaacattcctggctagtcctatgagcaccgcggacagcggcattgaccatgtcaaaccccgcaggacagaaagagcagcagccccgccccttcccttccattccaacctgagtcactgcccactccttcgtccaacgtcagtttcctcaactgtgtattgggaggttgaggtgggtgtgcgggacgtgagttggtcctttgaagaagaaaactgcagtttagggcaagagatcataacatctggctgcttctgggcaccaattaagtacattaagtggggagcgacagcagctaaacaacccaagcccataaagccttctaattgctccgacccacgtggtcacagtctccccacttatataaaaggcctacagaggtgcaagtagtgaacgcctgacgccccgaccactgtgctctccattcggacgtctccatcctcagaacctcctctcttccccaaaaagcaccatgacttgtggatcttactgtggtggccgcgccttcagctgcatctcggcctgcgggccccggcccggccgctgctgcatcaccgccgccccctaccgtggcatctcctgctaccgcggcctcaccgggggcttcggcagccacagcg

SEQ ID NO: 9577 - DNA, 2300 bp, Homo sapien
aatttgctcaaggagacaattagtgaaagctggagagccagcaaagaaattatcactggatgctggagaaaaggcctgggggtaggggctgcttcttatggctgcagctgctgtgggctttagagttcttgctttttactggccaatctctgttatggttaataatgctttatgttaaactttctctgttcaaattattgtcttctgattggaccctgactgatacaccctggccaagcacgtcacttgaactcccagctggtggccagcaccaagtccagccatgtgagattttggccatattgggcctttcagacattctagccctccaaacaacatcatgtaaaatagaactcctcagtaaacccacagaatctgaggcatgataaagtattgctgttttaagcctctccatgtgggtgacttgctgtgtgtaatagatatctgaaacacctccctatggcccagtagatatcatcatcccgttctaaatgtgaaggaactaaagctcagtgaggcttagtgatttgcccacagttacagactagtaaatggctgaaccggcactcaaactcaaagggcattaacatagccctttcaaacacaatctcacatagggagctagaaggatcttaggaatactgtccaatctccccattccacagccaaggcagctgaagatcaggggatggaagcaatttgcccaaagtcacacatgtggcaaatggccatcaaggctcggaatgagaagcccagttctcctctcaacccaaggctcttcctccctgcacagtgcttctctcacataccttccttccattcttaccccgtctttttccccatgcactttcccctccaggaaggccctggggtgggggcggcgggtgatcaccttggttgagaacccctagaaaacatatggccacatctagagacatttttagttgtcacaagagggtggtggaggacccttggcatctagtggattgaggccagggatgctactaaacatcctaccaaatgcacgcgacagccctaaaacaaagaatgacccagctcacactgtcaatagtgctgaagttgataaatcctggtctagagaaacccatgaccccataagattccctggctccgtgagtcttctctcgttttccccaaggcctgggctgctcaagtacagatgggcagcacctactgtggtcatttttagctactgaaaaatagtggataaacaggtcctgaggcgctctggcaggagcccctatcacaggaaggccctggcattttcaagactctgagacactaggcttgattcgctacaatgagtttattggaaacacagagtgaaacaaagacaaaggagaaggcagcagagtcattagtttttcagaagctcttgagggcagccccggaagggagatgttctccccacacgcgtgggcctgtccctcgcagagtcatagaaccactatccagggtccgcgtctccattccacaggcaaaagcacatgggcagagtcccaggtcgtgcagacagggacattcccgggcctcccccgttcctccaagctttggggaagagctcaggcaagaccaatgtatacagcaaaaaaaacagaaggcaggcggaagaaaaagatgaatcctcgggacaacaaattgactaccaggaaaggctacagagagagaccatggcgcctcccggccctccccggactcctgcgaccggggatggctcccggagcggagcggtggggagggcgcttagagtgcaggcagcgggcggcggctattgggaggccggcgcgggcggcgcgttctggtggcgcgaggtactggctgggtggagagtgacggcgacaggcgctggcggaggcggcagcctcctagcacctcttacagctgccgccgcagacgccaacccgggcggagggggcgcaggcgttagtagtgcccaccaccacgttgctgttgctggggacgctactgactctggtggagacaacaggggcagtagtggaggcgcagagatcgccacagacaacgccaccgcgggagctgctgacgcctgcaggggaaagagacggaggcgcgcgtcaggcgcagccgcgacctgggtgagtggctttgctgcgagcccacgcgccctttgcccagaggctcccagacccgcccagcgggaggaggggacggaccccactacttacagacattcaccgagccgacgccctcgcacagcctgcagggagagaaggcgagaggtcagtgccgcggaaaaggcgccgggcccccgtgactga

SEQ ID NO: 9578 - DNA, 2300 bp, Homo sapien
ttcactgccctgcagtcctcagcatttcaccaagaaacagatcccccataatcattggatatgtgtggagagcattccaggtgctcactggttccagtgtgggtgggtgaagagcctggtctttcttggctgtctagcagatgtttgacccaaccaagactgaacatgacagcaccagccagcccagcctccctcaaagatgctcccaaaatcccactagccactcagctgcagtcagccacccccaggccccccaggtaccctcaggctgtgcctccctggtgtgtctttcacaccaggatcccctatcacacagcccacacccccagagttcctgccccagacacaagactctggaagcctgtccacaggacccaagaagagaggctaggagagtcctttttttggatccatggcagatgtccagctccctaagagatttcaacagcaccatcgcctgccctccctcaggcccacagaagatgggcccctcttccatcatccccagatccccactctgggatataactggcccactcatcctgagcgggagtgggaagggcaaaagatgagagtcacaggagggttactattagcccagagtgggtcagtgttgggttgtggctgggtcaggacacaggtccatcagtggagtcctcctcatcctctcctgacgaaagcagtccagagatgtgtgtttggaagggttgatgggctcaggtcctcgggttaaggcaaacctcctggctcggtccgactgtccatccatcaaagccattgcctgtcctaacccaaaggaacaagggcccaaagtaagagagcttggctttaggaacagccacatgagctagcacccttctctcacccagtgtgttctctgaggtgagagagtgatctcatttaaggaccctgctgatgtccctcacctcccgcaccttccctccttcctggtgagtacatacaccccaagaccccatcactgagcttccctgctgggaacctaaagaacaccaatcagcctggacattgtgagggccttccccccatctgtggcttctcatctttccccctagccaaatgttggctcccccacatgcatgctacctccaaacaccccaggtctctgtaggatttccagaacctagcacagtggctagtgcatagttggtgggcaccaaataagtatttcctgaataaatgaataaatgaataaatgaataaatgaatacacatagtctagtctgcaaatcagagccagactcttttctggtcatctctcaatcctgtactaccccaccccaatcctcctcaagcccaggtccccactctcctccatgagtccctggagctctgaggtattccacactccccgctcctgatcccatcagcaatgacacctggaactctgaagcatagccctggcactgtcctgaactctctgaatcagtttcttccatgtcccagatggtgtccctgcactaggaatacccaaagtgcaaagaacatgccctcctcccaccccaaatctctacccccactcccatccttgaccaggctctgagcaggaataggataggagcggccaatcttgacaatgaggaaaggaacccgcctttgagaaaaagacaggaaagcctacagcaagaggttgtctcagaggcagccccctccttgggacaggccagccactccaccccagggcttggccatgggtccagggcccatagcctagctctgcccctttcagaacagggttcagagagcaggctttaccccaggtcactgcacccattcccctcgcttggaccgcagaatgcaactaatgctttcaggaacccctctccccgctccacagcagtgccagtgggaggggcaggagcaaggaggaagcttataaagggctttgaagatgaaacagggcccgtggccagggattgttgatgcagccacactgaagaggcaagcagggttctagcttaagaggccagggtgatgccaagccaataaaattcagctattgtctctttgctccctcttttaacaccagctgcccctggcacataaaagggcctgccatcagccagggagcacaggcccttggttccatcctctgccatctactccactgttcagacacctcctaacctccgtcatgacctgtggcttcaactccataggctgtgggttccgccctggaaacttcagctgtgtctctgcctgcgggccccggccaagccgctgctgcatcaccgccgccccctaccgcggcatctcctgctaccgcggcctcaccgggggct

SEQ ID NO: 9579 - DNA, 2300 bp, Homo sapien
tcatctttaagaacctggaggagggcagaggcttacgggagttgtggagagaggcaggtgtttctgggctttcagtcccctctacctgccacgttcggaccccacccttctccaggaatccctcttggcccataccacaccagctccaggtctacatggcagtcagtcagtgaactcactgtccaaacatccctgtatcccagcaataggccccacactgagctcccccatacagcctcctctctctgtccccagactccacccaaaattgctatacaagtgaaatcagactaaaaaaaaaaacattaaaagcagtcttgaaagggtgaaggagtcataaatgtgcagaggaggtgaaggctgtggcagggcaaggaacagccctttctgctgggtgaggcaggtgggaatgtttctcgtggaaagcaacagtccctttcctttacacagagctttccctcacatatcatcctcttcaccctcccaacagcccgggaaggtaaggatgaatccacattacagttaaggaaacagaggctcagagagtttaagaacttcctccaaaaccatacagctaggaaggatccaaactggcccttgaaccaggtcttccagctttgattccattgcccgggttgccaaacgcagttgcttttccatggatgattatgatctgcatatgttctagggtcagctggtgagaccacctgctcttcccccaccagctgccaaggtctctctaccctgccctgaagaacaatgtggaatgtggaggtgaggtgggaatcgatcagcctgatcctgggtgaaggtcctgggtgaggtcagctggctgtggagattagagcagatgcaggacagagtacagggcatttcgtgaaggacttatgagaacagcagcatgatggcagtgtttggttatggaaggcttcctggaggaggagtcaccctctgaggaagctcatcggctcttcttccttaagttcctaacacttgggtgtctggctaaccttcctgggggcagacccacatccccaaggtttgtactccataaacattaaaagaatagcacttgttatcctaataagtgtcccaaggacacacagggaagcagaaactagaaggatggggctcccagaacccccaggagccagaagtcatagccaccttagacaagaataaaccactatcccacttccagctttgtgcaatgcagtctctaaacactcctctagggatgacaattcaagggctggccaacagaaggaatacctcttgtagctggtggtctgggaagggagactcacatgacctgtttcttcttaaagagcaaagcaaaggtgcccacagcaaatttatagcccccaggttatcccaaggttgagttctccaatccttttgaccgaatggaagaaagtggctagagggagtctccccataatccgcaagtagccattattgtggccactgagagttctgtggtttgcacttttgctgggtgagaagtgaaagctctggaccagcgccttctgggctggaatccagaaggttccaagagatcatctgccccagccttttatcctggcacgggcatggtcaaaatgaccgctctggtcctgaaccaccttccaagcaatgctgcctagatggggtgggattcgcctgacctattggcccctgaaatgcaatgatttacttgagaatgtgtcctctgtggaaccagatagatgaatgcaatgatcccccaagtctcacctaacccaggaccctccaacctctcccttgagacaatggctcctgcctgtatcccaaacccagccacccccaggctgttgtggagttcaaatccgtctccaagtgtgggttgaggccatctcacagaaagactgtgagaaaattaattacttaatgtatgtaaacgagctttgaagatgaaaagttcaaatgcagtctccttaataacatcttcaagacttcagggagccccagagtcgctgctgagctcacctttaagatgagtccgtggggagttgctggcaaactccccaagcccataaacaacataaaatggctttccactccttttatgcagccaaccccagctctccccaccaataaaaggaccagggaggatcagagagagcagaaggatcctgagcctcgcactctgccgcccgcaccaccttccgctgcctctcagactctgctcagcctcacacgatgtcgtgccgctcctacaggatcagctcaggatgcggggtcaccaggaacttcagctcctgctcagctgtggcccccaa

SEQ ID NO: 9580 - DNA, 2300 bp, Homo sapien
tgtggattcaaccaactgcagattgaaactcttaaaaaaattgcatctgtgctgaacaagtacggacttttttcttgtcaataaagtataacaactatttacatagcatttacattgtattaggtattataatccagtgatgatttcaagtatacagaaggatgtgtgtgggttacatgcaaatactacaccattgtatatcggaggctcgacgaacatccatggattttggtatccacaaggggtcctggaaccaactacctggggataccaagggacaactgtattaagtttgagatgcctatctgatatccaaatagagatgttggttaaaatatatgtgtggcgtttaggggtagggaggtctgggatagagttgtgccttggcagtcatgaatgaacagatggtatttaaagtcctgagtctgtataatatcaccaaggcaatgagtctaaagaagagaatagatacccaaggattgagccagggactctgcagtgtctagaggttggggatatgaggaggaactggcttagaagactgaaaagagtgtggcaagaaatcgagagagtgtagtgtccgaaaatcaaaagaagagcgtgtttcaagagaaagggcatggtcagctatgtgaagaaagtgagaactgaggacagaccattgaatttaacatggaggccactggtggtcttgacgagaagtatgcacttcttattgtttttctgcttcatttcccccttagacatacagctgatagctggaaaaagaaaataccgcacaaatgagctggatgcttctggtcaaaagcatacatccccttccaagtggaattgcaagcatcccaaagaatctcaagcgtccagtcaaacatgagttcccctgggcaaaggatgcactagaatagaaaaggtaaacaccagcctggctcagggtcctaaaagagctgcaatattgctaacaatgataatattcagctgctgagaacttttccttttctatccagatgtatattgctttgtgtctctctatcctaaccaaagattcatcaataattcaaggaacctaaatggacaggcccataaatcacacctatggtatatttgggggctaaaaatcatgtagttagctttctatacagaaactttccaatgctttggcctcaaatcatgccacaaagtgttgactgctggaaatcctcaagataaatgttctgctgggcatggtggtggatgcctgtagtcccagctatctgggaggcggaggcgggaggatcacttgagcccaggagttcaagaccagcctgggcaactagatcatgtctctaaaaaaaaaaaaaaaatttaagataaatcttcccctactaccatgaagatagagactgtctttgtaatctctgtaccctcagcagcaagcacactgctggatacatagcaggcactctaaaactgtagaatgaatgaatatctctgagtgtctcaaatcacagatgtgtctacactagcccaaatgagctttactgtagattcaactcttgtatactaaacagccatattggataaaacatggcagaaggttttttgatgatttaattgatttgcagaaatgcaacaaactgtattttctccatatcacttcttacttggagatgtgcacacactcccacctctttagggggttatatcttcatggatgcatcccatgtgagcctcttgctggagctgtcgccatcctaactttctggtggttagccacactcacagtgaaaaaacctattgcatttatgaccaaagcaaattaatgtccccttaatggcaattgtggtagacttatagggaaaaaaaagactataatgtttatatgtttatgtgtttttaatgtttattggtttgctgttacagccctcatcccaatgagactaggtgtgtctgagttaactcattgtcaaggaggttataggcatgcagagtttctgctaactacccaagctcataaatgcctgcaaatggattttttcatttttatggggccaagcctcagatcaccacacacataaaaggggtgcaagggttccactggcctcagagggactcccagctccagctcacccattctacacttgctcttttgctcccaaccaggaagccatcatgtcttgccgctcctaccgagtcagctctggtcaccgggtgggcaacttcagctcttgttcagcaatgacaccacagaacctgaatcgcttccgggccaactctgtctcctgttggagtgggcctggattccggggccttggcagctttgg

SEQ ID NO: 9581 - DNA, 2300 bp, Homo sapien
tttgaagagtcatcaacccccaagacacctgccaaaacgcattccaaaggcaggtagagattgtctactgcactgccaaagtgaagacggagttcactgctccagaagaaaatcacacccttctcaactgcctgctcccttatgccccctagttcctgaacccactttcataaaatgccgccaaactgtctaggtcttgactgagtcctgccctagctcacactcagagggcaaccctggactcggggggctcaggaaacaggtgcctccctcccacaatgaatccaaggaaccgccctgccctctgctcctgagctctggttctggactccaggagcccaacatgctcactgaggccctcctctggcctggacatggcggggagactctgctgtgtccactgctgcagtgacccctgccctccggtgcagctcactgtctccctcaccccctctagtgggaatctgctctctggtggggcctctgagtgtctccatcaacattcacaccatcctgggccccctctgtggactcagtccagggaagagtgtggtcttcttcccctgacaccctgcaattggaccccctcacccaaccttctgcctcccattgtggcctgtggtctcgccttgcacccctcctcctccactactctggggcccacagtcaggactatgaaaaaggggacagggagtgtgaaatgtcacaatgagactgagaatttctgaggctcaggaaacctttgagttccagtctcctaatccacaggttggaaggctgacggacagggacaacagaacatttatgggcagcagattcccaattcctcacctgggcttccctgctgtggagcagcatggcagggtgaagtcaaaaggaacaggatggactcccagctgatcagccacaagctgtgtgacttggggatgttgctcttaactgctgtgcttcccattttcctgtctgtggcatagtaactatctcattgtgtggtcagagaattaaatgagaccatggatgtaaagagtacggagtggtcccaacacacaataaatgcccaataaatgtttattattgttattattattattattggtttgattttgacctggtgataagtctcagtgtggaagggaaaggccattcggccatggcaaaagtttcactgatgaaattgatggaaaagaggaggaaagagagtgaggcgggggcttcagacatctccaaagagctgtgtctgcgacctgagctggaaagaaaacctgaatcccacctccacctgaaaattcccaagggcaacaactctccccagagacatcctcaggccaaagctggctctgttgacctcagggacactcaggctgggttgggcaaaaggggaaaggaacagccacatggaagccgagacctgatgctgaaatcatgccttctgggggccccagaagtgttgaggagagcgtcccttcctctgcccttctcaagcaccaggcctctcctcttgagttccctgcagcctttgtggactgatgggccctgtagaaaagtgtctatgcctggagtctgtctaccttcaagaccctcatgggacagtgggtcactgagccagagctcaggagggttaaggtccggcctgttgtagggaggattctcccaccccaaaagccttcctcctgggaacttcctgactcacctaggagcccacagagggcacttgggttgaggatctgcaaaaaagcctaggagcagccttggggaaagagccagagcatctttaagcatatgggacttgccctctaatcccagagaagccagggtgtataattcatggcacgcctcccctcctatgaaatgacgtagtcccaactctccctttccttgaggctgagccactggatacatggaacatatctgtctggttggcccctttcatcacccccacaatcaaggaaggaggacaaataggatttttatagggcccaccagcactgaccattggccccttctctttgctcttcgctaccctaattatccaccttgctacttagctctgccaatatcccaagctcataaacctagtttaatggtgatttggggtttgacacatctcagtcctccatccccctaccagataaaaggggggaagctgagcctgacttgatcatcctgccccggttctttcctccagggccgcatttctctgcctctctctcctgccatgtcgtaccactctttccagccaggctccaggtgtggcagtcagagtttcagctcatactcggctgtcatgccccggatggtca

SEQ ID NO: 9582 - DNA, 2300 bp, Homo sapien
tgaaggaactcctctgctcttcctggcctgtatcaacacaagctatgattcatatctttcctgtggaaactgagactcccaaataatctctagatgggggagaggcttacccccgggcctcagtcccaaggaggaaacagtttagagaacaaagaactaccgctccaagtgccaagctgccattccaggcaggtgagaacatctgccaaatggtcggttaccagtgtgcccctaaaaggacacctgtgtggaaagaccatggaatctggctctgcttcttgtgggtctgtctgactagttaaccattctgggctcaatgccctcatccacgaaatggagactgaatgctgattaattcctctcttactctcccaggcttcaaaaccacagcaagaagaaagcaggcagcaagataaaagaagattcaggccaggcgcggtggcttaagcccgtaatctcagtactttgggaggccaaagaggatggatgacttgagctcaagagttcaagactagcctgagcaaaatgtcgacacccagtttttacaaaatagtaaaaaaattagagaggcatggtggagcatgcctgtagtcccagctactcaggaagctgaggtgggatgatcacctgagcccaggaggtggcggttgcagtgagccgagattgagctgctgcactccagcctgggtgacagagtgagaccctgtctcaaggcagaaaaaaaaagaagattcagcaatgttttggtttgactcttcccatggtagagatggggcaatgagttgcagaacagagagatgaggtgccttgaagtcttctttgcggtttgtagactaatatagaatgtagggcacagtctacaaggttaacaggagaaacagggaaggaacgaatcctctgctaggtgcagctgttggagctcttttgatgaaggactggagagctaggaattcttggtcctcaggaggaggaggaaactgcctgggagacttctgggataggcagcctcaaatgcagcttggaggtgatgattcatggtacaccatcttgtacagttttatcttcccaacaggaccatgagcttgttgaagataaataatgtgcattgtgtttcttttgaattcccacaggactagtcacaggatggacatggttggcacttccttaatattacttgattgtatcagaaagaggggagcctcaatagacatttactcagcacttacatataccgggcattgcgaaagttttcacatgtgaatattcattacaaaccccattttacagacatgaaagttgaggcacagaaaagtttcatggcttgctcaaggtcccacaactatgagcaggtctgagattcaaacccgagtctttctcctctcacaacctctcttcccaggagacagagcactggctggccttgagagtcacattatattgcagtgggcagggcacaggcacacatacactccagaaaaccatgtgtgacctacacaatagacacggaagcttaagagcagaataaaggggcaatcaaaatggggtggattcctaaggaagatgattacagagcgcgaccttcaaggtttggaaagacagcttgatggggcttggggaaccaggcagtaggtgctgagaaaatgcttagggaataggaagcaccccaaggaaacagtgaagtgtagtggcttgtattaacacaagatgtttggacaggacggagttggtcccaggcctaagaaagcggtttagaaatgaggcagtgtttgctgagtcctttacaagatgcatcattagcacatgacggaaagcaattaacttgcttcttactcatatgctgatcaagttgcaactggaaaggagtttgcacgttgtggggagggggtgccagggaaccagccagtggcccttacaccatttcccgagggatgccgagtgtgagctcagggttggcggatgcccagggaatgccatcagaaggccctctccactagcagtgccccgcccccacaggatgctcataaaagccacgagaccagggctctccagccacctgtcttctccactgcctgtaccagcccacctcaggtgccttctcgccggccttcctcacccaccatgtctcggcagtcctccatcaccttccagtctggcagccgcaggggcttcagcaccacctcggccatcaccccggcagctggccgctcccgcttcagctctgtctctgtggcccgctctgcagcagggagtgggggcctgggaaggatcagcagtgctggggccagctttggaagccgcag

SEQ ID NO: 9583 - DNA, 2300 bp, Homo sapien
agtgagacaggtaaaagataaaatattcatttgtggagcacagaaaaggggtagagataacaacaaagtcctgcttagaaatgaaggtcaaattggccaggtgcggtggctcacgcctgtaatcccagcactttgggaggccaacgcgggtggatcacgaggtcaggagttcaagatcagcccggccaacatgctaaaaccccatctctcctaaaaatacaaaaattagccgggcatggtggcaggtacctgtagtcccagctacttgggaggctgaggcatgagaatcacttgaacctgggaggcggaggttgcagtgagccgagatcatgccattgcactccagcctgggtgacagagcaagactctgtgtaaaaaaaaaaaagaaaagaaaaaagaaatgaagcccaaattgaaagcggcataaggaggaaagacattggtaaacagacagtaatggacatttgggagaaatgtcctcgaataactgggaaaagcaaacagctatgaaaaagagactagagactgttaaaaagagaatcagaaaacatagatgtgggagacaaagcagacacaacacaatcacaattgaaaaagacaatatttttatgttttgtacatatgaatacatgaaatattttatatacataaaacacactcaaacacatacacacaaaacattcatgtatttatttatatacctttctacaatgcaggctccctctctatatatgccaactccctccacctcttcctcacccatacaaacacacgttgacacaaacacatatgcacagacatgtcacccatggcccaggaaaagcacaggaaaatatccaagtaaagatacaaggatacacaaggaactgctaacattacttcctccatagataggaattgggtaactggggaatggccttgagctatattattttgttgtttagcatgttttacaaaaaattttttaaaacatgtatcatgtattcaatttgtaaacatgtaaataattgtgcaaatagtactattcaaaatttaaatgggcaatctactacatttacttctagaatgtttaaatatagacagaatcttaataagcttctaattttaatatgaaatatgaaggttagagtctcatattaaaggaaacaataggggtatgcaattagaaaaatcccaagaatgaaaaagtacaatgaacagttaacctgttttatttaacaaataaaagtaagaaatgaagggagatttttaaatttcaatgatttaaaggatatatcactcaaatacaacgtttatagagcttattttgactctgattgggacaccaaaatataagaaatatatatcaaaaataggactgcttgaagactaaatagacacttgttcattttaattagtatgtaaatttttaagatataaaaatagtgttttgattttttaaaggacctattatttagatattaatattgaattattgattgaagacataatatgacttctggaatttcctttcaaacaatctagaatggaagaggaaatagggttgaagtatgaaagaaatcaggctggccatgagatgatcatcatggaagcaggtgacaggtatatacaggcccattgcagtgttctgcttctctacctgtttaaaattgcacctaaaaggtgaaacaattatggggaaattgtaatatttctgttaaggaattcacaatacagtgcctgtgatctccaacagcaaggctggaagaaagtcagactgggaagaggagggcactcagggcatgtcgataaacagcctagcatgcagaacctttgctgaagacagtgactaattccaacttcatgaattgagaatactcttattgtgctgagatctcaagtcaaagctggaggcaggaacattttgcctgactaaaggaagcgaaaaatgcaatctcggtatttcataacttttgtaataatgcaggtgtgatctcactatttgtaaagcccagcccttcccaacctgcaagctcaccttccaggactgggcccagcccatgctctccatatataagctgctactggagtccgattcctcgtcctgcttctcctccctctcgcctccagcctctcacactctcctaagccctctcatctcctggaaccatggccagcacatccaccaccatcaggagccacagcagcagccgccggggtttcagtgccaactcagccaggctccctggggtcagccgctctggcttcagcagcatctccgtgtcccgctccaggggcagtggtggcctgggtggcgcatg

SEQ ID NO: 9584 - DNA, 2300 bp, Homo sapien
ctaggggccttactctttacatataaaactccccctcctctctcaccctctgtcttctctctcatacacatacatatgcacacacacacacaaatacacaaatctcacatattccccagaaaaagctcagaaacatatccaagtaaagttactagaaggatacacaaggacctggtaacagtgcctacttccacataaaaagtttgcatggctggggaatggctttagtaagtattttctccttaaacatttattacatattcaatttataaacatataaatgaatgtgtaaataacaattttcaatttttttattttaattaatttatttttttgagacagaatgtcactctgtcacccaggctggagtgcagtggtgcaatctcggctcactgcaacctctgcctcccgggttcaagggatcctcccacctcagcctctggagtaggagctgggattacagacaagcactacaacaccagctaatttttgtatttttagtggagatggggtttcaccatgttggccaggctggtctaaaactcctgacttcaggtgattcgcccccctcggcctccaaaaagtgctgggattacaggcgtgagccactgcgcccggccaattttcagtatttaaataggcattctactacatccacatctggaaagtctaagtatatgagagtcttattaagcttcaagttttaatgatcagtttgcaggaaatatagaggacacagtagcatcttaaatgaaacactgtgagtaagcaatgaggaaatcccaaagactgaaacactactcaggacaattaacctggtcttatcaacaaaagaattgtaaacaataaggaaataaatgaaaaaggacattggagaattgaatagacacattgatgttaataaatacacaaattggctgggagcagtggctcatgcctgtaatcccagcacttttggaggctgagccaggtggatcacctgaggtcaggagttcgagaccagcctggccaacatggcgaaacaccatctctactaaaaatacaaaaaattagccgtgcttgatggtggccacctgtaatctcaaactactcaggaggctgaggtgagagaatctcttgaacctgggaggcggaggttgcagtgaacctagatcgcaccactggactccagcctgggtgacagagagagactctatctcaaaaaaaaaagaaaaaaaattacccttccccactgtcccctctacaccccctctctatgctcttttcttcctagtaaagcattactttctttctagctcagtgatgccactggatgtgatgtcttctatctccttttgtgttgtcatctttattagagtcaactccttgagggcgaagacttaataaatacatacatttttaaaatacaaaataatatttcagttatatttctaaaaggtctatcatttaaagattaatattgaattaatattgaattaaatcccaaatatttttgggatttaaaaaaatttaacattgataagggaaccgggtggaaatatacaagaaataagactggccataaggtaatcatcatggaaacaggtaataggtatatacaggcccattgtgttctgctcctctacatgtttgaaattgcacacagaaggaaaaataattacaggaaaaatgttaatatttctgttaaggcatttgcaatacagtgcttgtgatctccaacatctctgctggaagaaagtcaggctggaaagaggaaagcactcacagcatgttgataaacagcctagcatgcagaacctttgctgaagacagtgactaacttcaacttcatgaactgagaatgctcttactgtgctgaaatctcgagtcaaagctggaggcaggaacattttccctgactaaaggaagtgaaaaatgccatctcagcatttcataacttttctgatccaggtgtgatctcactatttgtaaagcccagcccttcccaacctgcaagctcaccttccaggactgggcccagcccatgctctctcataatatataagctactgctggagcccgattccttgtcctgcttctcctgcctctcgcctccagcctccaacgctcgccacagccctctcatctcctggaaccatggccagcacatccaccaccatcaggagccacagcagcagccgccggggtttcagtgccaactcagccaggctccctggggtcagccgctctggcttcagcagcatctccgtgtcccgctccaggggcagtggtggcctgggtggtgcatgtggaggagctgg

SEQ ID NO: 9585 - DNA, 2300 bp, Homo sapien
tgttcttgacgcttcttgtgggcctctacatacaaaatgtcttcatactttcctatgataatattagcttaccttcggtgagaaattatatgccagatgccttgctaagaccttcaattaattatctcactgaagcctcacaatagcactttgaggccggtgctatgttcactcccagtttacaggtgtaaaaacaaggcacaaagggtttaagaaagtgcagagggacacccaggtgcttggtcatgaacctgagccctctgtctccaaagtccatgctcttaaccaggggttggcaaatgttttctttaaagggacaaatagtgactattttaggctttgcagggcatacaatctctgttgtaactactcagctctgtctttgtagtgtgaaagcagccgtggacattggacattgacacagacataggacactgggtaaatgcatatagctcccacctgaattgccaacccttcttacccatcctagcatcattcatgccaagcctaaagcctctatcccaagagagtagagtgggtcggagcacataccagaaggaacacttctttcccagaactgggtggaagcacattcttggtcaaccattgtgcaaccagggtggagggaggggagctgcttccgttgtcttgagaaggtatctcgttcttgccagacgctgagttagcacctcctttagacagggaacaccctgttctcctggatgctgtgtccccccctccaaatgttggagaaatgggactgcttttaaaatagtaacaagagctttcctgaggctcttcttagcatgggagtttgttcttcctcctgcggttgctcatttatccataggttctcacagaacaatattgcccaggattgctctccattctcctcatgcacagtgcttaatgcatggactggagaagtgaagctcattcctctgtaaaccaagcacactcacctttgtcagcctgcccaccctcccagaaggtgtatatggatttgagatttcaagcactgagatcagaaattaaaatgtggaattgacatgttacatcatcacacttgtaagggcacaattttatgattcacagcttccatatgccccttgactttccctacacacccaattaaactgtctgactcttgattcttaagaaatgtcaaaatctgtgggaataaaaatccagtgaattccttaatgatttttatatcactcattttccgttgtttaaattaagctctatgtaaatgctccaaaacagcagggagaaggtgtctataaatttcaactggaaaggcagatttacatgagactaagctcaataggaaagcaagcactggagagagaggtgcagatatggaaagaaactcctggcagaagtcaggtctctgagcaccctgggcaatgtctgctcccttcattttaggtaaacggcatgtgggcaggtgatcacacagtacacagaacaaatgttgctcctacagtgtaaagactcaactcctctgtccctcttgcctgacaaaggagggttagatccccaaagcagaccccgttcctatgtccaggacacaagggaggacagccaggagctccagaagaactggtccaaatgcagtggaaaaaacacaacaggctacttcttgctcaggccatcgggcaaatgcccatacgccctcaggaaggatcccactcagagggtgaggctggtgcaagtggagtagaaaacctgtgtgggaagggggcacacagggagtgtctgatgaagaagaaggaggggacaattatcacagatcagctccttgtctcctttgtttgaggacatgactaactcatgacttcagtgaatgtatacccgggcttattgtgttaggatcaagtcaaggctggaaggcaggagaatttctctatgactaaaggaagccaaaaagcaatcttcatatttcatacctttctagaaactgggtgtgatctcactgttggtaaagcccagcccttcccaacctgcaagctcaccttccaggactgggcccagcccatgctctccatatataagctgctgccccgagcctgattcctagtcctgcttctcttccctctctcctccagcctctcacactctcctcagctctctcatctcctggaaccatggccagcacatccaccaccatcaggagccacagcagcagccgccggggtttcagtgccaactcagccaggctccctggggtcagccgctctggcttcagcagcgtctccgtgtcccgctccaggggcagtggtggcctgggtggtgca

SEQ ID NO: 9586 - DNA, 2300 bp, Homo sapien
cctggctccccaccaggagcggctccattatttatacctgtccaggtctggcattgagggaggggctgccctgcctgctcatgggaggattcccacgaagctcggatagaagagtgctgctgcttctcccatggagcacccacatgctccctgctcccatggagcaccacacactcaccgttggtccctggcacatggatctgagcttggcacactctagcaatcctcagactagccagaacgcattcctgctctgccaagtcctctttcttcacaacacagctgggaggagaatgaatggggagaagagaatgtcccagtgtctcaggaggggtggggcttccctgagggcagtgaggtctgtacccgggacctgtgagtgtatgtggtggtggggatataccccgatatcgatctttgagtggagcaggagcatcccactacgagtcctcagacacttgcttcaggcttggatctgttctgttctatcaggagccgagggtcccctggtatgtctcaggcctccaggacactcacatctgttctccagaaagcaaccaaatgtgaaaatggtgagctcagcacaattcatctctgagggtctcagaaatgctccagccagggaggccacccaaaccattttgctcaagacctgtaagaccggctccggccattggtctgtctgccgagattgacctgtcagctgcttgctcatcgcagccctctggtgagaagtcactgtttcagctgatcctcagcaccagggagtcattttcccactgccttggcttccttgtggccaaccgcaggccctggtgagagattcctgagcctgggtctggtcctgttcttctactcttgagaatatagcccctcctccctgaggctttgaagccatccccattgcattcctacctccagcctcgggccacagggcgcccccgaaactctgaacagcccaagcactgtcctgcctgagagccctgcttctatttgggggacggcagagaggtggccccactcagatctgctgccaaaaagagtgggtgtggtttagaacagacgtgtgttaaaacctcatcagaaaccccctttcctccacctggtgccacaaccccccagacaagttttgcagaggggatctcaaagggccctccctaaagcagctggcagattgtcatgccagctgcctgggcccacaggcctgctctggctagcctttctggcaggacaatccatagacttagaatcccgttttccattgccttggccctgaaggaggctgtgggctacagcatagagaaagcagagcaagtcccgctgcttggaacagggtggttcgccgttataacaggccgtcagactctcaacatgttcctgatgagattagaagctcctgcaggtatgtgtttgtggcggccttcagcctgtatcaacacatacgatgactcatttcttccctagtggaatagagcttgctggaacacacctggggggctggggaaccggcagagtagctacccccaaagagagacgctatagcccatgagtctcagggtttttttttaagggattgcatgggatccccgggtttcctaaaccccccacagagtcctgcccaggccaaagagcaaggaaaaggtcaaagggcagaaaaaatgctgagttaggaggagctatggaaggataaacctggccttaaagaggtcaaagtggtttatagggggcgctgagggcttcccacattctctggcctaaaccttgcaggcagatctgcccagtgggctctgggatagctgtgccttccctaagaaaaaaattgtgcagaaaaggatgaaactctattttccctctagcacataaccaagaatataaggctacagattgcctttcccagaggggaaaaccctgcagcaacctgctgcctggaaaagtgtaagagcagatcactggggaatcgtttgccccccgctgatggacagcttccccaagctggaagggcaggtgctcagcatgtaccgtactgggatggttgtcaatactcctggtcctgtaagagtccccaggacactggccatgccaatgccccctcagttcctggcatcctttttgggctgctcacagcccccagcctctatggtgaagacatacttgctagcagcgtcaccaacttgctgccaagagatcagtgctgcaaggcaaggttatttctaactgagcagagcctgccaggaagaaagcgtttgcaccccacaccactgtgcaggtgtgaccggtgagctcacagctgccccccaggc

SEQ ID NO: 9587 - DNA, 2300 bp, Homo sapien
aagagtggtggtcagagctcagtgcccagtgtcccttcatctgaggtctatgtgcccaggcatcccttttggtggggtttgggtttctgacaaacaactctgggacatatgttaaggtgctatctttagtttctatggcggaaccaaacatcccacgattccagctttcgtggctgttgttttgggctactgttatcttcttgcttgtcaggttgcttatttatttctccaggctagcaaggtgcccagaatttcccttgaaggaactcaagattgtcctttatttccatgcttgaggggacctgaaggcccctacgagggcgtccctgctccatctcagagtgcactaggtggtctctaatctggagaagactctgctagccttacaaagaaaaactaagatgacatgtgacatggcttcagaggatccccatgggagctgtcacagagttgcagccccaccagcacatgctaaggatgtgttcagagcggagggaggtaaggagagctcagacctggcctgtgtgggtgcaggaagacctcctggaggagagcaggatggggaagtgacagaacaagagatggcgaaaggctgagagggaaggatggagggaagatggatgggagggatgaggagggatggagagagaaggtgagaaagagagaaggcagggataggaaaattcgggtagtttcagtaagagcaaagaagacaaaatggcaggggcaagagtagaggaaggaatgcagaggattgggagggactggagtccaggctcttcccctaaacaatatgagagagagccccaaaccagcctgtctccagattttcttccctcctgtgccccacccagcaaagagctgctgttcacccatggggctccagcagggatctctgggcaagggtgatcttcagggacagagctgccttgggttgaatagggccacagtggcaatggcgatcatgggagtagctggggcccaacacaggagccagtggctaggaagcaggggctgcagccagagtctctggggctggcatcaaaggactgtttggagtagaatgacatcgtgcttactgggtcgcccccattgggtctttctggtctgagcctgcctggaggcttgcactcctggggagggctcagccagccttgttcttggctcacttgggcctggacagaggcaataggagttaagtttcatgttgataacagcttctttatttgaactctaaacagatgattactgtcctcaagttgttcctagtcttattagcagatacacattggaggagagacagaaatgaggaagtggaccacccaggaatctccataaccctccaggccatgggccagcctctgtctttgtcttctctgtacctccttccagtcaagtccctgaatttctcagccacctgccccaactccatcctccttttctcgtcctcattttctccagtgtttgaagcctccagcctgctttattatgggtgtttgaggggggagaagtgaggatagtgcccgtggttggctctggcctgggctgcttctgtcccatgctagcgagagggtcactccacctcctaataccccatgagtgagagcagctgccctctatgggttatgtttccaggaggcctggggagaggtaatgcctgatcagtccctttccaggaaggaggagaacagaagttggaggccccagtactctacccagtgtcctgaactatccaggaaagtccatcctgtcttcacctgctgcatccccaggaggaagccaacaacccagagaagattaatcaggatagggatggtgcagtgccagtgacatccccctggagaggccagggcctggggcaaattaccctataacagcaggttaattagataagacccaaattacatgagcaaagcttgcaagcccagcaatttgaaggtttcatgttgtttcagaggtggagagggcttgatctctagctcagcatagagaaaatgacttcttgctcccaggcaagccaaacccacgaattaagctcttgactgcccatccacaagccccagtgccaagcacatataaaggcacctgccagtcctcactacaaccagcagaaccttttgggattttgccttcctccctcctgcatctgagctttgtctccaccagcaacatgagccgccaattcacctgcaagtcgggagctgccgccaaggggggcttcagtggctgctcagctgtgctctcagggggcagctcatcctccttccgggcagggagcaaagggctcagtgggggctttg

SEQ ID NO: 9588 - DNA, 2300 bp, Homo sapien
aataagtgttaacactttctgttactaccatcactattatacaatgatgttactaccactattgctactactgccataaggaatacttccagccccactacctctgagccactactctgagccagcacctgtagtgggcgttgttgggaatataagcctggcttctggagatccccaaaaaccctaatcaagatgagccattcctcagtgcacctctgattcgtggttcataatgcttttctgtcattccagagctttggctctactttaagttctttgtgtagattcctctcattggtctgcaggcttcttggtggctggggccctaggacagtcacccccaggttaaggaactcacgccattttttgtcttgcacactccagcacaggagggcggcaaacccagcatctggcggcacccctgctgctgcccttgcaacctgacttagaaaaccacaagcaaccccttcgattacatgctcctgtgctgtagggctaggccctgccgggaaagccccccgagacagggtccctggggaaggaccttccaccgttacctcaggggctgagaggaaaacaccctgtgaaggggaaattcttccggggcagcttccaggcctaagctccacgctccctgcccaggtcagcttctccttttccctccccagcagtgggagcagttgtcttctgccctcggctggatccaaacaagccaagtgttctcagtttagttataggaagtggtcagagtcttgcatgagggcagctgccagatacctagctttgaaataattttttttgttttttggagacagagtcttgctctgttgcccaggctggagtgcagtggcacaatctaggctcactgcaacctctgcctcccaggttcaagtgattcttctacttcagtcttttgagtagctgcgactacaggcatgcaccactgcgctcggctgatttttgtatttttagtagaggcggggtttcaccatgttagccaggctggactcaaactcctgacctcaggcaatctgccctccttggcctcccaaagtgctgggattacaggtgtgagccaccatgcccagccctgaaataattttttaacattgcactgtacccacactacctgagctataaagcagtgatacttcctgtttgaaaattgagtgctccctgaagttgccaggaaactggcagaacagcccaccctgaacctgggagtgaaactcagggggtcctgttccttggtgacttcagccatagggtgtttccccagggagtgcaggggctaatatcccagctcctgcctgacttcctagagtaggacaaataatcttatccaggagagaaaatccaactggaggaaatgcagctgactggaaaggttctcatggttgtaaggcaatgtcaaggtcaccaccacccaggccctgcccaacacagaaggccctagacaatatccctgctaggggggcatgcagatgctgcagagtcattcctcttccttcctggggtccacttcactgctagacagctgtggtccttagcatggcccaaggacggaccctggagcttcttacccagatccagatctttgaggacatctttccaagaagaatcatctttccatgtcttcttttccctgaggtaaaaattccagcttccacacaagaccctataatagagagatggtttcttttgggaagaaacctggggtttttcaggtgagtctactctggggaaagccaggcatttcccctgctccttgctgatggttaagcaagaaggaggtagcactggaaaaataaagctaggagatctcttcaggggataactcttcaggtccttaattagggagcacagataaactccaaattagaccactccactctgcaagggcagcatattccacttgctatcagaagagctttgttgctgcaaagggcttggagatctctgttctacaaattgcccatggcccctggcccatcagcaggggaaaggagatagtggagagacgcccttttccggtgtcctgggctcaacagggataaaaggaggcagcactctgggtgccccatcagtgtgttctctaccccttggagactgcttttctccagctctgtcaactcaacctttcccaccatgagtcggcaactgaacatcaagtccagtggtgacaagggcaacttcagtgtgcattcggcagtggtgccaaggaaggctgtgggtagcctggcttcttactgtgcagctggcagaggggctggcgctggctttggcagtcggagcctcta

SEQ ID NO: 9589 - DNA, 2300 bp, Homo sapien
tggtcaccaaggcctgaggtgacaccgtaagctgctgtcagaggcagaggcaatgagaacccctcctcccaggcctcaaccccctttgatctgctgacatccccacacatctgaggcctttgaaatctgcatgtgtcacttgtgtctcctcatgatctgtaataaaggtgattcaggggttgaggaattccttattcatccagccagtcaacccctcataggaagatgagaaaaggtcatcttacagttccctaaccctgggcagaagagccctggtcccaggatatctcaactccttagaaaatttctaggaagaaaaaaaaaattatttcaaagacaccctttgtcagtcaatcctacgtaaaaattctcctctttcagtgtaatccattccttgcttttctattctcaatggctggaataaataaattcatttttgtgcttgtggaaaaaaaactggctaaaattacggggtagagggaaaatctcatgtaataataaaaaacataaccttgatcttcttgaagggtctgctgtcacccagccacactgacactgcccttctcctcttcagagggaagggactacagcccctcctctgaggcagcactgagagcccaccctctctcccacctaggacacccagatgccgttatctgttcatctgtgatcggtgccatctccagcgcttaacaatgccctcacaactttgttccccgtggagtaaacgcttcggctgttattatgtcctgtcattggcccagtggaggctatgtcagccaattacccccaggtaccatttaaccaacccatgaggtccccaaggggaacccagccttcagggtatcactgaaggtgcagtaacaagccttgccctaagcactctgctgtttcacaatcatcctaaatgtccctttggccaaggcctgggctgagcactgggggagcagaggagggaagggtgaatccagggggccctgtcaatctgatagaggaaatggaacacacacccaggactctggcagcttaagaaataagagcaatgaaataatcccacctgcatgccagaggaacaggagagctgttgctaagagaggaggagacttgaaggcagcttaagtttgagaaaaggaaatcgggttaggtggaagaaggagcctctgtagcttaaagggaatgaagttctagaatctagttcttggttttagatctgaagagtcttgacctcttcctaataactgatcacattttgatgctgaatcagaaatgactgggtggcaaatgacctgagcagaggtttgctggatgggataaataagcctcttctgctattaaaagaaaacaaaaatgaaaacaaccgaaagccttaggaaacaccatctgctaaaccatgcctgagtcttcctgtaccacctccccaggccttcttccctccctcccagatagcatggtccccattcttagtccagaaatgcttagtggagaaatcttttcgctctggtccaaagtcaaccctcaacacttgtgaccagaggtctctgtgtcctgccttctccaacagactgagaggtctctgcagacggggccaaaatctcctccttctgaacttccttcttgcacaagggacagagctgtcctcatccagaagcctgggaggcaggaggaggacaggctaaggatgattttctgcgatagtcttgactctattcatggccttctgaagcagaagcagcctggacttctgcttcacacacctccgtctccccagacacacacccagagggtcagccccactggaagtttccaggggtgatcttgggagtgataaccccagtaattggaggccagcaggtggagataaggtcgctaagccatgataatgcaggaggtgagccaagtaaatgctgggttctgggtcactttacagggattcatggggagttcacggtggaacagacaaaaatctcggtgagtgcatggtaatttcctacatgaagaacccaagaggcctcaagggatctaaaaggtgttgtcgacatacaaattaggctgactccagccagccaggctatttaaggggcgagctgggccgagaacgcagcggctgtttgcgccccttctgcctcccgcgcggccagcaccggtacttgcgagccatgagccgccaactgacccatttcccccgcggggagcgcctgggcttcagcggttgctccgcggtcctctctggcgggatcggcagcagctccgcctcattccgggcccgggtcaagggctcggcctcctttggcagcaagagc

SEQ ID NO: 9590 - DNA, 2300 bp, Homo sapien
gagccagtattgctctaacatgagagagttcctgcaggtctatcagtagatctgaaaacttgtgtacccagggagcacatggccaaatagttactgagacagggtatgaaagagcagcacaggcagattggggttacccttgagagacagccttcctctgcacagggacatgcaggcagagaaaaggccaagtcttcttccagaaggggaggctgagttaaaaggcctctttggatggaggcagaaagatgggctccagctctcaaatcctgattcaacattaacaaagactgaggcagagaggtcaaggagaaggaggagaggtccacagcaaagcaaagcaagaaggagatgaggacaaatgagacagaggaatttcctagaagagtccggagcagtctgccagggcaaggcagactactgggaaatgggctgtgttgcacttttatctcatggtttttttggtgggtgagcttagagctaaggtctttccctgggagtccctgaattcacttgcactccccagcctggtcctggcttccccacgggggctacagttcccactgccagtgacacagcccccaggcagcatgctgtagcccccgctgacagagctgggccagtagccgtaggtgccagcattgctgaatccaaagccagcccctgtgcctgccatcccggccatggagctgttgatgaccgctgcagaggagggagggacgagtgatcagtgtatatcccaggacagaggtggccttaagtccccctccaacctcccagccccactagcttaaatacctccttcttaagcaaacacttcccatcaaccatgaacttgggttcatttgagcaactcaagcgcgggaagaatagccccagtcctgcaagactcccaagtcagtcaccttgtcattctatgaacaaacaggagtagcaagggctttccccaggggacagatgatgcttgagcatcagataagccagcaggttcttgcatttagctttacaataccttctgagtatttttcaaaagaatttcctgattgttaaaattagggagtttctgctggtcccactataagaaagagactgccaaaccctgtggggccagcattaaactggcttgcacagtggtccacacaccagtctccactcccattgaggaggcaccactctgtgctcagtttccttcatgcaggagagccggtgtgggggtgacagaagaggggaggggctgagagtttcaccacagcaggcaggagattgctatgaaagaggctagtgtgcagtatcagaatgtcctgggcactagctccacctggaagaagtagctctgaatggggaggccgcaggtctcagcaaggaaggtgagtatgtgaccaagtggtcaacaggcagagccaagctcttcctcagggggctgggcggtggacacccacccactttgtgtttgttgatggactaaaagtattccctcagagtcatgaaatactcacaaatgctcacggagttggtatattctccggacatcctgcaagagagaaaagcacaggagagtctgaatcacgtggactcccatagtggccctcactgcctaaacacaggctggggatccccagccagaccagctcagccttcacgcaccccacacttgccagatggcactggctgcccttgcatgtctctaagccctccctctcgctcctcaatctactcttcccactgcagagatgtggaacctgcaactttggaacccccaacaacattaccacccccaaggtccctcctgcagggtttctcttgaacccatttctttactactgtgagcagctgtctgaataaatacatatgtggaaagatcaggatcaggagttgctactaatgaacgaactgtatgattttggggcaagtgacttctctccaggtctcagttataaaatggtgcttggttagaacagggtttttcaaatgttcatgcttcgtgtgccacccttctgactgttgctaggaccatgtttgacttgtactgttagatatttagtatttttaattgactctgccttttacgacaaaagtgcatttcttttaaaaagaagttttttatcaccagggtaaatagaaaccagtattattacctaaccaaataagaaaaaaagtagcagtaaaaataaatataatgaaaagaaaacaatttaaaacttttgggctaaataatgctattattttcccagagatgctgcacctgagatctactgtctctttatcaataggggatatttgtaagtgtctgagaggtgttt

SEQ ID NO: 9591 - DNA, 2300 bp, Homo sapien
cacatccacgccatactgcagagttggcattcacagcataaatgccattgggggttatctcagggcctgtgacatgcagcaatttgtagttttgctgagatgcaggcctgaatcacctccaccccagtgctggtgtgctgaaatgagccaattagggagtgattctggctggaatactaagcattctcatcacaatgcagttttgttggtcttctttgtgccttacaaagaaacttacaaaggaatagaaactttgggtcaggtgcggtggctcacgcctgtaatcccagcacttcgagagactgaggcgggcagatcacctgaggttgggagaccgagaccagcctgaccaatatggagaaaccccatttctactagaaatacaaaattagccgggcgtggtgttgcatcccagctactcaggaggctgaggcaggagaatcccttgaacccaggaagtggaggttgcgatgagccgagatcatgctattgcactccagcctgggcaagaagagtgaaacgccatctcaaaaaaaaaaaaaaaaaaaaagaaaaaaaggaatagaacttcatgttagctaaaaaagattaaaggacttccaagtggcattgcctttagtgaaattgaagacatcaaagaaaatgattattcttaactagaaaacaaccatattgtataaaacagaggggaggttgaatttggcaattgcttagtacaacaattttagaggcatatcataacctctatacagaaatagaaaagaaggatgggccaactgttcattcaagtactccagctagtgaaatacttgtgtttttatggaggaaattctatactatggatatatttgggatttgggatttgggaaactcttgggtcacatactttggcaatgtcaaggatccatgaaattcaaatgtcttcccctacctccccatctccaaaattgtgagctaggtttggtcttcataattcgggacccaagagcctagcacagtacctgggagagagtcagccctcaagagaagtctgttaaacgaatggataaatgaatgaacaagtagatggctggctggctggttggacggatagatggacgaatgaataaggcgggcatagctctgaatgtggagtcagaagaccagccaagggagtcctcaaggctggggcctgtgctttttgggggcattttcattctctgggattcacacaaagaaaggactcactaaatgtttgctaaaggaatgacatcctcaattatctgaaccttggtttccccatttgtgtaatgtggatcatcaccattcccctccatgcagactaagtggattaaatgagcttcttgtgtgaggagctctgttacactgtaaagtgctgcaccagtgtcagccatcgtgaatggtgcaatgaccataatttcaaggtcaagagtcagggtagtgggatggtaaagggaaaaagaagtcagtgtgtgcaaaggaaggtgagcagggcagcccggctggcacagaggagcaggagagctgcctgggagggcacagcagggggctggcagccagaggctggtcctggattcccagtgtgctcctctcctatggccctggccagccatcaaacctgtctccaggaactctgggaagccaggcagcagcagcctcttcttaaccacataaaagcagctcagccagggtccctgaagcagcccatctgatgctggcatggttgtgagatttctaacagatgacactgtcaattaaaggtctcccctctgtacccctacaatcccaggccccaccactccctggggaacagcaattgagactgcgacaaacctcccacctaagatctttctatggataatgtgcccatgctaattacacatgttcattagataaaactcaaattacatgagcaagacttgcaagactagcactttgggagttttcaagtcatttacctggtgtctgattttgctgggagaaaatgatttcttgcttccaggcaaactgaacccacaaattaggcccatggctccctcttgagtcctataaagtgggagcccaggatcacaggctggtgaactgcatctcagctaagggtcagcatcttatccccactttctggcctccccaccatgagccgccaattcacctacaagtcgggagctgctgccaaggggggcttcagcggctgctccgctgtgctctcagggggcagctcatcctcctaccgagcagggggcaaagggctcagtggaggcttcagcagtcggagcctttacagcctggggggtgcccgg

SEQ ID NO: 9592 - DNA, 2300 bp, Homo sapien
taaaaatatagaaataaaatgttacataatattcaaattgcattaattctagtctccacatttcaaaagagtaggaggactctttcaacttgactttcaaaaattggtgaatgggtctagaaggagaagatgttcagtggagagagtggggagggagaccagggtgtgagggcagaattaaaatgcagtaaaacatgcagattgggtgcctagcacaaatctggctcaatttccttcatagaggcattaagacccccctgaagctgccatagtgtgagcacagtcatggtggagtaagggacgactagggcattgctcagatatctgtagataatgacacattttgctttggattgagactgtctccaaagctgttagcttcatgatttgtttgcatgattataattatgcaaaccagattggaaaaaataattgaggagacatgtagctttgtttccttcagcattcttttactgcaaattaaataccttgaatagtagttaagacaggattggaaacttggcggggaagatgcagaagggtgaatagcatttattgagtttctgctatgaactaggaactgtgtttagcacatgtgtgtattgttctgttttcacagtagccatattcttattattcttgttcactttttatagatgaggaaactgaggcttgaagaggattatggattatctgaggtcatttaactaagatacaagaaaattgggatttgacctcaaacttatgttttttacattattttgtgataacttggtactaggatctgaaccacctggttctgtaatttatgatgcctgtggagagtgcatgttcatagtagccagaagacagtaacatggcaagggggaaaggaaaaggaattatctttgtctcaccccaaacaataatgatactgacattttattgtgcacggtggttttcaaaacacttcatacgaatttcccattttatagctgggaccacagagcctcagggtttcattcaaggcctcacagccaataaatagcaaaactgggactcaaacccagaatttctgactaaattcagttttattactccaagaacctctcccacatagttggccacatggacagaggaagtggttgagtttaagtgtgagtgctctgtgcaggctggatggtcttcttatcctcaagcatctgtggatgtcattgaagagcctgacttcctaatcacttcccaggatcaccaggcaatacgtgattactgactgactgaatcaatatacacttggatcttggtttgcaaactttcacttggtgtcccgcatcacacaggtccagaaacagcgaaacttttctcatacctctcaacctctgggtgttcatgtagacaagggacagttgatggttatacaaaccatcatggttataaaaaatctctattcggtgcctagttattgtgtatttttggtgtggcatgggaagaaaagagccaagatattttgaaaatcgacacctcttttgcagtatccgaggccaattactttctgtaagaggaggtcgatttccaattagcatttaaggtcatttaagacctttgcagtctcccctgcactagttggggctctttctgggaaagagggaaactacaagagaactacaaggctggcattgaggggctcttgcagtctctaaacccaccatccctttcattgttgaactggggtggtgagcctgcacaagcatgggtggtagctgacttcccttgggcaggtccagaacagggagcagcattctgcagaaggtccttttccagattgagaaacccaaaccctgatctcctcttttgatgattttacaaaaatcaaattgcatgacagatgcccagataaacagaagtttgcaatcaaagcaagttctgggatggagctgattagtagatttttaatggctattagcttgataatcacgcaccaggaatagctcccaggcagaccaaacccacgtataagtggatccacacccatgtacacaacacctagttggcaggtatataaggggaccctgaaagcctcccagcagcacagttgagtctccagccttgactcttctcaagagcctgtgactttcctccctggacaaaggcatcatgagttgtcagatctcttgcaaatctcgaggaagaggaggaggtggaggaggattccggggcttcagcagcggctcagctgtggtgtctggtggaagccggagatcaacttccagcttctcctgcttgagccgccatggtggtggtggcgggggcttcggtggagg

SEQ ID NO: 9593 - DNA, 2300 bp, Homo sapien
acagtcattaccatgccaagactgtcccagtctccattgttcctaacaagacctgaattactcattccctaaagagatggttggtttagcagccgaaggattttagtgctaggacagagtcccagacagcagtgccacagtgatggcgagggagaggagtagcaggggagcggtgaggggcactttctggaggagggtatagggcaaaaactgggaggagaagagggacaaggttcaatagcggagtgcaatggagaggaccgacacagccagcccgattcagagccacagagtaatgggaccagatgatcttcacagactccctttctcccatagatcttgcacaccatagtggagacttcccatgtacatctatggtttgccacttacagagttacttggagccagctgaagttagagctggcttctcccctttgagtcttcaattctgtgtttatgtgcaggcccggggaccatgccaggcttctaagaagtcttcgaatgaaagtctgcttgggcttctagtgtgtccagatctcagtgccactattatccactgatattgatcaagtgctgctctccaggaagacccctgaggtttcctggtccattgcaatgcatgctgggtactcttgcacttggatggaagtaaaatctcctcactaaactctgtgccaccaaaatctccttctcagtgtgaattgaagaaacattttccaagacttgcatgtgccaggagccaaggactcagagtgataaaacaggccttctgccctcagagctctctgtggtggggcgcttcctgtgctgtctggctttacacacagcaggcagaatgacttgaattcggctgctgtgctgtcgtacaacatgctgtttaggatcttgcacatgatagctaggtattcttgcttcaaatcgcaggcaccccacttaccaactgtgtagacttgatcacgttattcaacccctgtgtctctgcttcctcattttacaaatggggagaaaaatagcatctatctcaaagttgtgaaaattaagcaagttaatacatatgtgctacgtagaacagtgcctggtacatggtcagtttttgatacatgttaggtattatcattattatcacctccagaaacaatttaaacttctcatataaggctctccagacacctctcattgtcttcccttccaaatctgcatttatctctctctctttgcagtccagtgtgaggcttgaatcacctatcaagcctcacctccacccctgtgctttacaaaatgtcctagagcttctatttactcgtctcactgctctgtgggctttttcactcaagggcgtttgcatgctatccattgctacctgttttctattgctggtgtctgtctcctgctctatctttgaagaaaagaaacaagaaaaggaataactgagaaacagagaaaaaaaatgtctctcccttctggttcttccagaccacccactcatccatcttgttcaatgacagcttctcttcctttaattaatcactgtggtatatttataaagcttatatttatgaaagaccttttaattttttagttattaaagccctttctctttgtcaggttgtaactgagtgagctctggagtttggaaagaagatcttagaaatgggccagagagctccttctgagatccaagcacggggaattgcacctgctgtgcatggtaagagagtgtgcttggtagctcacaaaggcaaggtgagaatagaaactttcatgcctttttgatgggggttatgaaatcctaccaagaaacaccaggtatcagatgtggggtcctgttttcccaaagccacaaatgcttgaaggaagatcttgtgtgataaaataattaccacatgaaccaatcttgcatgcacagcaattttgagagcccatcctgggagctaggtgtgtagtgtttatcgtattgttgaggctcgtaaaaatcttgtatggctgcaggcaagccaaacccttgacaggcactgcatctccgctgactctagaagaccaagcccaatttcttccctgtatataaggggaagtctctatgcttggggtagaggagtgtttagctccttcccttactctaccttgctcctacttttctctaagtcaacatgagtcgacagtttagttccaggtctgggtaccgaagtggagggggcttcagctctggctctgctgggatcatcaactaccagcgcaggaccaccagcagctccacacgccgcagtggaggaggtggtgggagattttcaagctgtggtggt

SEQ ID NO: 9594 - DNA, 2300 bp, Homo sapien
gggcacagtagctcacgcctgtaatcccagcactttgggaggctgaggcaggtggatcacctgaggtcaggagttctagaccaggctggccaatatggtgaaaccctgtctttattaaaaatacaaaaaattagccaggcgtggtggtaggcacctgcaatcccagttactcaggaggctgagacaggagaatcgcttgaacccaggaggcagaggttgcagcgagccaagattgtgccactgcactccagccagggcaacagtgcaagactctgtctcaaaaaaataagcaaacaaacaaaagaacctaggaaaactcctcccacagtctctaaataaatcaactcactttctagttactcacaaagtctgtcttatctgcatttttttttttttttttgagagagggtctcattctcttgcccaggctggagtgcagtggcacgataagggctcactgcagccttgacctcccaggctcaagtgatcctcctacctcagcccccctgacccgtgggagctgggactacaggagtgtgctaccacacctggttaattttttgtattttcagtagagatggggtttcgccatattggccaggctggttttgaactcctgggctcaagtgatctgcttgccttggcctcccacagtgctgggattacaggagtgagctattgcacccggccttctgcattcttaattcttatgagttcacagcgcagactccatcatgtagtctgccctttccctttaatatggtacatagtatcacaagtggttgccggttctgctgcagagtctccaacaagatgatttaaaataattgtatccaattgggcaagccatcgcttagccatttttctaaggctggagagtttttccccaagttaaaaaaattattattacattttggatgaaagccacagctatttgagtccagagggaaaacgcacatttttttgttggcggacactgatgctcactgaatgagcttttccccaggatgctgtctgggacgtgcttctcagagggtgagcacagattagtgctggtctaccgtgctttgctattgccttgtggtaagcacagaatttgagagtaaccatttagaaaattattattattgttgctatttttagcagttaaacaatgttttgtttgctgaatctaaaaataaaaaaaatttgggcttgcattttgtatatcttttttaaaaaattatctttaggaggtaattcctttaattctattttacaaaagtattgtctataaagaaccggaaatgataaaacagaaagagagatagttagggatggtttgtcttctggtctagaagacaatattaggtactggtagatgctcaacaaatctataaccacagacttttggtgctgaagtaccttgtgtggttttgtgtttgagaagtctgaggcttatcaagcagcacacaatgtgaatgaccttgggcagaatctgtgggcctccacttgtactcagtgaccacaatattgcacttccatgtgataaaattttgggtgctcatggtgatgataactgcagggagcagaagcagtgtgtggggagattggaacaaaacttttgccccaccaggacgatgctgtgacagaaagtgtttccacctctgtcccagctatggtcctgaggtctctaaacaccatctaactttgccccagatctcccaggcacatcccagaaacaaacaactcgatggtggagtttcttaggaagagatgaactgatgatttggggagaatctgtatagaagtttccagcaatgagatcctgagagattcttgcattctgatctctaaatggcaagagatgaatgataaatgatcgagttggggaagtttgtctgcaatctgatttctgcaactcacaggtgtgaggttttaaacagatgttgctggcaggcaaactaaacattaatactcccctttcaggattgtaaaggtgcccagcccagtaatgtgtgtgtgtgtgtatatatatagagccggagccagatcttttcaaaggagtcagagctcctttcctctctggtctctgcctccttcctgccaggctctttctcttgcctgcttctctggatgctccagcaaacatgagccaccaatttagttctcagtccgcgtttagttcaatgagcaggcgggtttatagtaccagctcttctgcaggctctggtggtgggagtccggcagtgggttctgtgtgttatgctcgagggaggtgtggtggtggtggatatgggatccatggaagggggtttggc

SEQ ID NO: 9595 - DNA, 2300 bp, Homo sapien
cccaagttgggtttctaattcttcactcctattcagcctcctttcctcacctttggtgagcttcttagggatgcaaagttgtcttgagaacagccagggccaaacatgttattgcttctccattcccccaaatagagtactggcaagtagctaaacatatagtgcttgctatgtgtcaagcactgggctaagcattttatatttacttaacttgtttaatgctcacaacaaccccataaagtacttgccattcttagccccattttacaattgataaagcagacacataaaagttaagtaacttgtccaaggcctaaaagttggtggatagtggatctgggatctgacgccagataagctgcagagcagagagctgagaattagctgcaaagctcttgaagtcactcaactcaaggtggttccaaggttctcagaccaattctctcccctagactggactgttcagaaaccagaaactcagaaagacagagcgcccactgccagtttggctggaattctggagatagaccccccaccaatttctcagggagtctagaatcagtgccacctgctcctgtcatatgtgtgaaatctcctatgcagacgacaacctgaggatttggtcttgccctgtgtggtgtgtttgggtgcggaggtgggttggatggggtttggggtctgctgagctcttggcagtgacagcagtaactcatcatgtgtcattcgttctgccatcaggggtcctccatcctcctattcctggcccatatggtgtagccatggtctagaccagggtttcccagactttccgcattataagaatgacctggagggcttgttaaaaatgcaaactctcaaccctttcctctgaagattttcattcatagggctggggtgggagctggttttaggtatttgcattcttagacatcagtcatcagtcagttaacacgtttgtgctgtgcttaccctatgctaggagctggacatttaggataatttagaatgggcaggactcaagccttgccctcaagaagctcagggaccggaggggtatggacaagtaagcaggtaagtatactttatgtcaggttcacgatgggaaaagtacagggtatggtgggaagacaaggaggggcatctgacccagaccagggggtaaagcagggaggggatcccctccagaagatctgagttggggcctagacacaagatacactgtcctcctaagatgaatggggtgcttgagccgactctaccagccagctggagggttaccagattctgtctcctcttgcttctgggtccagaaattgcctgctgtcagtctaggatggtggggggagggcttggtctgaggctctccacagtgcatgccccctcttcttcccaaacctcatacttgtttgctccctgttccaggagctagacgtgtttacctccactgtaatttcttccccataagtagcatttctcagcccaaactccaggtttgctgagatggatgcctttggctgaggtgctggcagagcagactctatgggtctgggcccctctcacttccgctcccactccaggccctctgaagagttgggaacaggtgacatgccactggaagaaaaggcctaatgatggcagagacgggcgcagccactgtgggagcctgtggacactgtggtgctgcagggagggacccagcccactcagaagaggttgcctggtcctcacccccctgtgtcagggagctcatggctccggatcacctggtgtctaaagctgcttcctcctgctggatcaggtgctgcttgggttccctgaaacccttgaggacagcacaaaaagggagggaggagagctccagcattttgtcaactgaggcaagtttaggtgattaagctaagaaagcaaagccactctggcccagaggattatctctgaggtgtgttgggaaccaagaagtaacttaatgcctacgaggcaaaccaaacccaagatgattctcaactaattgctcgcctctccttttgccaagccaaactccctgttatataaaggccagtctcctctcttgtccctatccctctcagctcttgctaagtgatcactagcttgcctccaagctctctcactatgaacagacaagtttgcaagaaatccttcagtggcaggagccagggtttctctggccgctctgctgtggtctccggcagcagcaggatgagctgtgtggcccgctctgggggagctggtggaggggcctgtggcttcaggagcggagcaggcagctttggcagtcgcag

SEQ ID NO: 9596 - DNA, 2300 bp, Homo sapien
tttgagggagcaaagaggagaggagcctgtgtggccacactctaggcctgggctaacttcacagtccatgggcagaacttgcagaaaattagggatataagtcagagatgctggagaggggatcccagcaatgaacggggcagattgtgtgacctcaaatgtccagtcaacttcaacttgattctgtaattgattgattcttgattgattagttcttgattctgtgattctacatttttttcccctgaggaggtgacactcattttgcatgtaaatttttctaaatctgaacaccaaatttgagaagtctggattcctcacattgaaataatctcaattagcttgtgctacctcatgcaatgggagttgaactagctttcaaccagttttatctggttgtaatccagtataagggcttaaccattagtcattaataattaattgatggactaattcattttttcaacaaaccaaactttatggcacttactattggcaaagcactgtgctttggttcaaggcacccagtatattaacaagactggaaactcctggagagcttatggttttatcctggggaggagctaggatgttgcacagcctggcaggtaacacatgggagagataaggataaaatggaagaaccaggccactgaagaaaattgtacttcctttgcacttgggccactcccagccctacccagtgggtgttgaagaagtctctatcctttcccccaattctaaggaggctcctgccagggccatacagaccacacccttagaagggcccaatgtgcagcagacagaacaaaaaaggcctgtcctggagagataagcagctaacttggccagctccagagtgtgcaggatggctttcttttggacaaaccaagcccagtcataagcctctgaacaaccccagacagggagagtttcaggctttcggagtcagacatattccatagtgctgccggctctgccagatctggctttctggggtttgtgagggggcatgggcgactctcaggagcacatctctcaaacagaaaatggtcccacaggggccctgtgtgtcttgtccatgactgggtctccagagttttgcaaagggcctggcacacatttggcagtctgtaaatatttgctgaatttgttgttgacttgacatttgaatttcttgttccctaggccttaagctaaaaccagagaaaggccaaaatgtggggagcaagaaaggaagccatagataaaccccaagatgtgtaatagtgtataatttctctgggaagttttaaagagaaacaaacattaggcatgttggattttgccagtgtctgctcaacatacataggtgttaacttgactttttctccaaagatagtcataaaccaaaaggtcactacctcctgaactaaagcttggggtacagggagaacccaggaggcagatttgtgatagttctgggcttttttccaagaagggagaaggagaggtcagcgcttcatcccaaaggccagcgtagagctgggcacatactgtgcactcagtcattgtggagagacctgcatcactccttccattaagatactttcccagagctgtgagtgggctccactgtctccactactcagagaagcagaacctccccacacctcctccactctatcctctccagagctgggcaccgctctgcagggcccaggtgcagctaataggcagagggatggctgctgagcacctgatgcaggtgagcgtgcctcctgggtcctgtcagacagagctaggaggaggccatgcccaaacatggggcaacaccaggcaccaccccctcaccaggtaagcctgccaccttagcacttttaccatttcagcttattttcaaggtgtgtttggtagcctggaacaaacttattgccttggaggcaaacccagcccatgaatatttgggattaattatctctccttcgtttgagcccaacaacctcctcaaatgtatataaagggatttattttgcacaggtcttcatttcccatccctcttcctctgactctcagtgtccctgcttaacttacactcttctcttcgccaagctccttaccatgagcagacaagccagcaagacatctggtggcgggagccagggtttctccggccgctctgctgtggtctccggcagcagcaggatgagctgtgtggcccactctgggggagctggcggaggggcctatggcttccggagcggagcaggtggctttggcagtcgcagcctctacaacctgggcggcaacaagagcatctc

SEQ ID NO: 9597 - DNA, 2300 bp, Homo sapien
caatcatctgttgatggacacttaggttgatttggtatctttgctattgtgaattgtgctgcgataaacatgagtgcaggtatccttttgttacaatgatttcttttcctttgagtggaattccagcactgggattgctggatccaatggtagttctatttttagttctttgagagatctccatactgttagaatagcctatttggataatcaacttccatgtcttcaggtggctctagggaagaatatataaaataattggtctcccaccagctcccctgctgctgagtagtctttcctaaatgctgctgagaacacctgtcggtgtcacttagtaacccgtcctcctactggcattcctgctcctcatctcttatcctccttactcctctgcaggacgtggatgctgcctacctgaacaaggtggagttggaggccaaggtggacagtcttaatgacgagatcaacttcctgaaggtcctctatgatgcggtgagggctccatcctcccctccatccagggaaagggaatcccccatctgtgacgctgctggttgggattcacagttttttgaaaggactccagctcccttattttagggcagtgggttctcatcaaggtcatgcatagaaaggtttgaagtgggaaattcaactgggagattcttagaaccagatgtggtcttggtcttagacggggtgattagatctaaagagtgcttggaatagaattcattgctgtctagcattttttttctggtgaaatggatccattcccttcccttccattccaacacaccggcactcactgcattagagtggcttatggttcctggggaccagtaaagactagaagcattgctcttccatcctgaactgtcacaaccacttgatttctccttagaactttacctgtctctccccttcctacacattgtgaatgccagctctgctcctacttgagcctgtatcaggtcagtgaaggctttcctgggggggctgatgtgagacatttgccctgcaggagctgtcccagatgcagacccatgtcagcgacacgtccgtggtcctttccatggacaacaaccgcaacctggacctggacagcattattgccgaggtccgtgcccagtacgaggagattgcccagaggagcaaggctgaggctgaagccctgtaccagaccaaggtgggtggtatggatctctcaggagatggggctggctctggggctctgcttttgatgtctgtgaacaggtgatcattagctcaagcccaatagaagtcagatatgaacagactctcccaggcatcgttggtcctggtctgatttgaaactacttgacatttggtgctattcttgccacctgtggcaattctcactgagttcacttgagaatggaccctacccaaatgcccctaacacctggttctctgtgtcttcttgagtcttaggtccagcagctccagatctcggttgaccaacatggtgacaacctgaagaacaccaagagtgaaattgcagagctcaacaggatgatccagaggctgcgggcagagatcgagaacatcaagaagcaggtgggtgtcactcccttccagatggagcacaaggccaggggcctcaggcagacatctccagagtggacaagcagataaagcatcaggccagaagaccctgagcttgttgctgggaattcatagctctttgtgcaaggcatacccagattttttcagcaatatcctagttggcacaccatgacgctcctgtgcataggtttcttggctcttcttcatgggtttttgctcatttttatttaatcagtctggtggaggcattggtgggctatggctggagtgaatgagatgcataagtctcagggaaagtgggcagaacagatagaatcttgacatcctaacccaaggaaagctggaccaggggaggggacaggtgtagaggccttgaaggcagggcactgctgaccacctatctaatgcctttgtcaatagtgccagactcttcaggtatccgtggctgatgcagagcagcgaggtgagaatgcccttaaagatgcccacagcaagcgcgtagagctggaggctgccctgcagcaggccaaggaggagctggcacgaatgctgcgtgagtaccaggagctcatgagtgtgaagctggccttggacatcgagatcgccacctaccgcaaactgctggagggcgaggagtacaggtgaggggttaggcagggtgtgaacatgagggccagagaggtccagggccatgagcttatttatgcctc

SEQ ID NO: 9598 - DNA, 2300 bp, Homo sapien
tctggaggtgctggccgatgctcttctgggggatttggcagcagaagcctctacaacctcagggggaacaaaagcatctccatgagtgtggctgggtcacgacaaggtgcctgctttgggggtgctggaggctttggcactggtggctttggtggtggatttgggggctccttcagtggtaagggtggccctggcttccccgtctgccccgctgggggaattcaggaggtcaccatcaaccagagcttgctcacccccctccacgtggagattgaccctgagatccagaaagtccggacggaagagcgcgaacagatcaagctcctcaacaacaagtttgcctccttcatcgacaaggtgagctgtgtcctcggctggagaggggcagttagaagagaggggtcctgagtcctggggtctcagacctgagcctgccacaggtgctggggagaccactgaacttccctgggccccaattctccagctgttgaaggggcatcatgactttgagccttcctttttgtcccgtggctggtgggaaggtgggatgctcaaggcagttaagtgtttggaattccctagacaggctgtgggatactggacaaatcatttggcttttctggctctagtcatcccagctataaagggggttcattatttctctgctttttctcagattttggttttgaatataatgcagttaaccccattaatcacttaacagtggccacttctgttcttagaacagaagacaactaagctgattttgcaaatgaaaaagggactggctccagtggcagattctaggtctcaccaaggccttggaaatttacttttttcattcctttgactggacaacactgctcatgtctgggtctgtttgaagaaaggagacaggtctcttttctttttgtagcccaacttcctttttcatgcaacgtctagaagttcaagttctttaagctcagttatggtcatgcatgatggatgatagtgagcagtgcagccccagagagccgagtcatccaaagattgatgactgggtggatgagtgcctccctttggtccaggttgccctggttcaccaggcatcaaagtcttgggcagcttcgacatatggggcaagaatgaacacttttggaatagaataaggtgcatatttgttcttcttgctagtttgaataaacccatagtaacttaaagaggttttactgtgactataggacatgcagatgtgatagcaaaaactcagggctctttgatgcatccttgtctcatctcatctcattttaccttttgggttcaaaatgtgatcggtctgccttacctgctttcctttcaattctgaggctcataacatggaaatgtcatgctaagctgctgtcctggtttgtctggctagattttttcatagagagagggaaagttcaggaaagtcctttgcagaatggagtttaggtgagacaatgcgtacagggcccttgttttaaatatctatactcagttgttcacaggttcacagggacacgccagatccattgataagtaagcttatttaaaaagtctgtagtgactttgtctttcatttgccttgggtcaggatcactttgaatgcaagagcctccagattgtgatgtctcttaattttattttgttatttcatagaagtttaatgttctttggggctttgggtgcctgcggctaggaagttgttcttgttgcactgttaggccctgcttctctggctgtgctctattctccacaacctatgtgaccccttggtgctatgggctcgagaatggggccatcatgtcaacccgagtgaatggtgccctggagatgcaacatagtggccctacttgggtggttcttgggccgtgtagttccctgggattgactgggttggtgttgccttggctggccctcctgccacacttcaggccctcatcacttggctggtgcctttatcaacacaggtgcagttcttagagcaacagaataaggtcctggagaccaaatggaacctgctccagcagcagacgaccaccacctccagcaaaaaccttgagcccctctttgagacctacctcagtgtcctgaggaagcagctagataccttgggcaatgacaaagggcgcctgcagtctgagctgaagaccatgcaggacagcgtggaggacttcaagactaagtacatggggaggaaggaggggacgccatctgacacatgtgcccagccacacccaggctcccggggctctctccagtggcttagaatctcaggctctgaaggcgtctag

SEQ ID NO: 9599 - DNA, 2300 bp, Homo sapien
cagtgagccgagatggcgccactgctctccagcctgggcgacagagtgagactccgtctcaaaaaaacaaaaacaaaacccaaaacaaaaaccaaaaaaaaaaaaaaagaatatggaacttttgggaccagactgatgtaagtttaaatcctggctccaccacgtgctgctgtgtgaccctgggagctactttacttctctgagtttctgtaaggaaggctaatggtgctgactccatagagcctctaagtagactagttgatcaaatgtaggtaaagcatccagcacagagcttggcacgaagtcggcgcttggtgaatctgggcagaaaggatcagtgaaagtccaaccccttccttctaggagatggttctggctctagaatgctcacctactgcaggtggactgacccatgacgcgggcattctcctgtgatggggcctggggcctccagtcctcatggccacagcccctccaccccctctccacttacttagaggccatcttggcagagacagacccgaggtaggggagggaggggttgggggaatggggacaagggaggaagtggctggagaaggagctggctgaactcccagccagcctggccttccctgcagccctgcgtctggggtgggatctcctgaccactctgtcctcagcactggcccctgccctctctctgtgcatggaggcagccgttcactctctccctggccagctttcattcagctaggggcagcttgggtctgtgggattatccaggtgctggtgactgctcttcctcagacctggggtcatttcatctatgaggaattgaggaaaggagggagaacaaacacaccagatttctccctgtaaatggcaatggcaaagcctgggaaagaagagaatgaatgcctgctgacctcctatatgccaggcaccatggggacattgtctaattccttgtgaggcaggtgtcccatttggtagatgagaagatggattggatggtgtattaggccattattacgctgctgataaagacatacctgagtctgagcaatttacaaaagaaagagatttattggacttaacagttccatgtggctggggaggcctcgcaatcatggcagaaagcaaaaggcacttgttacatggtggtggcaagagagagaatgaaagccaagcaaaatgggtttttccttattaaacatcagatctcgtgagacttattcactaccacaagaacagtatgggggaaaccgcccccataattcaatcatctcccaccggggccctcccacaatgtgtgggaaatatgggagtacaattcaagatgagatttgggtggggacacagagccaaaccatattggatgggtttagagtgcttagttggcccacccaaggttatacagctagttagtggcaacaggagggatttgaacacagatctgttactgttcagttgggaagaatttaagttatggcttaaaactaggattttgcatttaaaaacattgctctgagaagggatccataggtttcatcattctgccaaagggatccccagcagcaaaaaagttatgaactcctgccctgaattctgcaccattacagaaaaccagaacacacctagcaaacaactggacagcaaatggagcagcagagtgcacaccaccagaccccgctggagaacgcccatctagaattgtgcaagcacagattgaagggaggcctgcggggcagcatgggtacccagggctgagaaagacagtcacggttttctttggggaggtgttttgtcttcccccatctccttagtacctagctccatgcctggcagtttctcagtagctgttggccaagttgaagtgaatctggatctaggttggaaggctaaggctggaatacagaatatttcccctttttataggtacatggagccaagaacatgtggaggaataagaatgctaagaatgacaaatatacatgtggcttttgacagtttacagagcactccattaatcactagctcactctatcctgagaagtggcaaggcaaatatttgtattacttccaatttacagggaaagcaactgggcctcagagggtgacttgctccggtttgcagagctaggaggtggcaggctgtgcgctcaaactcaggctgtctaactccacattctgtggggtgagaggatgggtgatggggtgtcttttctggaggagggaggtgctgtgagcctagcgagatggaggtacagtgggtgtgggcctggagcgctgggcccaggcaggggcttctgattagg

SEQ ID NO: 9600 - DNA, 2300 bp, Homo sapien
caaacaagccaaaacctttctcaggattgcagaatcacagcttgggagctggaggtctgagagattgtcttggaaccccagctgggccaagaactctcgggggtcctgttaaacccacaccgtaagcctccttctgagtctatagaggaagggctcagacattggtactttaaaaaaagttttttttgggaaaaaatgttgaatttacagaaaagttgcaagaatagtacaacatactcctgtatactctttcacccagttcaccaattttcttaatttattattattattttttgagacagggtcttgctctgtttcccagactggagtgcagtggtacagtcatagctcactgcagcctccatctcttgggctcaagtgatcctcccacttcagcctcctgagtagctgggactactggtgcatgccactacacctggctaattgtcttgatttttagtggagacagtcttgctatgttgcctaggctggtcttgaactcctgagctcaagcactcctccagcttcaggctcccaaagtgtgtgattttaaacagttgatttacattttaaacagatgattttaatgcagaattaggggtcagaaacatagatctagtccagtttatgcaggacaagtgagagagggagactcagagagaaatgattcgaccaaggttaccaactagtaaattggtactgctactgagctgggcttttgtgcttattaacttggtagagttctttccatcagattggacggtcgtttccagcagtctattcccctaaggagtgcctccccacagcaaagtgtaggtgcggctgcagcgtccctatgttgccctggccttggaggggaggtggcaatggaccccatccttggctcctctggtgaccggagggtgacatcagcccaccctttctgctctggctcaggtgcggttcctggagcaacagaataaggtgctggagaccaagtgggcactgctgcaggagcagggccagaacttgggtgtcaccaggaacaacctggagcccctctttgaggcctacctgggtagcatgcggagcacgctggacagacttcagagcgagcgggggaggctggactcagagctcaggaacgtgcaggaccttgtggaggacttcaagaacaagtgaggagagcaggccaggcggggccatgtgggagtgaggaggggcagtgggaaacctgccaagagggccaccccattcccagggtcccaggcccacctgggggatgcacagacagagctggctccctcaggtgctcaggtccagcacctgctgccacctggagaattggcaggtttgtttgtaatttaaaaaagtttttaaagtagggggaatagtataatgaaccccatgttcctgtcacccagctttaatcattatcaactcataaccaatcttgttgcattttttacacctccccacttcccttcttcccgtgtagtcttttttttttacctttgcctttttctacgtgttctgattcccttgtagtcttgaagcaaatcccagacatcttgtcatttcattcactaatattttacaagttatattcatatatctgcatgtgaatgtagttcatctatgactcagtaaaacatacagtggcataatcacacctaaaaaattttaaaacaataattcctcaatatcattaaatatccagccagttttgaatttccagtgaccccatacatgtcataaatttaaaaaatacagcttatttgactcaagctccaaaggtttatatattataattggttgatatgcgtatttataacttttaaacacgcacatttaaaaatgacttttcccataaattgaccatggcaatttctaaaccttaaaatctcatcaaaagtggttggggaggagttagctggtttgaatgacactgtgttgttgaaagtgatggtaaaggtcagccactgttgacacatcttcacttgtccctctaaagcctcctaagggcttggatccaaagagatggcagctcttgattgccatattattgcacaaattctgtgcctctttccctaaaatggggtggggagagagaatgtttaaatcaaggcagaccccatgtttcttcactggttggctacattaaagaactgctccccagaggtgttcttgatcagtgagggacccatcagggcttctgtaaggctgagtgggtcccatgcctgaaaggcagagccaggctgagcctggcctgagtctcccatgtgtaacaggtacgaggatgaaatcaacaagcacactgc

SEQ ID NO: 9601 - DNA, 2300 bp, Homo sapien
tgggagggaggctgtctccaagcagcaagccgggagctccatgagagtgtgccctggtccctgtgtgcctgtcaccagctcccagcacaaagcgtggcccagagagcgtgcttggtaaatgtgtgcaagggactggcgtgagtgtcgtgtctggggtgaggtgagacttgtgtttatcgactgcctctcactcccaccagcctggctgccctgtgactcagagggctgacaacacttccttgcccagggggcccacagccacatcctggaggctagggcccactcatgactgtttcctcctcccacgccacccagggagagataagggaggctgagaaagtgatctcagcctggggaaaggagacgaaggtcagtgggaaggggcggcttcatccagggatcacttttcgaaaggtcttccacggagggccctgcttataggcagagaaaatggggctcagagaagttgcgagttgccccaggacacacagctcagtgtgggagacgtctcggcttggctccctgaaatgcccagtgtcctaactccaaaatctcctcttggctattaagggactagttctgcaagtgctctcactcccattccttgtgggagctgggttcaacctcttcaagcaacggggagccacttacagcctcccaggggccctaggagaagatcccacagctccctctggtcctggagcaggctgtctcttcacttgctgggctgtggggaacatgggagggaggccaagccttctccgtggcagtcccatgtcctctctgttgggatcctggggacacagcctggctggttgtcctgctcatctgatgggggtggggagcacagcgatgctgtcctcgctcctttttttcaggcaagtctctgttcactttgagcccatcttcttgctgagagaagggggtggggagggccagtgtctaaagtcacctcctcagtcacccctcggccctgacagttgacgtctctgtctttgcttggggctgtgtttggtcccagcagactgaggtgaataggaagtgggcggcggggaccatatgaggtgatttaaggagctcccctggcccctctgaatcagaaacatgggctcctgcatgtggggcaggggaagatgggagtgacggggctgctgcgtgggcctcctggggcttttttggaacacctgctttttggagctgtgcctgtctccacccagggtggtctgtgtccttgacccacctccagctccctccaaagtggctgaacctttctgtggggactctgctgtggggtagaggctcagggatctcaggtattggttaaatcccctgccctctcttcagcctccataagaatgtcctttgctcccaggcttctgggccctgcctgaggaccccaggccttttctacctcctgatcaagggcctgggccccacgattgggcagggatcctctttctgtccttgaattcactttgccagcataggctcacttcccagaaggctctgccactgtacggcagaggcacaggctatccccactctcgccctgtcacctgtgtcacacaccctggacctgggaggagtggtgggccgttggctgggggtgggatgggagcaggcctggatgctctctctggcagcccattgcccaatgctccttctcctaccacctgtacagccccaggccctgcagccttggcttacaacaggggcctgggacaaaccccgtagaacagagccctattgacagtggcctctggggctgggtgggaggacagcaagccagccactgggtggtgggggtggccatgggagcccgtatcatcctgtgccaaccgaggagagcctgggggcagggggagaaggtggcatcctgccccagacagtctcggctcagccccagctctggagcacaggtgataaccgggagggcccctccctcctgcttggggagagggcactccccgtggccctaaggacccctccctctccccttggggcgatggggcaggagtgtctgtggagctggggagccggcccagttgggaaaagataaaaagcccacagtggcccagcagctcacggcactcccttcctgccctctcatcctgccctccggcccctctgcagctatgaggtcctccgtctctcggcaaacatactccacaaaagggggcttcagctccaactctgccagcggagggagtgggtcccaggcccgcaccagcttcagctcagtgacggtgtctcggagcagtggcagtggtggcggggcccactgtggccccggcacaggt

SEQ ID NO: 9602 - DNA, 2300 bp, Homo sapien
ttttcttttctttttttttttgagacagagtctcgctctatcacccaggctggagtgcagtggcatgatctcagctcactgcagcctccaccttctgggatcaagcgattttcctgcctcatcctcccgattagctgggattacaggtgcctgccaccacgcctggctaattttttgtatttttaagagacggggttttaccgtgttagccaggatggtctcgatctcctgacttcgtgatccacccgcctaggcctcccaaagtgctgggattacaagcgtgagccaccgttcccagcttaggagtattttctaaatgcaccttgcttttttttttgagatggagtctcactctgttgcccaggctggagtgcagtggtacgatcttggctcactgctcaacctctgcctcctgggttcaagcaattctcctgcctcagcctcatatgtagctgggattacaggtgtgcaccatcacacctggccaatttttgtatttttagtagagatggggtttcaccatgttggtcaggctggtctcaaactcctgacctccagtgacccacccacctcggtcttccaaagtgctgggattacaggcgtgagccactgtgcccggccctaaatgcacatttcatttcagagcctgggtggctctgatttgtaacctcaggaagcggagcctgatggcaggtggatgggcctggccccaagtgcttgtggaaggagcagagccacaggctgggtcagaaacgtgctgtcccatgcgatcctggatggagatgcctgatttcagtgggtggtgcctcatggatgattgctgggttgggcaagaggaaggacttggaaaccctgtttttctgtttcatttccaaatcctggagtgtcttttagccaactatggcaataacacctccactaacctcctctctttgtggcgctgcaagtgccttccttctccaactccttgaggcagattctcccttgagaatccagggcactctgatgcttcctctgaaccccttctagcgttctttcctcttcaacctcctctcgcttccctgtctccttcaggaagccttccctgagggcctcagtgactttgctccggccatccctccctgtccctcagcactgacatcccagtctcctgcctgcttccttgtctttgggcatgcctatttctccaacagcctgggagctctgagggcagggtctgggtttccttctcccttggctctgcacgtgccggacacttattctccaggcacgtcagagtaagtcagctggagccaagtgacagacacagtcaggtcaagagtatcttgctctccaaggcccagcccaggtacgggagtggataaaagtctcgtgctggggccccagggcagaaactcacacaccttgacaatctgtctgtccgtctgcagctgcgtgactgtctgtctctgccatgtctctctccccatgccgggcccagaggggcttcagcgctcgctcagcctgttctgctcgctcaaggggccgcagcaggggaggcttcagcagcaggggcggcttcagcagcaggagccttaattcctttggggggtgcctggaaggctctcgtgggagtacctgggggtcagggggtaggctgggggtgcggtttggggagtggagtggtgggcctgggctctccctgtgccctccggggggcatccaagaagtgaccatcaaccagaatctgctgaccccactgaagattgagatcgatccccagttccaggtggtgcggacgcaggagacccaggagatcagaaccctcaacaaccagtttgcttccttcattgacaaggtgagggtcaactcagccaagcccctgtctctgtgcctcccttggaggagctgctcttgatggacttggaaatgggaagtttggcctccttctaccacttttctaataacttctgcagcaaagaagtccctcctgtggactaactggactctctctggctatgctgaggccctgttgttccatgattggggctcagggacagagaactgccagccagcggggggaaggccctgccccattagtcagtccagtcattttgttgtgttcagagtgtcatggaaggtcatgaggcttcccctgcccaggttgggcagggggacaggggaaaggtgaggctgatgggagggtccctcaggctttactttccagaggctgtgcacagggagtcccacaggagcctcagggatcctctgcttttgctgcaggtgcggttcctggagcagcagaacaaggtcctggagac

SEQ ID NO: 9603 - DNA, 2300 bp, Homo sapien
ggctgctccacattgcctcctctctccttgttgcacctaattctcctcctgggtcttttctctcctcttctcttccttacctggtcccttgctccttgaactcctttgttctccccactgaaggccctgtctcttcttcctcttgaggtcacctgccattcagtttcattcaggcgtgctgccggttggggccaggggaaggaggaaggggcttttaatcctctggagggaggtgaggtgcactcactgctatctggctttggggtggagtatctgtgggattgttcaaattgctaagagtgacttcctcatagcacatctcttgagtgttcagtattctgagccctcgtttgtcctagctttgagttgcattgtcaaagccccggtgtccttgcttgcaaatgcgccaggctctagaagaggggagggggacagggagaaatagcccccttgccacgtaaataagaaattttagatacttccccaaatcagagtggtccaactctgccggccagtggtggaggggcttaagtggagtctactggatgccttccttccaggagtcctgccactcgggagaggttgtactgaagtatcagataccctagagtgctccttcacccaccagactttcaggccagaggcagaggctgtcctgtggggaaccccaaatgtcctgtttctgctcccagtccatcaggagtatttttcttttcttttctttttttttttgagacagagtctcgctctatcacccaggctggagtgcagtggcatgatctcagctcactgcagcctccaccttctgggatcaagcgattttcctgcctcatcctcccgattagctgggattacaggtgcctgccaccacgcctggctaattttttgtatttttaagagacggggttttaccgtgttagccaggatggtctcgatctcctgacttcgtgatccacccgcctaggcctcccaaagtgctgggattacaagcgtgagccaccgttcccagcttaggagtattttctaaatgcaccttgcttttttttttgagatggagtctcactctgttgcccaggctggagtgcagtggtacgatcttggctcactgctcaacctctgcctcctgggttcaagcaattctcctgcctcagcctcatatgtagctgggattacaggtgtgcaccatcacacctggccaatttttgtatttttagtagagatggggtttcaccatgttggtcaggctggtctcaaactcctgacctccagtgacccacccacctcggtcttccaaagtgctgggattacaggcgtgagccactgtgcccggccctaaatgcacatttcatttcagagcctgggtggctctgatttgtaacctcaggaagcggagcctgatggcaggtggatgggcctggccccaagtgcttgtggaaggagcagagccacaggctgggtcagaaacgtgctgtcccatgcgatcctggatggagatgcctgatttcagtgggtggtgcctcatggatgattgctgggttgggcaagaggaaggacttggaaaccctgtttttctgtttcatttccaaatcctggagtgtcttttagccaactatggcaataacacctccactaacctcctctctttgtggcgctgcaagtgccttccttctccaactccttgaggcagattctcccttgagaatccagggcactctgatgcttcctctgaaccccttctagcgttctttcctcttcaacctcctctcgcttccctgtctccttcaggaagccttccctgagggcctcagtgactttgctccggccatccctccctgtccctcagcactgacatcccagtctcctgcctgcttccttgtctttgggcatgcctatttctccaacagcctgggagctctgagggcagggtctgggtttccttctcccttggctctgcacgtgccggacacttattctccaggcacgtcagagtaagtcagctggagccaagtgacagacacagtcaggtcaagagtatcttgctctccaaggcccagcccaggtacgggagtggataaaagtctcgtgctggggccccagggcagaaactcacacaccttgacaatctgtctgtccgtctgcagctgcgtgactgtctgtctctgccatgtctctctccccatgccgggcccagaggggcttcagcgctcgctcagcctgttctgctcgctcaaggggccgcagcaggggaggcttcagcagcaggggcggcttcagcagcaggagccttaattcctttgggg

SEQ ID NO: 9604 - DNA, 2300 bp, Homo sapien
gagtcaggacaccacttacataagcttagactgattctacctccatgaatggggttttaagtcctgcctcacaggatcgttggagacttgaaatgagatgacacacaagcaggtgaaatggatatttaagaaatgtcagctcctgtccttcctaagtttcctcatctaaatgaccattggatttccagctcttctgtctgtgtagtttctgaaagataaatgggagggatggtgtccccttaatgctgggtgaccttgatcccatggtagatgcaccagaacctggaaggagcaagcagggagggagggaaagggaattctccctggagccatcctgcctttccctgagcaaacacccagggcgtggaaactcccaggagactatctggtggggcccccggctgcccccagcatgcctgcttctgggaacagggccagataagacaggtgactggcttcagggaggattgggaggggcacaattgaaaatattgacttagggcacccatggtaagagatccttctcactgggtgctgtgactgcgctgggctcttacaccacccacctgattcttgctgagggccaggctacatgtgagcagaaggcagaaggttggtattgtttcatgaaatttttgtttcagttatatatatgtatatatacatatttgcaggtggtgataaaatgaatttcttactgtggaccactgccaaaatagatcccctgctctggataatggtgctgttaatgagtactaccaaagagtgagatcctctaaggtgacagtgtgcaaatccctgggcctggccctggggctgagtgggaggggttggcagtggggggttcctgggctcagtctggaagcccagctccatcgatgtgggtagctagggaggcactgtgtggtagttagggaggtgcagagatggggccctcagaggggagcccaggggctgggaagctgaggacccagagacaggagccctggagagagaccgcacagcagagcctgacaggagcttcctgcaccagcctgtccccactcacagtaccctctgcctgtctctgtctaatctccattggtgtttcagaaagtctggaaatgcccccatctcagtcgtgctaagggcttgtgcacttagcccaatgctgaatggacagggtggctgcctggaactctgtgcttgtggcagtggagcaggactgtggggatgcactgccccacccagctgtgtcctaacccctcctgccctgaaccttggaggttgtctcaagagtcaggcagaccccttcacacactgtgcacacccatgcacacacagtacaccctccacatgcaaacacagaatgcacacacgccctttatatcatacacacagcttgtaaaaaggataggaagggggtggtggctgtgactgagtggagtggggaagggccaagtcccacaatttctagcttctagaaattgtgggtatgacacacccaatggctgagaatagactctgaacctctgaggggatggaaaagccaggatgccttagtccctgactgcaaagattgaaggtgataaaaagacatgtctggccacaaggaaaggccatgtgcctggccaaggaggagtacaagcctgagagctggacagctctgggttccaatgccaaatctgctagtttctagatgagccaactacttggcttctctgagcctggctttccttatatgcagatagtcctgatgccaaggtgtaggggaagcacactaagctctctgctgataatgccctcaaaaacttgctctgcctgcctcttgagccttgctgcacagatcacatgaaccttgggatttgaaagcacactgtaaaccagaaagcactgtgcacaggtcaatgactattatacaggtgtagatatctatggcaacaagcaaggtttcaaccaggtttcaataaaggagcctctttaggaacagctgagggggtcagactttcccgctgtgcaccccctgcttcctggacccctcccagcttctcagtcccaagaagaggcctcctgaccacctccctcccaccccagtggacatcagatgcacacacaagcaaggacattggcagagctagctgaggttttattttggaccaaaaaaaaaaagcaattgaattgttttgtagctggaggcatgggcaaggggggtccccaggtagtaaactccccaggtgggctgagggctagggctgagcctcaggtgggtctcctgttcccagtgctaccctgcatagcggcctccttcccaggctctgggg

SEQ ID NO: 9605 - DNA, 2300 bp, Homo sapien
cttttcttttttttacataggggtttggtgtgattctagcattctaggagaaggaagtgggtgtctcggttcaaacgggcaaatattgattgaggcctttggcgcccggaggcctgagtgcgggggtcacagaatgagtcataccccggcccctgcgccggcagcgtgggcggggccgagggcggggtgaggggctgcgggcagcagtctcgggacgctctcctccacctggcggagctcggcgtcgggggcggtgtgggtggggtggggtggggtggggtgggctggggtggggtggaggaggcgccagggcctggcctcggaaagcccatgcaggattcaaagtctgcgggcgtgggacgccccgcccggggtttacgtcctgttaagtttatggcttcagataacgcggtcgcccaccaacgcccctcgcccattcagcccgtgtccctttctcgcgtcctgtccctgctccgccccagcggcctggctccactttcacacagcaggagccaggccgggttttgcagccctgggactccgctgcctgaggggccccgggcccccggcggccccgaggattgggcccttcacgctgactggctcctgggaggcattgtgggaacgggaggagggaaatcctggggcagagtaagccgggaggaaccggagccccaggaacccagtggtcgggggcccttggcgctccaagcgcctggacttgacttgttgactgcgttttgctagccctggggtccttatagagagcagctaagcataggctttggaatctgaattcttggttcgcactgctctgccggttcctggttatggactcccttgccaagtcttatttcctcatctataaaatgaatatgagagcccctaaatccatataggcaaaagtttttgcctattcaaacttacatatgtaaagagttcagcagtgcttggcccacattccattaggataagatgttataatcacttttttttaaaaaataattttggggcagaatgacctggggaagaaagcgatttgcagagagtggtggagggaactaggctgtacccttaaaagatttctgtcccctccagtttagaaggagttacaagtttttttgtttgtttgagacagagtctcactctgtcgcccaggctggagtgcagtggtgtgatctcagctcactgcaacctccgcttcctgggttcaagcgattctcctgcctcagcctcccgagtagctgggactacaagtgcgtgccaccatgcccggttaatttttgtattatttgtagggacagggtttcaatatgttggccaggctggtctcgaactcctgacttcaagaaatccgcctgccttggccacccaaagtgctgggattacaagcgtgagcctccacgcccggcctctttttcaatcttaacatctttagaaaggttggctatttttggccgggcgcggtggcttacgcctataatcccagcactttgggaggccaaggcgggccaatcacaaggtcaggagttcgagaccatcctgcctaagacggtgaaaccctgtctctactaaaaatacaaaaaaattagtggggcgtggtggcaggcaggtgcctgtagccccagctactcgggaggctgaggcaggggcaggagaatggcatgaacttgggaggcggagcttgcagtgagctgagatcttgccactgcactccagcctgggcgccggagactcccaaagaaagcttggctatttttattgatgtgtaatatacaacctatgtaaatgaagttaggcctattggtttgcaaatgcagctttaacataattaccttacctgtctccttcccctacccaatgctgagggacattgctccccacctcaccatcatgccatgctttctccccctggtcataggtgatctttccagaacagctaaccaggtgcctggggtctggagaccttactgcttgaggagtgaattaagagaaaagactgcttgctttcctccagactttgagccctggcctgatgtagacctttttgctctctcctccttcgtataggtacggttcctggagcagcagaacaagatgctggagaccaagtggagcctcctgcagcagcagaagacggctcgaagcaacatggacaacatgttcgagagctacatcaacaaccttaggcggcagctggagactctgggccaggagaagctgaagctggaggcggagcttggcaacatgcaggggctggtggaggacttcaagaacaagtgagcaactcccaccctcca

SEQ ID NO: 9606 - DNA, 2300 bp, Homo sapien
gctgggagaaggcctggtgtaaataggtgctaactgaatttcccttgctccattcagcatagcaggaggcagggcctggggaggggaggggaggtgaaggagccactcactgtgcccgctcttgggatctatgcatttttctggaagggacttcaatgtgtggggtgtgtgtgtgtgtgtgtgtgtatgcacgcgtgcattgtgaagagagcttgtctgtgtgtctgtctttttaagtttgtctgtcctccaaggagggggcttctgggtctctctgtccttctgggtaggggtcctatgtgcctgtctttctgtgagcctgggtgtctctcctagagaaggatggggaagaaactgtacatctgtcctcccagtaggtggtcacccccttccctgggtcagggctatgtcacctgtccctctcctcaaggggatctggctgtcatctgttggtcctctgagttcagtttcatccagtccccacatcacaccctgcagtatcttccagagaacccagccccagccatcaggtaattgcaggtggaatctctgccttggggacctaaacctcctgccttccacccacagcatgccctgcctggccccacccaggcctggggtgccttgctcagctccccaatctccaacctcccacaggtgcgtgctacgtcccaacctgccctcctgactcactttgataatgggagacaggtgcagggactcttcctctatttcctctggcccgttgggagcctgggtaaagcaggagggtccaggtagcaccacgagtgccacaccactccactgtaccccctgccgtcctgtctcacttcccatgattcactcactgggagcaatgggagtgactcccgcaaagagcaagaactatgaagtccctgacatagctcccatctcctcttgccccccccaacccctgcgttctctgccttctagccctgttcatcattctctaggcccttcagtgaggcctacagtgttcacctggcccaggggatcctaggatcttggaaggagaggaagcccctgggttatgttcaggaaaagtgctgtgttggatctcgctcttttttttctttgagatggaatctcgctctgtcgcccaggctggagtgcagtggcacgatctcagctcactgcaacctctgcctcccgggttcaagtgattctcctgcctcagcctcctgagtagctgggattacaccatggccagctaatttttgtatttttagtagagatggggtttcaccatgttggtcaggcttgtcttgaactcctgacctcgtgatccgcctacctcagcctcccaaagtgctgggattacaggcgtgagccaccgtgcctggccttggatctctttttatcttgcaccttcagatgtagagggacgacagccactgtgtgtgtatgtgtatgtgtgtgtgtgtgtgtgtgtgtgcgcgtgtgatgtttattcactcatttatttattcattcattcattccacaaatatctacccagaccctcttggcactgcaccaggtgctaggggtagaacagtaacctggaaagatgaggcaaatggttgatttcagattcaaggctttggactccagctgttctgtcatccagctcaggcaggccctcataatcgcttcaatcagggagaacacaggagagtttctctggggtgtcggcagctcagaggagacccaaatactaggagacccctttttcccatgcttcccagtcctccagtttatttcccccaggagggagggagacaagacccaggagtcagggttgtagtggctgggcggcccaggcaagtctgcttgttacaggcacttgtgccaggacaggatttcttccagtttcatattcactgaactgccttttcctgggtttctgggggtggtgctggagtgggctccagggttggaacgggcccttgggtggcggcagctctctgctgcccccacctgagtcctgcccggaggtggcaggtgacgggttaggcccagccccctctgggcctagccactcaggtacgaggcctttcccccccatcccccggggctgggatctcttttataaaaggccattcctgagagctctcctcaccaagaagcagcttctccgctccttctaggatctccgcctggttcggcccgcctgcctccactcctgcctctaccatgtccatcagggtgacccagaagtcctacaaggtgtccacctctggcccccgggccttcagcagccgctcctacacgagtgggcccggttcccgcatcagctc

SEQ ID NO: 9607 - DNA, 2300 bp, Homo sapien
atgttattttgcatcccgtttgcctcccagccttcagcaggccccgaccctcccctggccagcttccaccctgactgccccctggctggctcccattgagcactgtggggctctccccaccattaggtgacagatcaggaacaatccaggctcaggctctttatctgtgctctgcctcccacctggcaggtccactggccaggcttttccagggtcccttctctcccaggtctgccctactatttgtcctccccttccccctcagctggtagctcgataagaatcaataggtccactccagagcaaagaacacagccaaatgtgtcataccaggccctgccagaaaaacgagctgctggagctgacaaacttgaaggccaaacacctaagggttccccccaacacttcattcagcagggatggtcattcagcttcagggggcaggcagcatgaaagcctccctacctccatccttctcacacagaggctggggagagcatcttggaggatgcagtcccctggggccaggcttctaatccagacagcccttacaaggggggacaggggaaggactggcttggagaaaagtcctagaaaagaggggaggggcactggccaccagggctgggtcgctgctatgatggtcctaggagtgcctgcctgtcctctcaggccccatgcgatgtaggacacattacttttatttatttatttatttatttattttgagtcagagtttcgctctggttgcccaggctggagcgcgacggcacgatcttggctcactgcaacctctgcctcctgggttcaagcgattctcctgcctcagcctcctgagtagctgggattacaggcacacactgtgcctggttaatttttgtatttttagtagagaaggggtgtcaccatgttggtcaggctggtctcaaattttttttttttttttttttttttgagacagagtcttgctctgttgtctaggctggagtgcagtggcatcgaactcttgacctcaagtgatccacccgcctcggcctcccaaagtgcttggattacaggcatgagccactgtgcccggcgatgtgggacacattatcatctctgtgagagatttttggtctcttttgtcaccgcccttctctcccagctcctagaactgggcctggctcacagtaggtgctgaatgcatactggttgaattgtaaatgctcaggatttgtttaattaaggatgcaggaaaggtgatataccggtgtgcagaagtcaggatgcattccctgtccaaatcacagtgttccactgaggcaaggcccttgggagtgaggtcgggagaggggagggtggtggagggggctcagagactgggtttgttttggggagtctgcacctatttgctgagtgaatgtatgtgtgtgtgcatttgagagcacacctctgtatgattcgggtgtgagtgtgtgtgaggaaacgtgggcaggcgaggagtgtttgggagccaggtgcagctggggtgtgagtgtgtaagcaagcagctatgaggctgggcattgcttctcctcctcttctccagctcccagcctttcttccccgggactcctggggctccaggatgcccccaagatcccctccacaagtggataatttgggctgcaggttaaggacagctagagggactcacaggccattccacccgcacaccaccagacccccaaatttcttttttctttttttttttttttttttttgagacagagtctcactctgtcgccaggctgcagtggcgcgatctcggctcactgcaacctccgcctcccaggttcaagcgattccccttcctcagcctcccaagtagctgagactacaggcgtgcaccatcacgtccggctaattttttgtattttagtagagagggggtttcaccatgttggctaggatggtctcgatctcctgacctcgtgatccgcccacctaggcctcccaaagtgctgagattacaggcgtgagccactgcgcccggtcaagactcccaaatttcaaactcgccagcacctcctccacctgggggagaagagcataataacgtcatttcctgccctgaaagcagcctcgagggccaacaacacctgctgtccgtgtccatgcccggttggccaccccgtttctggggggtgagcggggcttggcagggctgcgcggagggcgcgggggtggggcccggggcggagcggcccggggcggagggcgcgggctccgagccgtccacctgtggctccggcttccgaagcggctccggggcgggg

SEQ ID NO: 9608 - DNA, 2300 bp, Homo sapien
tatgagcaaggtctttgtgacctataacttgtgttgacctcctgtctcatcctgtgattaagaatgcctaacattctgggaatgcagcccagtaggtctcagacttattttacccagccctattcaaggagttgctccggttcaaacacctctgacaattgcactctccattcagtagcctgagtaatctctttttttctaattaacgcgtgacttacataaagtacacaaatcttaagtattcacaaatcttaagtatacgaattctagatatacacccatgtaaccaccactcacatcaggatactaagtaatcctttttaaaattttatttcaactcatgacatttctctgccttaaatcattccacactttcccaatcccctcacatgatcagcctcacatgatccagcccctctctctcaagattcatcctgtaccactcctccctcccctgccctcaccatattgcagcaaacccaactgcgcatcctgtcttctcctaaacctcttcagaagacattcccagggatggcagcttgtaatttagacctctgtctgaatgtcacttcctcagaggtctactctgacaggcaatctaaagttgcacctaataacttattacaccaccttgttttaattactcacagaatacttgttgtaatattttattagttgcttattatctgtccttcccccactagaatataacctcttttgggacagttctattccatgttgtacccgcaagtgtctgtgcctggcacacggtgggaaacaaaaattttcatttaatgaatgaaatggaacatcagctaggggaagcatgaatagccctagtctcagaaatcctaaaggcctaagttggactaaacctagtcagcaaattggaccattaaatgaggtaaaagcccatgacaattaagtgttcagcatttgttaccttcttattccgtctaaatatgcctcattaaaaccattcttacacaagacgttcgatttgttttgcctttacaaaaagtaatttgaaaacaaacagtggttgatgcctgtaatcccggcactgtgggaggcctcggagggaggaatgcttgagtccaggagttcgagaccagcccaggcgacacagggagacacaccgccccccccaagcccgccactctgtctccacacaaagacttttttttaattagctggtcctggaggcactcgcctgtggtcccagctactcaggaggctgaggtggaagaactgcttgagccccggaggttgaggctgcagtgagccgagatcgcgccactgcactccagcttgggagacagggcgagaccccgtctcaaaaaataaaaataaataaaaataaaatcagtgatttctgatgtggcttttaaaaactaggccgggcgcggtggctcacgcctataatccagcactttgggaggccgaggcgggtggatagcctgagaccaggagttcaagaccagcatggccaatatggtgaaatatcccgtttctactaaaaatacaaaaaactagcagcgaatggtggtgggcgcctgtaatcccagctactccagaggctgaggcaggtgaatcgcctgaacccgagaggcgggggttgcaatgagccgaggtcgcgcacgccattgcactccagcccggacaacaggagcgaaactccgtctcaaaaaagtacattaaactcagaatcttccctttcagcacatccatttcgccacacccatcaccggctccgtgcagagtaagcagaagcagcagcgaagccccgcccttcccgccactcttccggcaggaagtctgtgcgtcaggaggccggccaggactcagctccagccccgcgctcgcgtgtagccctacgtaaagcgtgaggggtttcgcgacaacccaggccccgcccctttggccacatgtcgcgcatgtcttcccgtcggacggcgtgccacctcgccgcgcagctttacgaacctagagcagcgccgccccgcctcctgtctccgtcctcacctccccgccccctcccagcttcgcgtctcctagctcgacgcgcccgctataatcacgtgattgcctcatccgggtcttttgcgttctctttccctctcccaacatggcggcctcaggtgagcgagcagccgagcgcggccaaggactgggctctgaaacccccctccgagcgtgatccactgatttcctgaagtcggggaattgctggcactggttcctttctgaattgagggctgcggcaggctggcggcgtggccctgttaggttactgcctc

SEQ ID NO: 9609 - DNA, 2300 bp, Homo sapien
ctggctaacacggtgaaaccctgtccctactaaaaatacaaaaaaaaaattagccggacacgtgtaacctcagctactggggaggctgaggcaagagaatcgcttggacccgggaggtggaggttgcagtgagcccgcgattgtgccactgcactccagcttgggcgacagagtgagactccgtctcaaaaaaaaaagagaaagaaaaagatccctgtttgtcccccatacataaattatcagctcttaaaacgtgtaggttgttttagttagttaatttatatttagaaattcagattttttttttaactttaaaatctgggttgccagcttctctcagaaaattggaagatcctagcaacagtcagctggagctaaatagcagctatcccttttacaaacaacataacgctacccacagtttgctatctgagctactacgtttctttatacagatttctagtatttagggtcctctgatactgaaatgcacatgtgtgtgtaaaatatagtttataacataaacaacattgcaatgaatgtctttgtacatgtatctttatcacacatccaattatttcctcagtgaatttcaagaaattaaattgttggtcaagaagggtatacatgacttcaaatcttttcatgcatagttctaatacaactttcagtatttatactaatttattgatttatttatttattttgagaggaagtctcactctgtcacccaggctggagtgccttggcacaatcttggatcattgcaacctctgcctccctggctcaagtgatccttccacctcatcctcccaagtagctgggaccacaggcctgcaccaccatgcccggctaattttttgtatatttgatagagttgtggtttcaccatgttgcccaggctggtctcaaacccctgagctcaggcaatccaccaacctcaacctcccaaagtgtatttgtaccatttaaaattatgatcagcagtgcagaaattgatttaagctcctaaaattcaatagaaaattatgtcctgttagtcatatgttgcatatattgtttctcattttgtttgcctcttaaagtgatctttgaggctgggtgttacggctcaggcctataatcccagcactttgggagaccaaggctggaggattgcttaagcccgggagtccaagaccagcctgggcagcagagagagactgtctctcaaaaaaaaaaaaaattttttttttttttttttttgagacatagtctcactctctcgccaggctggagtgcgggggcatgatctcagcgcaacctccgcctcccgggttcacaccattctcttgtctcatcctcccaagtagctgggactgcaggtgtgcgtcaccacgcccagctaatttttgtatccttagtagagacggggtttcaccatgttggccaggatggtctcgatctcttgaactcgtgatctgcccacctcgggctcccaaagtgctgctgggattacaggcatgagccaccgtgaccagctaaaaaaatttttttaattaaaaaataagtggtctttgggatcaaacatgggagattcccaactgtattgttttagtgtcttgtgctttgttttgttttttgtttttgcatgtaaacctcttctccttctggaaattcattatggaatatttagggattttttaatttccaacccacccttcccaaattattagctgagcaacaattatttcaccagggaaactttttgaagaaatcagatagaaaatttaaataaacagattcttccaaattggactgatagcttaccgtgtttctattaatggtgtcagagaaaaggggatggtgttacttgtctgtttcctctagagtatcgagatcgttatgattcagaccggtatcgggatgggtatcgggatgggtatcgggatggcccacgccgggatatggatcgatatggtggccgggatcgctatgatgaccgaggcagcagagactatgatagaggtaattgtaaaacatgtcgaattgctctttcagtaactttgccttttttttttccccctccgctgtgatgattataatttgggatatatttacaggctatgattcccggataggcagtggcagaagagcatttggcagtgggtatcgcagggatgatgactacagaggaggcggggaccgctatgaagaccgatatgacagacgggatgatcggtcgtggagctccagagatgattactctcgggatgattataggcgtgatgatagaggtaatagttttctttttacgtact

SEQ ID NO: 9610 - DNA, 2300 bp, Homo sapien
ccaaagtactgggattacaggcgtcagccaccgcacccagcctacacccagctaaaattttgtagagatggtttccccatgttgcccaggctggtctcagcctcataaagtgctgggattccaagggccagccactgtgatattttttaaggtctttcctcccacctctaaattgatttgtacttgcatttcattcatttatttatttattgagatggagtctcgctctgttaccaggctggagtgcagtggcacgattttggctcactgcaacctctgactccctggttcaagcaattctcctgcctcagcctcctgagtagatgggattacaggtgagcgccaccatgcccgactaattttttgaacgggctggtctcaaactcctaacctcatgatccacccgtctcggcctcccaaagtgctgggattacagacgtgagccaccatgcctggccttctattttttttattttttatttttgtattttatttatttattttgagacggagtttcgctctttttgcccaggctggagtgcaatggcatgatctcagcacactgcaacctctgcctcccgggttcaagtgattctcctgcccaagcctcccgagtagctgggattacaggagtctgccaccaggcctggctaattttttgtatttttagtaaagacggggtttcaccatgttggccaggattgtctccatctcttgatcttgtgatctgcccgccctggcctcccaaagtgctgggattacgggcgtgagccgccgtgcccggcctagttttttatttttaagacagggtttcattctcacccaggctggagtgcagtggtgcgatcatagctcactgcagcctcaaactcctggcctcaagcaatcctcttgccccaatatcccaagtagctgttatacgacgggtgcacgcaaccatgcctggctaaatttaaaaaatttgtttttttagagatggggtctcactacactccccaggctggtctcaaactcctggcctcaagcaatcctgcctcagcctcccaatgggggctccttgtttttagaagacacttaactgcattttttaaaaaacgcacgtgtaggttgttgttttttgagatggagtctcactctgtcagccaggctggagtgcagcaacatgatcacagctcacctcatcatttctagtagctgggactgcaggcacatgccacatccagctaatttgtctattttttgtagagctggggtttcaccatgttgtccaggctggtctgaaactcttaggctcaaacgatccgcccccaacagcctcccaatatcctaagattacaggcgagagccactgcacccagccagtaggtggtttttcataaatatgattgcatcatagtccatgtgtgttgagttttaagctgaagttgagcagtggttactagagtttggggtttcattgtaggtcctcttcacatatgtatattctccaggtcaagacacttttaacattgagaatgcagaaaggctgtaaaggatactcattcctaaaaaggtcacatggctgggtgtcccttaagttgtatacatggtcattattttttctatttctctgtgcatcagtaagacattgttctggaaatacttgtaaaccactggtttagggataaatccatctttgggagccaaaacttggatgtggaccattttccacactgttgagatcctggtagatgcgtgagcatctgcagcctgataatttgatattttcactctggcttcacagatgcacgaaggagagagagtgagaagtctctagaaaatgaaacactcaataaggaggaagattgccactctccaacttctaaacctcccaaacctgatcagcccctaaaggtaatgccagcccctccaccaaaggagaatgcttgggtgaagcgaagttctaaccctcctgctcgatctcagagctcagacacagagcagcagtcccctacaaggtgagtcagtttggaaacagtagttggttaactgcagattctaaaatactgtgatgtaatgatggaagatctcctacgggatgccagcgttgtatagcaccttataagttatgctggctttagtctcttagtgtgctggaactggctcataagacctagttgttccattttctggagttccaccactttgatagcttgaaatcagctatgatgggagtactaatgccgcacaaatctgcaaatactgtaagtcagaggcttcccttttgccacatattggcagtatggtagggggtaacttcc

SEQ ID NO: 9611 - DNA, 2300 bp, Homo sapien
gaatcaagcctgagctgggagtttggccacccatcttgtgacccttttccaattccttggaacctctaaagttcttcccatgggcctgccaggcagcagcaaaaccagcatgtgtgaggttctagcccttacccctcacctctctggggtccaatcaagttcctctttgagtcccagtctctccattggtaactttagagcttaagtaaaggtactcccatggcatccatcccagagcccagccaaagaccctaaggaatgctgggaagagcaagatgttaaaagagctggttgaaggctccagagacatgaacacacttaattatctcatgattctcgattacataatcaaatctggccaaaatacatgggacaaccttcagccttgccctttctccaggagcctccaatccctgccactttcctcggtattcccctaactcttgcctctcccctcctcccagtgcctccctactcattcccgcctggcttcccccacccccacctctcctgtccccagtccccagtgactcccactgctctaacctctgaaactgtctattggacaccaactcaaccaagagcagtaagatcaaggctccccagtcccaaccatatccacccctcccaaatgccaatttctgggtggggggggacacacagtcatcacgcacttcttcacagactcttcttccctgtggcaagattggaatcaggtgctccaccccctggaaatgagaaccagacttctcagcctttgccaaagacaagggacccagttgagatgagacggggagggaaagaaggccttagagccagtggtactggctactttgggcaagcactgggcattgagccctgggcactgggttctcagaattccaaccttccttccccccgccccttttcatcatggaaaatccagcagggagggtgaaggagggagaaagtttcaggaagtgctcactgctaaaggacgttgggggaatgtaggaatggcaacaggttcagaacttctaggaagatgtcccctaccttatccctaccctccaccttctgctccagggtggcacgactcaaacctgccctacggcccattagctccattccatgaagttcctatccagtaccaggcactgcaaaagaagggaatgaggtcagaccatagaaagaacttccatctccatttggaaaggctggactcaagttaaatgtaaggaagaccttctcagaggtctcctgcgaactgggaatgacggtccagctctttaaaatagggcaatgggccgggcacggtggctcacgtctgtaatcccagcactttgggaggccaagaaggggaaatcgcttgagctcaagaattggagaccagcctgggcaacatggcgaaaacccatctctacaaaaaattagctgggcgtggcggcgcccatcttgtagtcccagctactcgggaggctgaggtgggaggatcgcttgagcctgggaggcagaggttgcagtgagccgagatggcgccactgcactccagcctgggcgacagagacagactcccgtctcaatgaataaagcagggcagtggatgggatggctggagctgcttgcgggtggagatgggggcttgagcctgacggaaaggtccccagctgtgaatcctttgagaatactagcccaggagaagtctcctgtggggcagaggaccagggaagggtgtccaatgacttgggccaaaagtaacaccaggtgtcttcacctgattcaggcgcccgcctgggtaggggacgctagcaccaccaggctaagccacgggtggtcctctcaggtcaggcccaagcccaggcacactcctgtggggagggtaagaggctgacgctgcgcggcagttccctgtccccttgttcctagtcccttctagacctacgcccaccgtttcttctgcgtctgtctggctcgcgtgtttctttctgcctgtgtcccgccgggtcaggctctccccgtctctcagactttcccgtccccgtgtcctccgcggccgtctctctccaactctctccccctctcagccacttcctgtctccagtatgtccctggcgcggcccggctggccgtctgcgcaccctctctcccctcggctctttgtgagtgtgggttcgcgggagaaggtggggaggagaggaggccgaggggtggggagctggcggaacgtggggattggagccgggagggaggaggaggaggagcgggctgccacgggcgcgggcgcgggcgcggggcgcggcgggggcgggagggagcccagc

SEQ ID NO: 9612 - DNA, 2300 bp, Homo sapien
ccaccgtttcttctgcgtctgtctggctcgcgtgtttctttctgcctgtgtcccgccgggtcaggctctccccgtctctcagactttcccgtccccgtgtcctccgcggccgtctctctccaactctctccccctctcagccacttcctgtctccagtatgtccctggcgcggcccggctggccgtctgcgcaccctctctcccctcggctctttgtgagtgtgggttcgcgggagaaggtggggaggagaggaggccgaggggtggggagctggcggaacgtggggattggagccgggagggaggaggaggaggagcgggctgccacgggcgcgggcgcgggcgcggggcgcggcgggggcgggagggagcccagccgagcccggccgcccgctcccgccactgccaccgcctcctcctccgcgtccgctcggcgcgggcacgggcgggatgggctggcccggcggctccccctgctgctgccccgccccgccgcgcccccgcccggccgggcgccccccgcaggtgagtggccgcgccgcgctgggcgggcggcggtctctgcgtcacggccgcgcgggcagtgccaggggcgggcgccagggggcgcggggccgccggaggtcgagagggcgcggggcgcggggcgcggcccagggctggggccgggggctctggctggccgcggagagctgggagcagcgggaggccgggacagtgactagggggcggggcgcggccgcggccctactcgatcaggccgccacgccttccagcacccggggcgcacggggccgcacgccgtgccacacacgcaggcccgggacccggcagcagctggcagcggcgctcgggccccggcctggcagggtgcgggcgaacgttttcctttcctgcttcacatgtgggacagaggccgtaagcgggcacagatgaggctgattcgactcgccagccccgctctgcggccccctccagtctgcccccatcctccagacccttctgggaacacccccagagccgccgccctccctcgctccttccctgggccttacccctcctccgcggcggccgggctcccagcctcccttccaaccacagctatttccagaaaggggggtgtgggtggaggggtttctccaaacaaacccaagacttcggagagagagggggcccggctgggggagaggttgacaggctctggaatgttacaggcgggaggagggtgagggtccaagagggtctagtgatgccttcccagccctcctcaagtgagctacttttcccctcgggactggctcatagggatcccatccctgcttcccttccgaggtgcgagtgccacaggatgggagggactcacagccacagtggatcctgaccaccccacccctcaccgagctcactgcttgggcacctccttgctgggtctgggtggggagtgtgagaccagtgaaggtgagaggatgtctggggacctgttccaggtgaggggactttcagcccctatggaggcagcaggagagtgaagcatgtagaggagtcctggtcagggccatgtgccataggagcagaagctgggactggacagaaaaaagccacccccactgcccaccttgtcacactgccccatctcccccaagcagggctgggggctcgacaaggccaggcccggttgcccacactggccgggggcctggaatgtgctgggacacagccaggctggcaggatgggggtgggtcacagagcccgtgctcctctccagttacaggcagggagcccaggcctgccacacagatgccaccttctggccaggatatcctggggacacatttcttggcctggaaaattggagcttccagggagaggtgtcaggctaggcccaatccagtcaggtcctcgcaagggtctcaagtgggcacccacagcaggcctcaccccagagaatgcaggattcttcatcccagggaacccatcctggtggatatgaaggagcaggaagcaagtagaagggactccgtgggagaagccagggctgggggagttgcctgagtactgggacattcaataaataccatgcaaatgagaggggcacatttgcacattctttcaagtgacagctatagcctgtcccaggggctgctgtccacagcttggggctgaagactcccaggccattaaccccttagcttttaggaagattactccccctttttcaaggccccatccacctccctcccttgactcccaggacgggaagttggccatgttcccaggagggaggccggaggcccatgga

SEQ ID NO: 9613 - DNA, 2300 bp, Homo sapien
ccacccccatccatgggcctccggcctccctcctgggaacatggccaacttcccgtcctgggagtcaagggagggaggtggatggggccttgaaaaagggggagtaatcttcctaaaagctaaggggttaatggcctgggagtcttcagccccaagctgtggacagcagcccctgggacaggctatagctgtcacttgaaagaatgtgcaaatgtgcccctctcatttgcatggtatttattgaatgtcccagtactcaggcaactcccccagccctggcttctcccacggagtcccttctacttgcttcctgctccttcatatccaccaggatgggttccctgggatgaagaatcctgcattctctggggtgaggcctgctgtgggtgcccacttgagacccttgcgaggacctgactggattgggcctagcctgacacctctccctggaagctccaattttccaggccaagaaatgtgtccccaggatatcctggccagaaggtggcatctgtgtggcaggcctgggctccctgcctgtaactggagaggagcacgggctctgtgacccacccccatcctgccagcctggctgtgtcccagcacattccaggcccccggccagtgtgggcaaccgggcctggccttgtcgagcccccagccctgcttgggggagatggggcagtgtgacaaggtgggcagtgggggtggcttttttctgtccagtcccagcttctgctcctatggcacatggccctgaccaggactcctctacatgcttcactctcctgctgcctccataggggctgaaagtcccctcacctggaacaggtccccagacatcctctcaccttcactggtctcacactccccacccagacccagcaaggaggtgcccaagcagtgagctcggtgaggggtggggtggtcaggatccactgtggctgtgagtccctcccatcctgtggcactcgcacctcggaagggaagcagggatgggatccctatgagccagtcccgaggggaaaagtagctcacttgaggagggctgggaaggcatcactagaccctcttggaccctcaccctcctcccgcctgtaacattccagagcctgtcaacctctcccccagccgggccccctctctctccgaagtcttgggtttgtttggagaaacccctccacccacacccccctttctggaaatagctgtggttggaagggaggctgggagcccggccgccgcggaggaggggtaaggcccagggaaggagcgagggagggcggcggctctgggggtgttcccagaagggtctggaggatgggggcagactggagggggccgcagagcggggctggcgagtcgaatcagcctcatctgtgcccgcttacggcctctgtcccacatgtgaagcaggaaaggaaaacgttcgcccgcaccctgccaggccggggcccgagcgccgctgccagctgctgccgggtcccgggcctgcgtgtgtggcacggcgtgcggccccgtgcgccccgggtgctggaaggcgtggcggcctgatcgagtagggccgcggccgcgccccgccccctagtcactgtcccggcctcccgctgctcccagctctccgcggccagccagagcccccggccccagccctgggccgcgccccgcgccccgcgccctctcgacctccggcggccccgcgccccctggcgcccgcccctggcactgcccgcgcggccgtgacgcagagaccgccgcccgcccagcgcggcgcggccactcacctgcggggggcgcccggccgggcgggggcgcggcggggcggggcagcagcagggggagccgccgggccagcccatcccgcccgtgcccgcgccgagcggacgcggaggaggaggcggtggcagtggcgggagcgggcggccgggctcggctgggctccctcccgcccccgccgcgccccgcgcccgcgcccgcgcccgtggcagcccgctcctcctcctcctccctcccggctccaatccccacgttccgccagctccccacccctcggcctcctctcctccccaccttctcccgcgaacccacactcacaaagagccgaggggagagagggtgcgcagacggccagccgggccgcgccagggacatactggagacaggaagtggctgagagggggagagagttggagagagacggccgcggaggacacggggacgggaaagtctgagagacggggagagcctgacccggcgggacacaggcagaaagaaacacgcgagccagacagacgcagaag

SEQ ID NO: 9614 - DNA, 2300 bp, Homo sapien
ctcgccagccccgctctgcggccccctccagtctgcccccatcctccagacccttctgggaacacccccagagccgccgccctccctcgctccttccctgggccttacccctcctccgcggcggccgggctcccagcctcccttccaaccacagctatttccagaaaggggggtgtgggtggaggggtttctccaaacaaacccaagacttcggagagagagggggcccggctgggggagaggttgacaggctctggaatgttacaggcgggaggagggtgagggtccaagagggtctagtgatgccttcccagccctcctcaagtgagctacttttcccctcgggactggctcatagggatcccatccctgcttcccttccgaggtgcgagtgccacaggatgggagggactcacagccacagtggatcctgaccaccccacccctcaccgagctcactgcttgggcacctccttgctgggtctgggtggggagtgtgagaccagtgaaggtgagaggatgtctggggacctgttccaggtgaggggactttcagcccctatggaggcagcaggagagtgaagcatgtagaggagtcctggtcagggccatgtgccataggagcagaagctgggactggacagaaaaaagccacccccactgcccaccttgtcacactgccccatctcccccaagcagggctgggggctcgacaaggccaggcccggttgcccacactggccgggggcctggaatgtgctgggacacagccaggctggcaggatgggggtgggtcacagagcccgtgctcctctccagttacaggcagggagcccaggcctgccacacagatgccaccttctggccaggatatcctggggacacatttcttggcctggaaaattggagcttccagggagaggtgtcaggctaggcccaatccagtcaggtcctcgcaagggtctcaagtgggcacccacagcaggcctcaccccagagaatgcaggattcttcatcccagggaacccatcctggtggatatgaaggagcaggaagcaagtagaagggactccgtgggagaagccagggctgggggagttgcctgagtactgggacattcaataaataccatgcaaatgagaggggcacatttgcacattctttcaagtgacagctatagcctgtcccaggggctgctgtccacagcttggggctgaagactcccaggccattaaccccttagcttttaggaagattactccccctttttcaaggccccatccacctccctcccttgactcccaggacgggaagttggccatgttcccaggagggaggccggaggcccatggatgggggtggagtatgtgttgggaggggggacctcctgtccagtcctcaggccctgggacagctgctgaggaaggagagcagacccaggagagccatgaaggtagtactcaggcttcggggttgccgcggggggagggtgcagcccttgggtagagagcccaagttgcagggctggaaagagggctagggatctgtgagatcatgtctgaaacaaagccagggaatgggtgagtggggggcactgtgtcaggagcagaaacctgggggctttcaggagaagggcctcatatgccttaggctgtggcaggagaatggattactccccaaacctgagcaaagcagtcttgtggctggaacttggccttgcaaggtgtattgagggtaaaggtgggcggtgcatgctttccttttcctacttcataacgagtgaaactgagacaggaagggggcccccagtcccatttttacctgactctcaggacacactcgggatcctgggcctgcctgctggtagtagttcccagctccactccctccccagcggaagtccctcgagagcttgagagttcaggctggagcctggctgggacacactgttccccacttgccctttagccctgccccgagaccagaattctcacccggccccaccgggggtgggggcagaatctcaagaccatggatccctgcagatccctggagagtgtggtgtcccaggtgtgggacaactccagagttgggggagtagggggagcaaaagatcacaggctgacactcccagcagggtagatcctgggaatctgatctcctggcctcccccacatcctcccccctccacttcctggagcagcgacctgcccccttcccgcctgcacttccctccacttccagggccgggcttctcctcacaccagccagacagcctaccctccgcccaggggaagcgg

SEQ ID NO: 9615 - DNA, 2300 bp, Homo sapien
aggaatgccaaggcttgccgcccaccactggaagctagaaagagacaaggaaggattccatcccgagtctcagatggagcaagggcctgctgacagcttggtttggggcttctggcctccagaactgtgagagagtacatttccactgttttttgttttgttttgtttttgttttttttgagacggagtctgactctgtcacccaggctggagtacagtggcaccgtgtgggctcactgcaacctccgtctcctgggttcaagcaattctcctgcctcagcctcctgagtagctgggattacaggcgcccaccaccacgcccggctaatttttatatttttatatttttggtagagatggggtttcacctggccaggctagtttcaaactcctgacctcaggtgacctgcccacctcagcctcccaaagtgctggtattacaggcgtgagccaacgcacccggcccatttccactgttttacaccaccctgtttgtggctgccccaggaaactctacagaccatctgctgcagactatgttgcagtactagtgataaaagggaggtggaagtgctaagctgacagcaaaggactctcaacgaagaggtgggctccaggggagatgggttcctaaggggccagctggagaaagggccactggggaagcagctactcaggcgctgggagcctcaccctgcagagatcttgctgtagtgcatgtaggcagaaacgatgaccccaagcttgcccttgtttccctgacagacagagagacagggatgagggtctgggagctccaggctgacctggaacctccaggcaccagggaacccgaggtcctggcccaccttgcagtatagtacgaccacgtgctgtgggtcagcactgagccatgtctccatggctttgcagatggagcacagcttgtccaggggtggagcatgcagctcaggccagccgaagtcttgaacctggggagaatgcaggggtgcaactggggccgggggccaccaacagagagagatgggcagggtggaaaggggacagggcataggggtccgggggcaaggctgggggtctgctggttgtccatgatagcctcggcactttccttatccatacaatgggctgatacctgctgcatcacgttttggggtgtctccagtaatatatcatgggagagtgggaaagtgcttaagagtgaagtagatgccaattgctactattaataacgaggaagctgggggcttctggggttggggtggcttggtttaatggttgggcaggccatttccttcataccttggggtttaagcgggtcaggtcatgccttttctctgaaaggttgaagagctgaaataaagggggagggctttagacagaaatgatctccggcaatgaggcacgaggtggaggtggatcctaagtaagaatcttcctctaaaataaggtgcaggccggtcgcagtaactcacgcctataaccccagcactttgggagaccaaggcgggcgggtcacctgaggtcaggagttcgagaccagcctggccaacatggtgaaacctcatctctactaaaattacaacaatttgccgggtgtggatcgcttgagccctggagtcttgagaccagcctggccaacatggcgaaaccccgtctctacaaaaaatacaaaaaaaaaaaaaaaaaaaaaaaaaaattggctgggcgtgagtgacgcacgcctgtaatcctagctactgaggctgaggtgggagaatcgcttgagcccgggtggaggaggttgcagtgaggtgagatcgtgccactgcactccagcctgggcaacaaagtgagaccccgtctcaaaaaaaaggtaaataaataaagaaaataaaaaggtagctaaggcccggcctagccagtcacagccaagtcgccagcgttccaggattctccgctccgctccaggccgcgctccgggccccgcccccaccccaccactctggtcccgccccctggcggcctcgcctccgctggtgacgtcagtgattagcctcgcccatctggaccctacatccctctcattggcggactcctgatggccccgcccctcaccaggtacttgtcccggtgcttggattgcagcacatgggccagctcgcgcaggtggccccggtgccgctgttcatcgggccgcgcggggaaggcggcggccaagatgcgctccgtcacgtaggtgaggtctaagtcccagcgccgctccatgagcgggtccaggctgaagctcctggggaggaggagcctacgcatgaacgcag

SEQ ID NO: 9616 - DNA, 2300 bp, Homo sapien
cgggcgtggtggtgggcgcctgtaatcccagctactcaggaggctgaggcaggagaattgcttgaacccaggagacggaggttgcagtgagcccacacggtgccactgtactccagcctgggtgacagagtcagactccgtctcaaaaaaaacaaaaacaaaacaaaacaaaaaacagtggaaatgtactctctcacagttctggaggccagaagccccaaaccaagctgtcagcaggcccttgctccatctgagactcgggatggaatccttccttgtctctttctagcttccagtggtgggcggcaagccttggcattccttggtttgcagacacatcactgtaatcgctgcctctgtcatcacatggtgttctccctgtgtgtctctgtctgtgtctcttcctctcttcttataaggacaccaatcatattggattcagggtccaccctccttcagtatggtctcatcttaactaattatgtctgcaacggccctatttccaaataaggtcacattctgaggtacatgtcttttggggggatataattcaacccataagatggttttgttgccctgttttacagatgaaaaaactaaagttcagggaacaattgcctgaggcccaacaactagtaaagtgactgtacatggtgcttctcattctcattaccactactctgggcttcttctagacttagagaatcatatttctcctccatcccctggggcttagggatgggaggccaggatgaagattaatccctaatccccaacactggccttgctatccccagggcggaccaggcactggccactcttaccatgcggaaattctgcgaggacaaggtggccacagaactgcagccctcccagcgtcggtgagcagcctgggtggggatgggccagaggagcagctcccttcatggctaccaaggccaagactctcttattcatgcagcacactttcactgagtgtgccaagcgccgtgccaggtgctgagaattcaaagtggacaaagcccctgctctcatggagctttcatgctagtagggtggaaggcagtagacctgggaataaatagacgaggagatcagtcataaagagaacctgaaggacagtcagggcctgccactataaagtgaagcagagctctggggaaagagctttgaggcagaggggagcaggagggattgaggttagatgcaaggaagaactttctggtgacccggaagatgggaaggaagtgttgagcagaagagcgagccttctaagggtggatggttgaaatgatacaaggtgacctccagaggaaaaggcttatgttctccttgacacgccctccaccagatatatcagctacttcagtgggctgctatctggctccatcagaatgaacagcagccctctcttcctgcactatgtgctcatccccatgctgccagcctttgaacctggcacaggtgagtctgcctgagatgtgctccctagggagaaccaccttcaggccctctccactcagcacccctcctgtgccttctcctctgcccctccaggcttccagcccttccttaaaatctaccagtccatgcagcttgtctacacatctggagtctagtgagtgctctattcccaggcccctgacacttcatgaccagggcccctcttgctcctgcattcctgcttctccagcctccctagacacctgggcagggctcagactctggtctcctggctccccctgactgcatagctgcctctgcacgcaggagcttctggttcatctctgccttctcctctctccccacagtcacattgcaggccctggtccccagcagctttgcatcagcctggagccagccctcctcctcaaaggcgatgtcatggtgaggggggtcctgtcaacaagaagaatcctggagatggggcaggggttggtggtgtaacggcacagtcaccaatttgagacagattggagagcgagtagggagatcaccttgagatcgaggcagggcagaagctgtgaccaggcagtccccagggtggaagcgcagaagaggacatgaggcctgatccgcagcctcctgcctttctcccaggtaacatgttatcacaagggtggccggggcacagaccggaccctcgtgttccgagtccagttccacacctgcaccatccacggaccacagctcactttccccaaggaccagcttgacgaggcctggactggtgagtctgagacaagtggcctggggctggagtccaggtggcaggcaggtggcaggcaggtggcaggcag

SEQ ID NO: 9617 - DNA, 2300 bp, Homo sapien
tcctttcccctgtgtttgggaccctgggcggacctttcccagcaggaaaggctgcagggtttttcagcgggcgaggatgcatctagagccccctggtgtgccgctcccctagctgtgctgctttccccggcctcccagaaagtgtgtgggggaagacagcgtgggcattcagcaaggggtgctctcccctttgcctcccaccccatcctgctcttccatgctggcctagaactttggggccacattgtatctctaggattctttccctttcagccaggagtttttgtcagacctgggaaagtgggacccagactgccttgggcccaggtttccagggtgggtgtcagcctgtcccctgacccccatctggctcttcccccacagctgctggagtacttagggaagggcaaaagcatcgtggatgtggggctggcccaggcccggcacccactcagcacccgcagccactacttcgaggtggagatcgtggaccctggagagaaatgctacatcgccctggggctggcacggaaggtgggcacaaaggctgagcttttttgctcatggagctgctcaggtctggggctgttggggcagcaccaggaagctcttaggagaaaccaggggagcccaggctttggagggagggtgctaagctgagatggaacacagttgtatgtgtctgctgtgtaagagtacacaccccatgtgaccaaggacctgagacaggtcatgactgcaccacacactaaggcctggggggagggggtgggacatgccatggctctggccttaaaagcttaactaacactttcctcaccctccctggttcccctgaagccccagtgcctgcagggtatgagtgtgcagggttggcactctctgggctgtggtctgtcccagaggttcagatgctactcgccactctctcctgtcttgtttatgcatgggaccatagattttcttttctcttcttggtgcaggactatcccaagaacaggcaccctggctggagcagagggtctgtggcttatcatgcaggtgaatagcgggctgcctgggaaaggtgggatggtgggagatgtggaggcatagggacatccactttcccctctcctggcccctcacaaatggccttgctgtttgccctgctgctggctgacctccccttcccaaatcgctagtgcttcctcctcatctgtgttttcctcccagctctggaaaccaggggagcaggacaggagagggagatctgggcccagatgggacattccaggcctctgagctggtccccccgtgcccttcctgcagaccctcatttcctcattttcttttttcttttgctgcttggtttccttggctttctttagaagaaaactgagcctagagttcctcgacccacctccccctgcctgccctccctgggtgttcattccttccctagggccccctcctctgactcatttcctaagggttctcccttacccttaccttgagcagatggatactacgtctctttattttatttggtgcccccttcccatatatctcgctccaatttttttttttttttttttttgagatggagtctcactctgtcacctagactggagtgcagtggcatgatcttggctcactgcaacctctgcctcccaggctcaagtgatcctcccacctcagcctcctgagtagctgggactacagacgggcgccaccacgcccagctaatttttgtatttttagtagagatgtttcgccatgctggccatgctggtctcaaactcctgacttcaggtgatccaccctccttggcctcccaaagtcctgggattccaggcgtgagccaccgcgcccggcctctctctccatctttgtttccgccctgacccttcccttcctctgaggggtgggaagtgttcagcttcatgagccactctgggggtgtggtgtcagccctccttcctcaagtgtttgtcctttcccctccctccaacagacgatgggaagatcttccatggcagtggtgtgggggacccctttgggccacgctgttacaaaggggacatcatgggctgtggaatcatgttcccccgggactacattttggacagtgagggtgagtggggtaggggtggccagccaggctgcttggggccgagggtggaaaggcaccacaggagctcaggtttcctggtctcctaggggacagtgatgacagttgtgacacagtgatcctgtctccgactgcccgggccgtccggaacgtgcggaatgtcatgtacctgcaccaggaaggggaa

SEQ ID NO: 9618 - DNA, 2300 bp, Homo sapien
gggacgtgagtcctatctttctccaaagctttggagtaattttctaagtgaaataggcacccactctcaccaattgccccctctgagtatcttatcttttttcctgattcccatgtcctttttctttttgagcctcagcgccctttaatctctaagtccccttcccccacccccagcaattcatcccatttcccagccctgctgactgtgccctgctttcttctctccaggtgtctattgtggacagtggagtccggggcaccattgctgtggggctggtccctcagtactacagcttggatcaccagcctggctggttgcctgactctgtagcctaccatgctgatgatggcaagtgagttggctcctgtgcaacccggcccttttcctatgaatttgggaatcttagatctgaagaactaccttgggctggcttttcccattgggtgtttcatagacttttctggtcaggacagggaagtggcctggcagcacccttgaaggcttacagactagaggagggtgatgctcacgccaggacgtaagtgggtaccatcacagaatgaccaggagcagcaagatgaggatgaggcctctgctgtcagtgctggggagaagttgggaggccaggctcgggtcctgtgtctgtactactctgtctgtaggctgtacaatggccgagccaagggccgccagtttgggtcaaagtgcaactccggggaccggattggctgtggcattgagcctgtgtcctttgatgtgcagaccgcccagatcttcttcaccaaaaatgggaagcgggtgagtgggaaatagtggtgggatttacgtggctgaaatctgcccaaggatttgtggggagtgattaggaagagtctgctggctggggcttgcccagggacccttgcactgagttcccatctcctccagtccagcctcagattctcctgaagtctcttgcgtgtaggagaagatacttcccatggccagaggaagctgggacattgcccagatgacaggcagagagaggcaagttagtggagcagaggatgagcaggaattgtggggaacagaattgggtgatttgggggaaggttttgagcagataaaagagaggggaagattatggcctggccatgtaagctggaggtcctctttgggttttgacttgagcacttttggggatatgtcctttctgtgtcctgttttccttgtttcacgtctctttcactatcctgttcgtagagagactaggcgtggtgaggagatgggacaggagccaatagtagagagagacacacagctctctcccttctctccaactccatctcccacattgggaaattggtttctcaggccttggccaaggggtcctgctgccttagcatctgcgcctcggcactctcctgtccagcacacgtactgaaagtatttggcagcaagtcaggagacttgtgtttgtcttctagctctgtacataccttgcttagccaggagtacttagcacatttggaaacttttctgcacctctgggttgcttttttttttttaatctgtcagtgtgtgtgataattattggttgcatcatctttttttttttttttttgaaatggagtctcgctctgtcccccaggctggagtgcagtggcaccatctcggctcactgcaagctccgcctcccgggttcacgccattctcctgcctcagcctcccgagtagctgggactacaggcgcccgccaccacgcccggctaattttttgtatttttagtagagacggggtttcaccgtgttagccaggatggtttcaatctcctgaccttgtgatccgcccacctcggcctcccaaagtgctgggattacaggcgtgagccaccacgcccggctggttgcatcatcttaaaagtacccttgtgagaattaggtgagctatggaaaagcaggccgggtggcagctccgtctttccccccactgcaggtgggctctaccatcatgcccatgtccccagatggactgttcccagcagtgggcatgcactccctgggtgaggaggtgcggctgcacctcaacgctgagctgggccgtgaggacgacagcgtcatgatggtggacagttacgaggatgaatggggccggctacatgatgtcagagtctgtgggactgtaagtagcgggtgggagggtgggaggggctgggtcggaggaggctgggcagaacacctgtgggcacatggtcatgtctgaattgctgggaatggggagtcgggacagtgtccgtgtggggtttggcaagatagcc

SEQ ID NO: 9619 - DNA, 2300 bp, Homo sapien
agtagcttatcaaattgtataccttggctaggtgcagtggctcatacctgtaatcctcgaactttgggaggctgaggtgggagggttgcttgagctcaggagtttgagactagcctgggcaacacagtgagacttcgtctctaattaaaaaaagaaaggaataaattgtacaccttaaatatatatggtttattgtatgtcggttatatggcaataaagttgtttattcaaatacatgtagacaccaaacacaaattaccaactgggtcctgagcatgccaatggatggagaattcgccaaaaaggtgagccccacatctggaacttaaaggtgaggaaatcccgagtggaatcaccaaccatcagtaacagtttggaaatgccttcttctgccatttctctccatgtctgaccctagccacctagctagttagtttctggaatgagccctggtctgggatgaacatgactctggcagcctcctaagattgtccctctctggctgcctttgggaagagctgagctcagtgttgaggtattttcataacacaagaagaggagcggaggagaagcaatgagggaatcaaaaggaggtggagatgagttggaagggtagctattcagaactgagtcatccaggggctggaagggagctaaaagaacacatacttcaataattcttgtttagggatgagaacaccaagaccttgaccttttagtcacacagaattggggctctaatccgggtttctctgtttcccatctcatctattcctatcacccattgccgttatgccgagtgggcactattcacggtatgcgagctgatggctttcctggcactcaacacgttagagtacctagtgtgataagaatagaatagtctggggtctgaaggagctcacagtctagcagagacgggtctacacacacaagtaactccaataacgaaagcaagacggtaataagtgttataaatggcggggggcggtggctcacgcctgtaatcccaacactttgggaggccgaggtgggcggatcaagaggtcaggagatcgagaccatcctggctaacacggtgaaaccccgtctctaccaaaaatacaaaaaaaattagcttggcgtggtggcgggcgcctgtagtcccagctacttgggaggctgaggcaggagaatggcgtgaacccaggaggcagagcttgcagtgagccgagatcgcgccactgcactccagcctgggcgacagagtgagactccgtctcaaaaaaaaaagtattataaatgaggtgctacagaggagaggaatcttttccgtccagaagagagagatatggtgatgggaagggagcaaggaagtcctcatctaggagtccaaccccccagaatggcaggtaggcactccctagtaggtgttcaataaatattcgtgtcttcgtcccttcacattctaaccccagtctaactttccttcagcctaccaaagccctgtgttcctccacagaatgccgcttcgtgccactgtgccttctgcatccccagttctctcctcctggaatggaatgttcttgccaataatgagcgagcggtgccatgaaacagagctcgggagggtacacagcataacagttaagcgcgcaggctatcgaggccagccttcggcccatccgtaaaaaggagataagatttatttcataaggctgcaccgtggattaaatggacattccggtaaagcttttatttcagtccagcgcggaaggagggctcaagtaatactcgcaacgtttgtgcgagcgtggccaccttctccgcccgtcccgtctccccggcgccgctcaagagccgccccctgtccgcctcagcggcgcccaggcacccagcagcgtccgcgctgccacgtcgccttcgctcaccccagcaacagccgggttgaccagaccggggccctgagctgggtacccagggcaccgggccgcgccccacaccctgcctgcgccttccgattggctcctgcaggtgcccgtcgtcagaggccgttgctgattggcttagatgggggacggggcgggcctctaggagtgaaggaaaggcggggacccggatgtgtgtggtggcggcggccgaagagcttgtgtgcggagctgagaggcctatggatgaggaggacgcggcggccccggtaggcggggatcgggggcggggtcccggaggcctcgtatctccccggagcctgaagcggaaggcgggggtcctgggcgggggctctggggccaggggcggggccctgcgctctggtcactggg

SEQ ID NO: 9620 - DNA, 2300 bp, Homo sapien
gcaaactaacacaggaacagaaaaccaaacactacatgttctcacttataagtgggggctgaaaacaatgagaaaacatggacacagggaggggaacaacacacactggggcctgtggcggggtaggggctaggggagggagagcatcaggtcaaatagctaatgtatgcgggacttaatacctaggtgttgggttgacgggcagcaaaccacatggcacatgtttacctatgtaacaaacctgcacattctgcacatgtatcccagaacttaaaataaaataaaataaaatttaaatttaaaaaagagccacactgggatcctgcaagagcacagccatctctttccccttcccaacttcccacaggctttccatcttattcaggagcaccaacccgaagtccaggagaaagaccctaagaccctagccagaaccatgtgtaggacaaaataaatagtgataaagggtgtgcagcaggaccccagtactctggaacccatctctgacagccttggttccagggagcttggtcagagcttgtggcagggggttgaagagccttggtggaaggggtgctttctctcacccctttcccaattttgcccttcctctcctctgccctggtctacttctcccatcagcagtagcttctcccatcagctgccccacaaccctctcctccctgcctctccagtctgcatcagtatctcagggaaacaggaaaacaccattctccaaacacatgtcctagggtcccagggttgcatggcgaagcgggctgtgctgacaatgaggttcgtattatttctatttacctaaaagttcaagaaggccttgctgacattgttgcttggggcccagcatttaaacttagtcactgcccagagcccttgttttaggaaagaatgagatggtccctgttgcataacccagagttgggtgggtgtgggttgccgaaggaaacaatccctcttcctctctcttgtgaggcctggctaggagtgcctgggatgggcgggacactgcctggggaaggcgggtggggagcggtggaacccgacccttggagcgaaggcggacaagtaggtaggcaaagatgctgagtagtccctccccaaagtcccctgggcacaagacagtctgatgaatctagaaaaccccatggatgactgggagggaaggaaacggattctgggagaggagaggaatggaggagcgagcttacctgaaggacggggatggggaggggggtggggtctgctctctggccactgtccccaagagcatcccgaatacgagttcctttaattctctccctctctagtttcaacctgccaatttccccctttccctgcctcccagccagttctcaccctgcacacagccctctccaatccttccagactccgcatgcgcccaccacaatgctagggtctcctacggttcattcaagttgtatccctccctgcctcccggcccttcccccattggcttaccccagtctggttcccctcgggccccttttctccatagtcttacctcaagggtgctttctcttactcctttcccaattttgcccttcctctcctctgccctgttctacttctcccatcagcagtagaatttcccaagaccccgttatccaccctctccatcttttctctgtccctccacatttgcccactcctcttgtgatccacacacaccatctcttctcagttccctttcagcccccgtcttctcactccccaccgggtccctgcatgcccctcgtcgtcctacacatacacactaagtggattgcactcccgtcctccccttcttccgctcctccccaccctccagtccctccagccagctgtacagctcccaaattccgggccgagattcccgggaacaaagcaagaaaaatcagagcaatttgggaagtaaacagaaactggaaagggagagggaaagaagagtggggaggacccaggttgggggggccctctccagtcccacccagtttagggaatgcccctgccctctcccccaccccccttcacctggctcttaaagggcccggcccctggccggcggctacttaagacagaggggcggcggcgggcagcagctgcgctgcgactgctctggaaggagaggacggggcacaaaccctgaccatgaccccccacaggctgctgccaccgctgctgctgctgctagctctgctgctcgctgccagcccaggaggcgccttggcgcggtgcccaggctgcgggcaaggggtgcaggcgggttgtccagggggctgcgt

SEQ ID NO: 9621 - DNA, 2300 bp, Homo sapien
atagctgagccccaccggcagccttcctgattcaggaggtgtggggtggggcctgacaatatgcatttctaacatgttccctcgtgatccggatttgggaacgtcactttgaaaactactgttccaggctagcagaatgcacacaatttattggttgaagagggggaactaaagagagggaacactgggccgggtgcggtgtctcatgcctgtaatcccagcactttgggaggccaaggctggtggatcacgaggtcaggagttcaagatcagcctgaacaacctggtgaaaccccatctgttttaaaaattacaaaaattagccagatgtggtggcatgcacctgtaatcccagctactcaggaggctgaggcaagagaattgcttgaacctgggaggtggaggttgcagtgagcagagatcatgccaatgcattccagccagggcgacagagcgagactccatctcaaaaaaaaaaaaaaaaaaaaaaaaaagagagggaacccccgaggagacgctcaggtgtttttacatcctcagactcagatgtcccctctcattctcctgctggaagcctctggcctcactcctgacctgtgtgcctctctctccagtgccgctcctcccaggggcagcgccgaggtccctgctggtgtgtggatcggatgggcaagtccctgccagggtctccagatggcaatggaagctcctcctgccccactgggagtagcggctaaagctgggggatagaggggctgcagggccactggaaggaacatggagctgtcatcactcaacaaaaaaccgaggccctcaatccaccttcaggccccgccccatgggcccctcaccgctggttggaaagagtgttggtgttggctggggtgtcaataaagctgtgcttggggtcgctggcttgtgtctctgtgtctgcctctcacaattctggaatccctggccctctctttaccccactacagctcactcacagcatttctcctttcctgtggatacctttagtccttcctgtgacagccaggcagaagcttcaagccatcaagcctcacagagctgcccaccaggagttgggagtgggaaggggagacactgagatcatggccttaatctgaagttgtgaccttgtttctaacactgatctttggacacaaagggaggggaaggattaatagttaatcccagcaggaacccagcaaagaggaactctcaaagcacatacccttctgttacttcctactaaaaaaagaaggaaattattactaatatatgagctcatcccatggccctgaaccatgtgattttacctggacaacctcattttgagcttacgataaccttgtgatatagggatttttacccctatttttcagaggaggaaactggcttaaaatttggggtcacttgcctgaaattatatagctggtaaatgacagagggaggtttgcatccggttcttccatatgtgacaatacctggtattccctaggtgctgaatacgtgtttgtttagtctcctttctgcctacatgctcacccaagcaggtgtcaggaagcggccctgtcagttcaggggccctgacactcagcctttcctggaggggccccagttccgtgagtagcacagtgccaaccccatcagaatattaccacatgtgtcaatcacacaccttgtggtgaaagcgagctgaacgcactgatacatgaagacatttctgactcctccctgaccttcagcctgctgggagagagactggaaggccagccatgctaggtgacaagcttctgagaggcaaagttcccctccccaagatgtacccagccactattcctgtgtgtgtgtggcggggtggatagcacccttggagctgggcatctggatggtggttggggtgttagggggatgtggcgatccctgcgacagacagcagagtgaggtctgaatctgagaagctctgcctccagatcagataacctatcgcactcccagaggccccctcctcctgaaaggactttagtctttggagctgtcacctgagctgagtgggacaagagctctacagggcaggccacactgcgaaggaaggaggcaacacgggcaagggctgcctgctgcccgctggagaccgcaccatggagccaggcggggcccgtctgcgtctgcagaggacagaagggctgggaggggagcgggagcgccaaccctgtggagatggtgagccgccctcgggggtgcagaaggcacaggcaagtgggggggaggcggggagagatgcgctatggaga

SEQ ID NO: 9622 - DNA, 2300 bp, Homo sapien
cttcacttcttttatggccaaataatattcccttaaatggatataccacatttatttatccattcatcagttgatggacatttgggttgtttccactttggggctcttatgcataatgctgctatgaacatttgtatacagatttttgtgtgaaaatacgttttcatttatcttggttatatacctaggagtggaattggctgggtcatatagtaactctgtatctaaccttttgagaaactgccagactgtcttccagagtggctgcaccagtttacaatcccaccagcagtgtgtgagggttccaattgctctacatactcaccagcacttgtcatatctttttttgattataccacttagtgggtgtgaagtgggatctcactgtgttttgatttgattttccctgatgactaatgatattgagcatcttgtcatgtacttattggccatttgtatatcttctttggaaaaatgtctattcagatccttcacccattttgtttttcatagaatttttattccagtaaggaagactgacattcataaatatatgtaaaaatgctgcatatgtgctatgaaggtgaggtacattgtgctctttgagcatagaatacaggagaattgacctaatcaggaggtgaaggagtcagggaaggcttccctcagaagggatggttgagctgagactggaagggagaaaagaaatgaactaggtggtgcccctttgggtagacaagaagattctgtgtatgtgcagaggccacgggatatttctggaattgaagatatggagttggagcagcttcccccctttgcctggactgtttccaccccacctgtagtcttcctcatccatggatacttgcttggggctggtgctgccatctacccccactctcctagtcatcaagtgggcatttgaagtgtgtggaactgttttattttgctttgttttgtgacactagccagagggcattactgtgtttattgagagggaaagagggatcctaaacatttttgtaatgagcaggtatagctctacatgaacaagaactgactcacccaacatgccagtagagtctctgttgagaatctgctgccagttctacttgtttttttgtgtgtgtaacataaaatttaccatcttaaccatttttacatgtacagttcagtagtgttaaatacattcacattgttttgcaaccagtctccagaactcttttcatcttgtttttttgttttgttttgttttgtttttctgagacagagtatcactctgtcccccaggctagagggcagtggcacagtctcagctcactgcagcctctgcctcctgggttcaagcgattctcgtgcctcagcctcctgagtagctgggattacaggcccctcgccaccaaacctggctagttgtatttttaatagagatggggttttgccatgttggccaggctggtctcgaactcctggccttaagtgatctgcccaccttggtctctcaaaatgctaggattacagtcattaaccaccacacccagcagaactcttttcattttataaaactgaaactccatactcatcaaacaacaactcattaccccctcttccagcccctggcagccaccattctactttctgtctccatgactttgactactctaagtacttatataagtggaatcacacggtatttgtctttgtcttttcttttcttttttttttctcgagatggagtttcgctcttgtagcccaggctggagtgcaatggtgcgatctcggctcaccgccacctccacctcctgggttcaagcagttctcctgcctcagcctcctgagtagctggggttacaggtgcgcaccaccatgcccagctaattttttgtatttttagcagagacggggtttcaccatgttggccaggctggtatcaaactctgaccttgtgatctgcctgccttggcctcccaaagtgctaggattacaggcatgggccaccgcacccggtggtatttgtctttttcgattggcttatttcacttagcagaatgtcttcaaggttcatccacgtcgtagcatgtgagaattttcttcctttttaaggctgaataatatttcattgtacatatatgccatattttgcttatccatttatctgtttgggttgctgtttggaatctctttgagaccctgctttcagtgttttgggtgtatactcagaagtggaattgctggagcatatggtaattctattgaatttttttgaggaactgccatactgttttctatagtggctgtac

SEQ ID NO: 9623 - DNA, 2300 bp, Homo sapien
tgagccaccacacccggccctattttcattctgtttaaagatagggtcttggtctgtcgcccaggctggagtgcaatggtgcagtcagggcacactgcagcctcaacctcctgggctcaaggaatcctcccatcttagcctcccaagtagttgggactacagatgtgggcaactgtgcctggataattttgtagttttttttttgtttttttgttttttgtagagacagggttttgccatgttgcccaggctggtctcgaattcctaggctcaagctatccattggcctcggcctcctagagtgctaggattacaggattgagccaccatgcctggccggatatgtaaattttaatagattctgtgaaaatgaattgtaaaagtttgtaacaactcccatgtttactcagaaccatgtgtgaatgttccctattcctacaactttggcaatgtttagtgtatgctatgaattttttatacagttactagtttaatgggtgaaaaatagtatttgttttaattttcatgtcattaatagtgaagttaatattctcttattgccttttttttttttaagagatgggtctctggacaggcacggtggctcacgcctgtaatcccagcactctgggagaccgaggtgggcggatcacctgaggccaggagtttgagaccagctgggccaacatggagaaaccccatctctactaaaaatacaaaaaaattagctgggcttggtggcacgtgcctgtaatcccagttaccaggtggctgaggcaggagaatcacttgaacccgggaggcgggggttgcagtgagcccatattgtgccattgcactccagcctgggcaacaagagcgaaactctgtctcaaaaaataaataaataaataaataaataaatagatgggtctccacgctttgttgccttaggctggtttccaactcgtgagctcaagtgatcctcccacttcagccttccaaataggtgggactattttattgctctttgaccattttaattgtttttgtaaactgtctgttcatatcctttgcccattaaaaaaaggtagatcatttgtatatttcttattgatggtagaaatcctgtctgtgttatggataataactattctttgtcgtctgcatttaaaatattttctctttttcacttatctttcagcttttgagacaaaagtcatgctttatgggaaaatatttgaaacatttctgtctttgctaggaacaagccagggatgtttactattaaaactaagattttaggagagctcctggccaccctaaagcctccttgatttcatatatattcatcttacaaagagaaacgattgacaatgtatcaaaactatggagttcagcaacatgaccagatgtcagattaacaaacaaaaattatataaataaaatataagaatataaccaacactaaaataccatagaataaataatctgattcacaataaaaacattatattttggccaggcgaggtggctcacacctgtaatcccagtgctttgggaggctgaggtgggaggattgcttgaagccaagagtttaagaccagcctgggcaacatagtgagaccctgtttacaaaaaattaaaaaattaacccggcatgctggcatgtgcctgtagtcctagctactcaggaggctgaggtgggagaattgtttgagcccaagagttcgaagctgcagtaagacatgattgtgctactgcacttcagcctgggtgatacagcaaaacttattctctaaaataataaataaatattttttttttttttgagatggagtctcgctctgtcacccaggctggagtgcagtggcatgatctcggctcactgcaagctccgcctcccgggttctcgccgttctcctgcctcagcctcctgagtagctgggactgcaggtgcccaccaccatgccgggctaattttttgtatttttagtagagatggggtttcaccatattagccaggatggtctcgatctcctgacctcgtgatccacccgccctggcctcccaaagtgctgggattacaggcgtgagccactgctcccagccccttctggtattcttgtttttttttttgagatggaattttgctcttgctgcccaggctggaatgcaatggtgcgatcttggctcactgcaacctctgcctcccgggttcaagcgattcttctgcctcagcctcccaagtagctgggattacaggcatgcaccaccacacccggctaatttttgtatttttagtagagacggggtttcac

SEQ ID NO: 9624 - DNA, 2300 bp, Homo sapien
cggaagcacttccccctccccctcgtcctctccgccgagcggctgcatccacttccgggctcggcagctagactagcgggggcagcctcagagcgggtgagcttggggacgcacggagaggtgcagctgggtgagtgggcggcgccgtgcgccgagggcatggaggagggagcgctgaggccggcgcgtgcgccgtggccggggcgcgccccggccgccatcgagactgagggcaggaccctcggcccttcgatgattgtacgctgggtgctcgatgggaggagggtttgctgggtgagctggttcagactccttgaaaaatcatcgtcactctttcttcctcgcggacgtcctgcccatcgctctgagccggcgccccaagtagagccagagtagttcgtacccagccttttcacgtaactcggccgaggtggttcttctccgaattttttccgtcaggcccagattagcagattttggggtcagctgggagaggcgttaacttttcttcgcacactcttgctttgtgcgctcaaccacagtctgaattctcgcagaggcgttccttgagtagcccttggccacactgctcacctccctgcagaagtcaaagccccagccctcctctgcgaatcccgaggccagcctggttggttaccttctccccttcgccctttactccaggccgtccagcatcaaacactagcctccacacgtggaaaagaccctgactcccacagtagactagtcttatgggagtcctggctcttgggccaggctgcattaggaaaatggaaaccagactgtcttcaaattcttctgcctagccttagccattagagagaggtcctgctaaagatggactgcaaatgcgcttgatggaaggagatgtcaattccactgaagtcctcatttctgctgtaggtgatattatgtcgtgactttaggagaagtaatggtgataccaaaagaaaaaaaaaactgtatgatgaaaaaaagacaaggattctcaacttttttttttttgtagacagatttcatttccctgagccactccatgatttgggccattgaaagtacgttttttgtgttttaggatcattctaaaatagagacaaaatggagaaagagagagataaagaaacatcaccaggaataagtcttttaaatcttttttgaaaattagctcctacttattttacaaatcgacacaacgcaaaagtataaaagacacaaaatggttattctccccctctacttatcccatgctcctgaagggaatcattcttaccagtttggtatatatgcttttaggcttttttctgtgttcatacaaaaatcttttcaaccagtatttattgagcacctgtaatgcgccatacagtgtattttagacatctgagtcagctaacatttaaaaaactgttgcacagtattccagtttatgtgtgtgccttgtcccatcttgatgaacatttaggtttcagatttttttgctttataaacaatacaataatgaacatccttaaatagttatctttttgctccgggcagggtggctcacacctgtaatcccagcacgttgggaagccgaggtgggcggatcatctgaggtcgggagttccagaccagcctgaccaacatggagaaaccgcgtctcttctaaaaatacaaaattagccgggcgtggtggcacatgcctgtaatcccagctactcgagaggctgagtcaggagaatcacttgaacccgggaggcgggagttgtggtgaggcgagagtcgtgcctttcctgggcaataagagtgaaactctgtctcaaaaaagaaaaaaaagttaccttttgcatttataaggatttatagataggatatgtgcttttatttaaatttatttttatttttatttttttttgagatggagtctcactctgtcacccaggctagagtgcaatggcacaatcttggctcactgcaacctccacctcccaggttcaagcaattctcctggcttagcctcctgagtagctggcgcctgctgccagcccggctaatttttttgtattttttagtagagatggagtttcaccatgttggtcaggctggtcttgaactcctgacctcaggtcatctacccaccttggcctcccaaagtgctgggattccaggtgtgagccaccacacccggccctattttcattctgtttaaagatagggtcttggtctgtcgcccaggctggagtgcaatggtgcagtcagggcacactgcagcctcaacctcctgggctcaaggaatcctccca

SEQ ID NO: 9625 - DNA, 2300 bp, Homo sapien
cgggctggcagcaggcgccagctactcaggaggctaagccaggagaattgcttgaacctgggaggtggaggttgcagtgagccaagattgtgccattgcactctagcctgggtgacagagtgagactccatctcaaaaaaaaataaaaataaaaataaatttaaataaaagcacatatcctatctataaatccttataaatgcaaaaggtaacttttttttcttttttgagacagagtttcactcttattgcccaggaaaggcacgactctcgcctcaccacaactcccgcctcccgggttcaagtgattctcctgactcagcctctcgagtagctgggattacaggcatgtgccaccacgcccggctaattttgtatttttagaagagacgcggtttctccatgttggtcaggctggtctggaactcccgacctcagatgatccgcccacctcggcttcccaacgtgctgggattacaggtgtgagccaccctgcccggagcaaaaagataactatttaaggatgttcattattgtattgtttataaagcaaaaaaatctgaaacctaaatgttcatcaagatgggacaaggcacacacataaactggaatactgtgcaacagttttttaaatgttagctgactcagatgtctaaaatacactgtatggcgcattacaggtgctcaataaatactggttgaaaagatttttgtatgaacacagaaaaaagcctaaaagcatatataccaaactggtaagaatgattcccttcaggagcatgggataagtagagggggagaataaccattttgtgtcttttatacttttgcgttgtgtcgatttgtaaaataagtaggagctaattttcaaaaaagatttaaaagacttattcctggtgatgtttctttatctctctctttctccattttgtctctattttagaatgatcctaaaacacaaaaaacgtactttcaatggcccaaatcatggagtggctcagggaaatgaaatctgtctacaaaaaaaaaaaagttgagaatccttgtctttttttcatcatacagttttttttttcttttggtatcaccattacttctcctaaagtcacgacataatatcacctacagcagaaatgaggacttcagtggaattgacatctccttccatcaagcgcatttgcagtccatctttagcaggacctctctctaatggctaaggctaggcagaagaatttgaagacagtctggtttccattttcctaatgcagcctggcccaagagccaggactcccataagactagtctactgtgggagtcagggtcttttccacgtgtggaggctagtgtttgatgctggacggcctggagtaaagggcgaaggggagaaggtaaccaaccaggctggcctcgggattcgcagaggagggctggggctttgacttctgcagggaggtgagcagtgtggccaagggctactcaaggaacgcctctgcgagaattcagactgtggttgagcgcacaaagcaagagtgtgcgaagaaaagttaacgcctctcccagctgaccccaaaatctgctaatctgggcctgacggaaaaaattcggagaagaaccacctcggccgagttacgtgaaaaggctgggtacgaactactctggctctacttggggcgccggctcagagcgatgggcaggacgtccgcgaggaagaaagagtgacgatgatttttcaaggagtctgaaccagctcacccagcaaaccctcctcccatcgagcacccagcgtacaatcatcgaagggccgagggtcctgccctcagtctcgatggcggccggggcgcgccccggccacggcgcacgcgccggcctcagcgctccctcctccatgccctcggcgcacggcgccgcccactcacccagctgcacctctccgtgcgtccccaagctcacccgctctgaggctgcccccgctagtctagctgccgagcccggaagtggatgcagccgctcggcggagaggacgagggggagggggaagtgcttccggggaaacgggccggggttggtgtttgtaaacttgcctcggtcccggtgggggcagccgcggcggtggggttggcagggtgtgctggggcctggaggaggcgccgcgcggccagggagccagcgggaggccgcgcctggcaggtaggagcaagccccaaagaccgcagcgtcgtccgtacagacggcagcgcttcagtagctcgcaagccgtggggtgccgcgcgggaagggggaggggaggggaggaggggcgc

SEQ ID NO: 9626 - DNA, 2300 bp, Homo sapien
aaggcaacccaaaagttcaggagttcctaggtccacctttccttgagacactgtcgttttgaagaactgtcaccaaatcacggtagcgactccttcgtgtcccatcagtcctgttgccatattgaactttgtcttcaaatagaacttagtgtcctccgaagaaaagataggtgttccaagaatccctggactctgcctggctcctgcctattgtctgaagaaaaagagagtctaccagtcttggttttccagttgaattctcttgatgaagctcacgatctgtttcagaaacctgaaaccagaaaggaagaggggggctgctaaatgcaacatcttcaggccattacaacgtgcgatatgaattttttttttgctgggcgctctctgtgaagctcagaacgaggacatgagtcaagaagagttttctttctaggtcaataggaggaactggtctcctgggcaaggagtggaagccaacaggagcaaaagtaattggggcctcctatggaggaactctgccaaaaggaaagttgcttggatttgccatctcaggaatggaagaagggggcggagaccctttggggcttttgtgcccagtgggccggcccgaaaagctcgcactttacagaggcggcaagactagggtggaggaaagctcaagggccatcgctgggtgcttcggtggcgggcagaaacgggactggcagtgcccacacgtgtgcgttctccccgtccgcccgaaggtagggaaacttgctgcggaggtggaggacaggcaggcgaagcccggcgcggcgtgtcgcccgcctcgctccggccagccagcctctgcacccgctgcaccaaccgggagcagagccggagagtgccgagaagcgcgcgagatgcgtgctcgcgcccgcgtcccctccgagagccctctcccgggccggggacgcggcgggacgcgcgggcagggggcggtgtgcgcgcacggcctttcccctccctcccccggagatccccctcccttcgccacgcgcccctcctcccctcccctcccccttcccgcgcggcaccccacggcttgcgagctactgaagcgctgccgtctgtacggacgacgctgcggtctttggggcttgctcctacctgccaggcgcggcctcccgctggctccctggccgcgcggcgcctcctccaggccccagcacaccctgccaaccccaccgccgcggctgcccccaccgggaccgaggcaagtttacaaacaccaaccccggcccgtttccccggaagcacttccccctccccctcgtcctctccgccgagcggctgcatccacttccgggctcggcagctagactagcgggggcagcctcagagcgggtgagcttggggacgcacggagaggtgcagctgggtgagtgggcggcgccgtgcgccgagggcatggaggagggagcgctgaggccggcgcgtgcgccgtggccggggcgcgccccggccgccatcgagactgagggcaggaccctcggcccttcgatgattgtacgctgggtgctcgatgggaggagggtttgctgggtgagctggttcagactccttgaaaaatcatcgtcactctttcttcctcgcggacgtcctgcccatcgctctgagccggcgccccaagtagagccagagtagttcgtacccagccttttcacgtaactcggccgaggtggttcttctccgaattttttccgtcaggcccagattagcagattttggggtcagctgggagaggcgttaacttttcttcgcacactcttgctttgtgcgctcaaccacagtctgaattctcgcagaggcgttccttgagtagcccttggccacactgctcacctccctgcagaagtcaaagccccagccctcctctgcgaatcccgaggccagcctggttggttaccttctccccttcgccctttactccaggccgtccagcatcaaacactagcctccacacgtggaaaagaccctgactcccacagtagactagtcttatgggagtcctggctcttgggccaggctgcattaggaaaatggaaaccagactgtcttcaaattcttctgcctagccttagccattagagagaggtcctgctaaagatggactgcaaatgcgcttgatggaaggagatgtcaattccactgaagtcctcatttctgctgtaggtgatattatgtcgtgactttaggagaagtaatggtgataccaaaagaaaaaaaaaactgtatgatgaaaaaaagacaaggattctcaacttttttttttttgt

SEQ ID NO: 9627 - DNA, 2300 bp, Homo sapien
ggttccctagaagcaagctgggagaagctctggagatgtgtgcacatagctattctactcagatgactacaacagcctatctgctcattctgtctctccagtccatcctctacctccacaataatgaccttctacataacactgatctgatgctactctgctgcttaacttagcgaggcataaaaggcctttgggttacactctgcttactgcagggaacaacttcctcacctatcactgtcaatactacctccataactatccccatttaaatcccttactccgtaactatcaaacaacctgcagtactcggaacctcatcacattttcccatgactctaagctcctgcccatgctgttccttttgtccaaacacccttctcgcttgtttagcaaaatcctatgcatctttcaacctccatcttctttttctatccaagcagaagtactgttctctcctatgtacatacccctattattgcacattcctcaatcaacagattcagagtctctactactagccagccactatacaaggcattgtgaatataaaaataaatggctttccatccctctcccgaccccaactagcctggaagctcactggggacaaggacaatcgtattcatctttgtattcccagcacaatgccttgcatgcaacaggaactcaataaattcctgttggaaaaaaacaaaagaagcattcaccgtactattcactcccttacacccctcagcacttaatgtaccaaatgtaaactgagtacacgttgctttgcaaatgtcccatcagtgcctgtgatgcagtatagcctacctccttcatttgactggaagctccctgaaggcaggggctgtggcctgtctcctttccttcctctagatctccccctggtgcttaatacagagcttggatcactggggttggtcaatatgttgactaaggcagcattcaagagtgaaactgcaaacaggcttcccagttatcttggaggaggactctagagctttttacctgagccatgctgatttctcacttaaggcaacccaaaagttcaggagttcctaggtccacctttccttgagacactgtcgttttgaagaactgtcaccaaatcacggtagcgactccttcgtgtcccatcagtcctgttgccatattgaactttgtcttcaaatagaacttagtgtcctccgaagaaaagataggtgttccaagaatccctggactctgcctggctcctgcctattgtctgaagaaaaagagagtctaccagtcttggttttccagttgaattctcttgatgaagctcacgatctgtttcagaaacctgaaaccagaaaggaagaggggggctgctaaatgcaacatcttcaggccattacaacgtgcgatatgaattttttttttgctgggcgctctctgtgaagctcagaacgaggacatgagtcaagaagagttttctttctaggtcaataggaggaactggtctcctgggcaaggagtggaagccaacaggagcaaaagtaattggggcctcctatggaggaactctgccaaaaggaaagttgcttggatttgccatctcaggaatggaagaagggggcggagaccctttggggcttttgtgcccagtgggccggcccgaaaagctcgcactttacagaggcggcaagactagggtggaggaaagctcaagggccatcgctgggtgcttcggtggcgggcagaaacgggactggcagtgcccacacgtgtgcgttctccccgtccgcccgaaggtagggaaacttgctgcggaggtggaggacaggcaggcgaagcccggcgcggcgtgtcgcccgcctcgctccggccagccagcctctgcacccgctgcaccaaccgggagcagagccggagagtgccgagaagcgcgcgagatgcgtgctcgcgcccgcgtcccctccgagagccctctcccgggccggggacgcggcgggacgcgcgggcagggggcggtgtgcgcgcacggcctttcccctccctcccccggagatccccctcccttcgccacgcgcccctcctcccctcccctcccccttcccgcgcggcaccccacggcttgcgagctactgaagcgctgccgtctgtacggacgacgctgcggtctttggggcttgctcctacctgccaggcgcggcctcccgctggctccctggccgcgcggcgcctcctccaggccccagcacaccctgccaaccccaccgccgcggctgcccccaccgggaccgaggcaagtttacaaacaccaaccc

SEQ ID NO: 9628 - DNA, 2300 bp, Homo sapien
acagctgagctaagattttaactctggatctttcactccaaagtcccagaaggtggagggaggggtcccagaacgtactgatcatctaaaaggaatttcttcataaatttgtgagtttgctgaccaacgatttcttaaaattttttttttcagtaagaaaagtattttctttaatgccggctaaccgaagtcagtttgaagaatgtagcagttttctggaaatttacttaaacataccttacttaagtaattgtttaaattatatatggagcaaggaatgtgaaaaaaaatgtgatcatacaagcacacatataaatggcctaagaggtcaagagaaatgctgaactccaaaaatcatatcagttgcaattggtaaatacttagggagtttaaaatctaaagggagaaatagcctgtagtcccaggaccttaggagactgaggctggaggattgtttaagctcaggagttccacaccagcctaggcaacatggtgaaaccccgtctctataaatacaaaaaaaaatagccgggtgtggtggcattctcctgaagtcccagttactcaggaggtagaggtagaaggatcgcttaagccagggaggtcaagagtgcagtgagccgagatcgtgccactgcactccagcctgggcgacagagtgacaccctgtctcaaccaacaagcaaaaaatgaaacaaaccgatagaaaatacagttggcaccagcaagatctgccaatcaaaagtgggctctgaagctaaggggtgtgtgtgtgtgtgtgtgtgtgtgtgtgtgtgtgtgcgcgcgcgcgctctgaagctaaggggtgtgtgtgtgtgtgtgtgtgtgtgagtgacggagggattctcgctctgttgcccaggctggagtgcagtggcgcgatttcggctcactgcagcctccgcctcccgggttcaagcaattcttctgcctcagcctcccgagtagctgggaccgcaggtgtgtgccaccacacctggctaattcttgtatttttagtatagacaaggtttcacctattgtccaggcttgtctcgaactcctgacttcgtgatccgcccgcctcattctcccaaagtgctgggattataggtgtgagccactgcactcggcccagctgagggctgttgagggaggaaggaggaaggtcctgaaggaatctcctgtgtcagtgggttagcaagatggaacctcatacccactcacagttaaggcctagaaataccttcaaagaaatatgtagccacacactgcctagtgctgatgacaaaggtgtcagtaatacttgattatttacttgatctatatttaaatgctgaaggatgacaagataagtcgttcctggtgagatgagttagggaggactcttgaaggaagcaaggctttggcagtgaggagggacattccctggagagaagcagtttgtagcagggtgtaaaaggtagttctatagaggatggcagtctgtttttgccctgccctgccaggtgacctgacacctcatctcctttcaacttaggcaagtctcctggcttgtgaaggcctagcaggtgtgagtttggttcccactgcagccagcaagaagatgatgctgagccagattgccagcaagcaggccgagaatggcgagcgggcaggtagccctgatgtgctgaggtgctcgagtcaggtacagcgcttgagtccattgtggcacctggggatcgggtggcccaagctctctgccaggagataccaagctctgattccttgatgcttcctcatagggaagtggggcaaggggatccaactggggaatggatgaacattggtatttcagaaagctaaggaaggtcttttgtgtgccttcaactcttttaagaccaggtgcttggagaggaaatagttgtatacttcctctaagctttcggggcaggtggtttactctcatttatgaattttgtctgagagctgcattgggtctcatctcatgttccgagatgggctatgagtttagatttgatttgtcttcaaagggtcaccgaaaagacagtgataagtcccggagccgcaaagatgatgacagcttgtctgaggcctctcattcaaaaaagactgttaaaaaggcaggtaatggggtgatcccccaaactcatacagtttggtaatggggtaatattcctccttcttccctctaccatgtaacctggagctttccctagatgctttgatctctgatagccagtgagtgagtcccccagatttcatccagagactaccttggtagttgatctcctgcc

SEQ ID NO: 9629 - DNA, 2300 bp, Homo sapien
cttctttgaagaaatgtctttttaagtcttttgctcattttgaaagttgggttgtctttttgttgttgaattgtaagagttcgttatatattaaggatactcatctgatatataatctgcaaatattttctcccattctgtgggttgtcttcgctctcttgacattgtctttgatgcacaaaactttaaatttttgatgaagtccaatgtatctgtttttccttttgttgtttgtgcttttggtattacagctaagaatccattaccaagtccaagattatgaagatttacctatatactttcttctaagaatttatagttttagtagttatatttagggctttgatctcttttcagttaacctttgtatatggtgtgaggtggggagggggtccaacttcattcttttgcatgttgaaagcaccttttattttttgagaaaaagtggtggcgtgtgccactacacccggctaatttttgtatttttagtagagacggggtttcactatgttagccaggctggtcttgaactcctgaccttgtgatctgcctgtctcggcctcccaaagtgttgggattacaggcatgagccacggtacctggcctttttttaaagatggagtttcagctgggcatgtaatcccagctcatgcctgtaatcccagcactttgggagcctgaggcaggtggatcacttgaggtcaggagtttgagaccagcccggccaatgtggtcaaaccctctctctactaaaaatacaaaaactagtcgggtgtggtggcgcatgcctgtagtcccagatacttgggcgcctgaggccagagaattgcttgaatctgggaggcagaggttgcagtgagctgagatggcgcgactgcactccagcctgagcaagactccatctcaaaaaaacaaaacaaaacaaaaaagacagagtttcactctgttgtccaggctgcagggcagtggcacaattgcagctcactgcaacctctgcctcctgggatcatgtgattctcctgcctcagcctcctgagtagctgggattacaggcgcccaccaccacacccagctagtttttgtatttttagtagagacggggtttcaccatgttgtccaggctggtctcgaactcctgacctcaagtgatccacctgcctcggcctcccaaagtgctgggattacaggcatgagccactgtgcccagccccagccccattttttgaagacagtttttctcattgaatggtttggcacccttgttggaaatcaattggccacagaagcatagtttatttctggactctttcaattctattccactgatgtataatatatgtgtatccttatgccagtaccacactgtcttctttttttctttttaagagacagggtttcactctgttgcccagggcaaagtacagtgacacgatcatagctcactgcagcctcaaactactgggttcaagctgtcttctcaccagcactgggattacacgcatgagccactgcgaccagccaatgctgtcttgatcactgtagctttgcagtatcttttttacaagattattttggctatttggggttccgagcaattccatataaattttaggatcagcttttccatttctgcaaaaaaaaaagggccaatgggatttaactttttgacttatgaagcgtggtaaatgaattacctgctcattttaaaaaattaatatgtttttttaaaatcaggaatttgcttggctttcctgaaggtcactcaaggtattaccctgtctccaggctctttcttcaatctagattatctttgtgcaaagtacagaaagtagaaaatttttttgccaacactggcctttctccccttatcccagacctgcagagagttcttgtggtctaatcttcattcctcttgctaccatgtcaaccaagcagaactattcttccttgactctttcacacactccctcatctgctccagctttcttttctttaattcccagtcactgaccctcttctcttatttagaatccaagattgtaaaagccgccaagtatgtcagactatttattcaacttctccactttgcagatgtggaaactaaagcccagagagaaagtctgacttgccccacagccagtgagtgactgcagcagcaccagaatctggtctgtttcctgtttggctcttctaccactacggcttgggatctcggtaaatagaactgggtgcagactttagtgctttcaggctcagtccccaaatcctttagtaggccattttgcccaccttggccacat

SEQ ID NO: 9630 - DNA, 2300 bp, Homo sapien
ctactgctgcaccctgtactcttcccttcgccctctgtgactcccctcaagcccctcctccgtgtcctaccttccctgggacagtgccttgcctaccttgttcctggctctcttcattggtgacctgtggttatgacaaaaaagttgaggatgtgggagtaggggagagaagagtggagggcggaaagcagaagaagaaagtgaaagaagctctagaggaaaccacagggcctgtggggaaggagggtcattgccgtggtaacccctggttgtgggggaagggtataggtcctggctatcccatagcctgaggccagccaagcccacccagagaaagagcccctcctctccaattgtcccctcctagcagctacacctctgcaatccatctgacatttattgagcacctactataagatgggcacttggctaggtgtggtggctccagcagggaagccttgtagagccagtccctgcctacaaggagtgctccttctggtaggggagatcgacctgtgaacacagacctcatgtctagttccctctcaaagctcttagtgatctgtatgggccaggagcaaatcccattaatattttcctgctctccctacgggcttcatccttgccttggcttcagctgttgttcctgcactctctgcttctcccagttcacctcctccacccctttcccaggatccactactgtgttggctcctggttccccaatcacatgctctgagcctggccctatgcctctctcttccaagtttccagttgtgtggaccttgaatttctcaaagcctcttcacttctcacctctgctacttctcatccctactaattctcttatcaagcccttacttagtatgtgccaggtagtcttgtaggcaattgatatgaattatctcttttaattctcacgacaatcctgtgagtcttgctggacagatgagaaaacagctgcaggcaggtttaagtaactcagctaagctccttactactagtaagtagtagagccaggatttgaactctagcaacttggctccagagcctatgtagtcaagcacacttatataatgtatcctgggttttcaaaatgaacaagtctgtaatttctggcctctctacagtacttactgcccctattccctcctatcatgttccttcctatataagtaaatggagagatcatgaattttggaggcaggcagacctggatttaaatcccagaccagccgagtgtgcctgtaatcccagctactcaggaggccaaagtgggaggattgcttgagtccaggagttacagaccagcctgggcaacacagcaagaccctgtctcaaaaataaaaaacaggctgggcatggtggcccacacctgtaatcccagcactttgggaggccgaggtgggcagatcaattgaggtcaagagtttgagaccagcctggccaacatggtgaaaccccgtctctattaagaatataaaacgttgctgggcatggtagtgcacccctgtaatcccagctattcgggaggctgaggcaggagaatcgcttgaacctgggaggcggagtttgcagtgagctgagattgtgccatgggacagtgagctgagattgtgcctgggaaacagagcaagaccctgtctcaaaagttaaattaaattaaaataaaaaaaataaaataataaaaatttaaaataaaaatcttttttcttttttttttttaaatcctagactagctacttactagctgtgggaccttgggcaaaattctttatttcctgcttccaagcctcaatctctgcatctgtaaaattggggcttgggggaatattaacccctatcttatgagattgttgtgagggttaattgtaatatgttacgttcaacacatgacaggggttcaataaatgggcttctttcttccagatctctgtattgtccactcccttggctcagccccacccctatctgcaccaccttctagatcagtcacccccaccaaccccaaatcttccccaccctggggagtgtcacttcctcctctgccgtctcccagatcagtacacaaaggctgctgctgccgccagaggaaggactgctctgcacgcacctgtgagtaccagggcaccagcccttctgcctcctctccttacaagctctggcccacctggtcccaacctcttgggaagagggctctgacctggataccgagggtcctgtccagacttgagaaaggctctgaactcctttctgcattcctaagatcccctgacctggttccctcctccagtttcaca

SEQ ID NO: 9631 - DNA, 2300 bp, Homo sapien
tcttctttctttctctttcttttctttctctctctttctttcttttttttgtggggttcgggtgactggattcagaaatgggtatttggggttgggggaggagaagggagtttacactgggttggaaagagcagtgcattccctctccatccctgcttcaagccccctagtcagccttgccaccccgaggtttcctcgccatccacaagtcaggccttttcccagccccggcagccccccgcccctcccccgcgcccgccatccctcgcctactctggcaccccttcctgccctttattcttccaacaggcgccccactcctgcagcaccccagtgcgccccccacccggtacaacagattcttagaaaagcgcgccccgccctggcccagccacagccgcctggcgggggaagggccgggccgggcgccgctcccgctccgcggcgctgcccgtgtgagcggcgctgacagagccggctgggcaggcaggccgggcggcccggcggctgagggcggggcgcgggggagggggggatttccgggagtcgccgctgctggcgctgtccggggccagggtccccccattcggccctgccgggccagggcaaacttctgacgtggccagccccccgcccacctcacccccttctccgccgggcgagggcgctcagtgccggaaggggcaacccagggaacagtgttgcggccttggagagctgaggggcactaaccgaagggagggcagttatgcctaggctagagggtatttaaagaccctgagaacagtcagtgaccagaagcgcccctattgccgagggagcccttggcagtgagaaactggaggaggggagttggccatcaggggcagattcatcgaggcgcagttggcacggcaggcacagcttatggggtagttttgtgctctaaaagtgaagttatgttcgaagaaggagcatcgagagagacggtcgaggcgcttagggggcgtcagttgcgggataaggcttcggggactcggagggaggcggcccgggccgcggcggagggcggactgctcgggctaggaggggtagactctggctgcgctggagggggcggggggactccgcggcagcgctgaagacggcctgggcggggtggggcggggccgggtcaggaggaggtgagcgcgctcggccacccgccccgaggggggttcccagagagttcacggcgggagcgcgctccggccctaggaccgcgggtggggagacgggaaggaaggaggaggcagcgcgcgccgagccgcaggaatgcacttttcggccctgaagcgggcgcgcggagggcgagggcggagccaggcctgggaatgagaggggtggaggtagtgcaggtcccgagcctcaggagagcagctgcgcgcggggacctccacgttcccctctccccagtcatccttaacacccctgtattgactagtgtgaaaaagggagagtttggggagagggaaaactctgaaaggaaatgcttatgcttggttcctcctctccttcttccaaccccgacctgggcacgcgcctcagtgcaaatgcatgcaaagcctatgagctgtggagagtatgcctgcaagcattctcccgagcaaggtgtgtttgcacaaacgtgtgtgcacctatgattttatatgcgtgctcacatgtatgttcactcttgcatatttgcaaattcttggtgcctgataagataaatgcatgcacggatgtgtgtctaagcaagcgcgcgcgccgcggagcgagtgtacgtatgtgtatgtgtgcgctccactctcagctttgctcatctcggtgcccggcccccttcgctctccaagccccaccccccacccctccaggcttcgcttttaaaaaaggtctccccagtgctagctgccgaagcacccagataagagctggacggaggctaaagcggcagccccagcttcgcgccccgcccagtccctttcccctgctggggatcccccctcttccccgcccaccccttacccgcatgcagcccagcgccctatgctagccctccccctccccccctgctggagcggggcgccgccgggggaggagggggaatcggctgcgggtccttggtgtttccagcacccagtttcccttcaagccgggtcgcgatgtacgactgtatggaaacgtttgccccgggtccgcgacggctgtacggggcggccgggcccggggccggcttgctgcgcagagccaccggcggctcctgtttcgccggacttgaatcttttgcctggccgcaaccc

SEQ ID NO: 9632 - DNA, 2300 bp, Homo sapien
ggaacatggggatgggggagtcctctagtagcttctcacccttgtcattggaggggttaatccacctggaatgtggcctggccagttgagctgtggcccaggggcctcaggggcccccaaactcctggctccatcagggcttaactagggatgagaacttcggaggggaataggagaaggaaaaggagagggaccctggaggcttggagctcagacttttagggcctgcgaagacactgggctaaagagtttgagggtgctgggtgtatgggtggtgccatggtgaggggcaggggatgcttcattcataagggctgagtgaaatgtgatggcgttggggtctgggttcttgtaacctccatgacagtttaccctcaagggcttgaaggccaaggtagaggagagaaagaaaaacaagcaaaaacaaaaataaaaaccagaggtataaagactgagagctatacatcctagaagcaaatactgatggaaagaaaggcagatatacccatcccctacctctgggcctgcccaccccatggtctctctgcattttagtctcttggcccttctctgcccttcatagcagtctgttatggctctgactggtggagatacccaggctggggtgacttttcctccctagcccactaactgcctagagaggtgagaagttctggggctcctaggaaagccaaacttttcctttgtcaggggatgaagataggaaccacctacttagcactaggattcccatctcctctctctacctccttctcctccccttcccctgggctcaggtttaaactcttagagggaagcctacttttgggggaggagaggttgcagggagaacttcctagaaacagggagcccagggataagaaagaaaaggaggcagaatgcccgggcgtgtcgctcacgcctgtaatcccagcactttgagaggccaaggtgggcggatcatctgaggttgggagttcgagaccagcctgaccaacctggagaaaccccatctctactaaaaatataaacattagctgtctcaacaaaacaaaacaaaaaaagagagagagagagagaaaaaaggaggcagagaagtaaagtcagctgaccaagaagcagctccttggcatcatacacttggcacaagtgggggctccatcaacatccttagatttgaagcagtgggtacaagagggcttacagggtgaggaaaaattggagacaggaagaattgggagaggaaactggaagagggagtgttgaggaaaacagagagggaagtgcttactgaagcagagtatggaggaaaataaggtacaaagagaactaatatgagacatttacatcacatttcctatgtgccctacattatgccagacacttgacattggttaatttatttagtcctcacaataaccatatgaggtaggccctattattagtcccaagtgacgcatgaagaaactgaggcacagagagattaagtgacatgcctgaagtcccacagctagcaagtggtggggtacagtccaggtagtctggctctagagtctgtccccctaacctttgccttgtactcctctccagagagctgtagggctcccaggttataacagagttatgtttgccttctccaggatggtaaagagtttgaatctgggctcccccacttgcagccatgtgaccttaagccagtcacttcacctcagtttcctcatatgtgaaatgagaatcataactcccagttcacaggactgatgtgaggtttaggtcaaatgcttagcccagttgtggtgattcatgatcacttcccaatctaggagttctctccaccagaagtccttagaccatcattcaccttgggacctcagtttaacctttcctggagctcctctggagagtttctcagagcctgcataaccccctgccgtgccctctctaccacactgcaagggccctgagccagggcaggataaactgtagcagcacagagggagaagactgcaactgagagagggtcacagggcttggaacctcagagtggtcattctctcatctctcctttctctctctttctccctaggacttttggaggcccagtgggcaggccaggcagggcgggtacggagcctcccaggctggggcagtgggcatgggcaggggctgtggctgaagacctcgcccgcccactgcagaccccaggggactctcacaccgcagctgccatggccaccaataaggagcgactctttgcggctggtgccctggggcctggatctggctacccaggggcaggt

SEQ ID NO: 9633 - DNA, 2300 bp, Homo sapien
ggcagagacagttggaattctgactccctctgttttcagaggctaccccaagtgttttgtcccccgatttaggcttccctggccccatttgctacctagatgcactgtctcagagctccagctgtagatctttgggaccaaccctaagcccctctacagaaggagaagggaagagttcagagagatgatactcagcagggagaggagagtgtcacgggtggtgcctggttctgtgtcagaatgcctggccaaggagggagtggtgcccttgcctggttcatgaggacaggaggctcattcactgtaaaccaagtacagatgtgctggaagggggagggggaaattagggccacattcccaaaccacaactgggcccgccctcctcccaccagccaccactagggcagggcaggaggggttaactttgcagcctcttggcaggagccctgccacacaggcggggcgccatcccaccccagcctggacgcctgggtccaactccctgacacccgcccctcccacactgctgagagctgctcccagggtaaccaagcaaagtcaacagcagctaggccacctggggacgggaccctggagtatctattcctagctcttcctatccctggagtgaaagagagggcttgtctgcacccccattgccatctcccattccctgaggtaaccacagcatgcctcttctttcccccatctccttcacctgactttggctaccaaaagcagcctttcccaggagggaggacacctggcccccaggggggagcaaggacaaagccaagtaattccagtatggaaaatgtgacgtgacccaggagtctgtgtcccaggtcctggtcaccctgcgagcattgctggggaaggtactttgggtatgtctgtccagcctatcagcctagctcagactctccccttctcctctttctccctcccaactccagtccccatgggagtgtttgggatccgtgcacagagcttggactgcagacccattcttttctctccctctgtcctcagtagaatgcagagtgaaaccactgggttctctcactctagggttgagagtctgtctatgttgaagcagataatgcccccatcagacacagacactcactctcggcactggcatgcgcacgcgcttgcacagacacacacacacacacacgcacacacacacacacccggagtcaacagcattcatggcacatctaccaggcaggcaggcaggcaggccggtgctggctagggcagacacacaccctctgcctgggctttctctctcacacccagcccaaggctcctcccactcccagccacagttcctcctgccctcctctccagcctctccccttccaaatccaggcctaaaggtgggggacaactggcagccagggacccaggcgccctaactcctggagcttactccaggcaagatgacagggaagatgtctgtgagccctggcctcagcacccccagcaacagccactagtcaaccagtttgctcctgggaccaaaggactgaggtgggctaggggaagggagaggctacttggatctgcaggtgaaggctgagcaaagagtaagggcaggagcatctattctagatctggcatactcctgcccggccaatccagcactgggagggagtgggtaccgccccattgcctaccctggggaggcgccagagactggcctcgcaagagtcacagcctggccacagacaactcaactagtccccccaaaaggcagaaaggagaaaagtgccagagagaaaaggttggcatcacggggccaggacactgacctcctctgccagccgtgcccggcctcccagaggatggagtcacggaagcctagcaaatgggaagggcagagacccaggcgtcccgggccgccccgcccagtccccctcccgcccacccatccctccgccccccagccccagggcacagaggagggagccgggcaggggcaggcaggggagggaggagcgagggcgggagggggaggagggagttgggcagggagggaggttggggggggggtggggagggagaaaaagaaagaaaatattttccgtgtccccgcctgcagagtcagtgtgcggtttgggagaaaatgtgtcggatattttggggcggtcacgtgggcgggcgggctccgagaggccccgggacagtcccagcctagagccgtgcccccccaggagccccccagtacggcgagccccggacattgcgacgctccatccaagagactgcccgacgccgggacctcggggctc

SEQ ID NO: 9634 - DNA, 2300 bp, Homo sapien
tgaacccgggagccggaggttgcagtgagctgagatcacgccattgcactccagcctgggcaacaagagtgaaactccgtctcaaataaaaaaaaaaaaagactgatctgctgcgcaagtaggtgaactagtataattgcagaaactatgtgagcttggaactggaaagattgggtcctgcttctaactgccttttactatgtaactctaaacatgttacctaacctttccaactctggttagtacctactgtatggattgttgtcagtcagatgagataattcacctacagcagttggactaaaccttcttaaaactccttaggtacataataactgataagtgttattatgttaatatgggccagtacttttgatagtaatttacataacttattcatttattcatagactatttatggaatatttatgattaatacttatcaatgactgctttaagtatagggaatacaggtgaacaaaacagataaaaatctgtagggaaagagatagtaaatatttacttatttacttagagacgaagtcttgctctgtcccctaggctggagtgcagtggtgtaatcttggctcactgcagcctccgcttcccaggttcaagcaattctcgtacctcagcctcctgagtaggtgggattacaagcgcgcaccaccaggcccagctaatttttttgtttatttgttttgagacggagtcttgctctgttgcccaggctggagtgcagtggtgcaatctcggcttaccgcaacctctgcctcccaggttgaagcaattctcctgcctcagcctccaaagtagctgggattacaggtgcacaccaccatgcccagcaaatttttttgtaattttagtagagacggggtttcgccatattggccaggctagtcttgaactcctgacctcatgatacgcccgcctcggcctcccaaagtgctgggattacaggtgtgagccaccgcgcccagcaattttttgtattattagtaggcatggggtttcgacatgttggccagactggtcttaaattcctggcctcaagtgattcacccaccttggcctctcaaagtgttgagattacaggtgtgagccaccacacctggccaagatagtaaataaataaacaaggaaaatacatagtgtactgcagagtaaaagcagcagagagaatagaaaattggaaggaaagtaggtagattactgtgctggaggtggtggtgttgctattttaaacaggagggccatggaaggcccctctgatcaggtgacattttttaaaattttattttattttttatttttttgtgagacagagtctcgctctgtcacccagactggagtgcagtggcgtgatcttggctcactgcaacctctgcctccctggttcaagcgattctcctgcctcagcctcccgagtaggtgggattacaggtgcccaccaccatgcctggctaatttttatatttttttactagcgacggggtttcaccatgttggccaggctgatcttgaactcctgacctcaactgatcggcctgcctcagcctcctaaactgctgggattacaggaatgagccaccaggcccagccaagatcaggtgacatttgaacagagaactggaggaggtgggggggggaaccacgtggatatcttggagaagaactgtacagggaacagtgtgcaaaagccctggtggtagccaacatagatgggagggagaggagcaggggatgaagtcagaggagtggcagagggtcagaggacagagggtcttgtaggccattataaatacttcggcttttacccttagtgagatgggaagtcattggaggctcttgaggagatgatacggaagctgtagagaggttaaatagtttttccaaggtaaaacagcttgtaagtggcagaaggtagggaattaagctccaaggctgaagttcttaaccccatgctgccactgaactttagccttctttatttgggcattgctatcctgtgacttcaaagaaactgggacactgggaagttatgcggcttgcccaaggccacacagctggtaagtgacaggggcaggactgcgccttagtctgtctgcagcccgactccaagttctttacaccacaccgcctccctcaggtgtctggaccatactggcttctcttgcatggaggtcactgcagtgggagaggaggcaaaccaaggagaccttctcggcttcgggcagcggtgctgttccttaggaagctccaacccttggctctaccggactgcgggcatctttccc

SEQ ID NO: 9635 - DNA, 2300 bp, Homo sapien
caatgactgctttaagtatagggaatacaggtgaacaaaacagataaaaatctgtagggaaagagatagtaaatatttacttatttacttagagacgaagtcttgctctgtcccctaggctggagtgcagtggtgtaatcttggctcactgcagcctccgcttcccaggttcaagcaattctcgtacctcagcctcctgagtaggtgggattacaagcgcgcaccaccaggcccagctaatttttttgtttatttgttttgagacggagtcttgctctgttgcccaggctggagtgcagtggtgcaatctcggcttaccgcaacctctgcctcccaggttgaagcaattctcctgcctcagcctccaaagtagctgggattacaggtgcacaccaccatgcccagcaaatttttttgtaattttagtagagacggggtttcgccatattggccaggctagtcttgaactcctgacctcatgatacgcccgcctcggcctcccaaagtgctgggattacaggtgtgagccaccgcgcccagcaattttttgtattattagtaggcatggggtttcgacatgttggccagactggtcttaaattcctggcctcaagtgattcacccaccttggcctctcaaagtgttgagattacaggtgtgagccaccacacctggccaagatagtaaataaataaacaaggaaaatacatagtgtactgcagagtaaaagcagcagagagaatagaaaattggaaggaaagtaggtagattactgtgctggaggtggtggtgttgctattttaaacaggagggccatggaaggcccctctgatcaggtgacattttttaaaattttattttattttttatttttttgtgagacagagtctcgctctgtcacccagactggagtgcagtggcgtgatcttggctcactgcaacctctgcctccctggttcaagcgattctcctgcctcagcctcccgagtaggtgggattacaggtgcccaccaccatgcctggctaatttttatatttttttactagcgacggggtttcaccatgttggccaggctgatcttgaactcctgacctcaactgatcggcctgcctcagcctcctaaactgctgggattacaggaatgagccaccaggcccagccaagatcaggtgacatttgaacagagaactggaggaggtgggggggggaaccacgtggatatcttggagaagaactgtacagggaacagtgtgcaaaagccctggtggtagccaacatagatgggagggagaggagcaggggatgaagtcagaggagtggcagagggtcagaggacagagggtcttgtaggccattataaatacttcggcttttacccttagtgagatgggaagtcattggaggctcttgaggagatgatacggaagctgtagagaggttaaatagtttttccaaggtaaaacagcttgtaagtggcagaaggtagggaattaagctccaaggctgaagttcttaaccccatgctgccactgaactttagccttctttatttgggcattgctatcctgtgacttcaaagaaactgggacactgggaagttatgcggcttgcccaaggccacacagctggtaagtgacaggggcaggactgcgccttagtctgtctgcagcccgactccaagttctttacaccacaccgcctccctcaggtgtctggaccatactggcttctcttgcatggaggtcactgcagtgggagaggaggcaaaccaaggagaccttctcggcttcgggcagcggtgctgttccttaggaagctccaacccttggctctaccggactgcgggcatctttcccgagcactgcacggaagaaaagaaaattggcacttatttcagggtggcccctcaggcatccaagagccagaggagcaggtgtcacgggatggcagcgagcgaggccaggccaggagaagcaaccgcagcctcctatggtcgccccttcccgacccaccccaggcgtcaggagttccgcgcccgggtaagggaaggagggcgggcgggcggggcggggcggggttttggcgccgcgcccccgtcacgtgatgaagccatcatggcggcggccagaggcctgcccggctcccggaagcaggctgtgaggggcgggagcgctgctggaacccgagccggagccggagccacagcggggagggtggcctggcggcctggagccggacgtgtccggggcgtccccgcagaccggggcagcaggtgaggcggagtctgggcgaggtgcaa

SEQ ID NO: 9636 - DNA, 2300 bp, Homo sapien
ggagtttgagaccagcctggccaacatggtgaaactccgtccctactaaaaatacaaaacattagctgggcatggtgatgggtgcctgtaatcccagctacttgggaggctgaggcaggagaatcacttgaacccggaggcagaggttgcagtgagctgagatcacgccattgcactctagcctgggtgacaagagcgaaactccgtctcaaaaaaaaaaaaaaaaaaaggctgggcatagtggctcacgcctgtaattgtagcacattgagaggctaaggccggaggatcacttgagctcaggagttcaagaccaacctgggcatcatagtgagacctcgtttctatcttaaaaaaagaagaaaaaagtaggtataataaaatacgttgggaaaaagtcctagaatgcttgctaaacaataggtaaatgaacactgatagctaaggtgtaagcaagaggaattgagtactgtgatgaataattttcttttgggttttttttgtttgtttgtttgttttttggtttttttttttttgagacagagtcgtctcgctctgtagcccaggctggagtgcagtggcgcgatcttggctcactgcaagctccgcttcccgggttcacgccgttctcctagcgcagcctcccgagtagctgggactacaggagcctgcaaccacgcccggctaattttttgtatttttagtagagacggggtttcaccatgttggccaggattgtctcgatctcctgacctcgtgatccgcccgcctcggtctctcaaagtgctgggattacaggcgtgagccaccgcgcccggccttttttttggttttcttttttgagacagagtcttgctctgtcacccagactgcagtacagtggcgggatctcagctcactgcaacctccgcttcccgggttcaagcgatcctcccaagtagctgggactacaggcccccgatgccacagcagctaatttttgtatttttagtagagatggggtttcaccatgttggtcaggctggttctcaagtgatccacccacctcggcctcctaaagtgctgggattataggcgtgagccaccgcgcccggccttcttttctttctttttacaaaaataatcttccctgctagattctcaactcataaaagagctctatgatgatggagaaggatgagttatccagtagagttcatcagcgacaagctgataaccacttttgagctgaattctttggtggaggaaggaaagagacagctgaatctgtgtttggggaagtggttagtacttaaaaacataagccattaaagactgtgaaatatcccagggaatgaatttccatagttcttcctgctactcacaactcccaccccaccccactaccctctctcccccatcgaagagcaccagatcttgtctttctcatacaaccaatagaaggagtaaggctggaaggcagagagagagctggaggtcgctacgggtactcattgtagttcccctagaaaaccatctttaaaataatttcgtaggaagttgggcgtggcggtgcacgcccgtagtcagcactttgggaggctgaggtgggaggatcacttaagcccgggagtttgaagctgcagtgagctgtgatcacgccactgcactccagcctgtgtgtcagagcaagaccctatcaaaaaaaaaattcgtagaagtctaagccctttttttctagtaacccaaaccgcgtgagttcctaagttctttttgttatttctcttctcttgaaacttaaactcttgcctgagctctgaagataaaggaggaaaaggggtggcattaccgatagcgactaagcgacaggtagctgagaaactgagctctgactggaaaaaagggggaaacccgcacccccaagaggccctaacgcgcagagcagcaagaccctccggggcgccgcgggagcgcgcagcgcggcgggtaaactacaactcccagcgtgccgcgcgcccggcgttgcgccgcgcccgctgattggcagccgcggatatttgaaaggagggtctggcgcggaaaacgaaggttacattttggatcctcgcggagtactggtcaggcggttaagtcctgtacctaggaaagagggcgagctctggggcggtaaggccggaagggactcgtgagcgtgggtacgtgctgaagtgaaggggatccccagcgctgacgcgaggagaggcgtgggtggctcctggagggagtgtcgggaggccttgggactgccccgggccgctgaagggctgggccgaggcctctgg

SEQ ID NO: 9637 - DNA, 2300 bp, Homo sapien
aacccaaaccgcgtgagttcctaagttctttttgttatttctcttctcttgaaacttaaactcttgcctgagctctgaagataaaggaggaaaaggggtggcattaccgatagcgactaagcgacaggtagctgagaaactgagctctgactggaaaaaagggggaaacccgcacccccaagaggccctaacgcgcagagcagcaagaccctccggggcgccgcgggagcgcgcagcgcggcgggtaaactacaactcccagcgtgccgcgcgcccggcgttgcgccgcgcccgctgattggcagccgcggatatttgaaaggagggtctggcgcggaaaacgaaggttacattttggatcctcgcggagtactggtcaggcggttaagtcctgtacctaggaaagagggcgagctctggggcggtaaggccggaagggactcgtgagcgtgggtacgtgctgaagtgaaggggatccccagcgctgacgcgaggagaggcgtgggtggctcctggagggagtgtcgggaggccttgggactgccccgggccgctgaagggctgggccgaggcctctggggtagcgcggcgagtggtgtggtagtgcggtcggggatctgcccggaggaaggaagagcggaatcgtccttttataacgggagcacggcgtcctggcgtgggttttctccccgatgaaatttctgatgtgattctttgcctccttccacgaccttcagccctcttcccttcctccagttagcttcattaacaatcttctctaattggtctccttttccctagctctccggtgtcatgaggagcttcaaaagagtcaactttgggactctgctaagcagccagaaggaggctgaagagttgctgcccgccttgaaggtgggggtgctgcctggctcgggatacacctggctttccaaactgagctgttttgtgtttgccttttgaagagatggataagtaggcgaccctctctgagtaaccctatttctagttactttctctacctctttcctgcctttgctagccccattcatatctttctctactcctaggagttcctgtccaaccctccagctggttttcccagcagccgatctgatgctgagaggagacaagcttgtgatgccatcctgagggcttgcaaccagcagctgactgctaagctagcttgccctaggcatctggggagcctgctggagctggcagagctggcctgtgatggctacttagtgtctaccccacagcgtcctcccctctacctggaacgaattctctttgtcttactgcggaatgctgctgcacaaggaagcccagaggccacactccgccttgctcagcccctccatgcctgcttggtgcagtgctctcgcgaggctgctccccaggactatgaggccgtggctcggggcagcttttctctgctttggaagggggcagaagccctgttggaacggcgagctgcatttgcagctcggctgaaggccttgagcttcctagtactcttggaggatgaaagtaccccttgtgaggttcctcactttgcttctccaacagcctgtcgagcggtagctgcccatcagctatttgatgccagtggccatggtctaaatgaagcagatgctgatttcctagatgacctgctctccaggcacgtgatcagagccttggtgggtgagagagggagctcttctgggcttctttctccccagagggccctctgcctcttggagctcaccttggaacactgccgtcgcttttgctggagccgccaccatgacaaagccatcagcgcagtggagaaggctcacagttacctaaggaacaccaatctagcccctagccttcagctatgtcagctgggggttaagctgctgcaggttggggaggaaggacctcaggcagtggccaagcttctgatcaaggcatcagctgtcctgagcaagagtatggaggcaccatcacccccacttcgggcattgtatgagagctgccagttcttcctttcaggcctggaacgaggcaccaagaggcgctatagacttgatgccattctgagcctctttgcttttcttggagggtactgctctcttctgcagcagctgcgggatgatggtgtgagttaaggacctggaggtagggtggggacgtggtctgtggactcactaccagcctagggtatttggcaagatctggaggtcctggctccctccttgttaagctgctctctggacagtgcctagcgagccagcaaacagcctagtctatcctgagagggcagtggc

SEQ ID NO: 9638 - DNA, 2300 bp, Homo sapien
gctgaagctaataataaaacattgcattgatggcacattttgtctccccaatcacatatacttctagtacttcatttgccccacactagacctcataaagctgagtgggagcatagattattttcatttgttaaatgagaaagttgagaagtctatgtttggggccagcatcacagggtaggaggcaggattcaggtgtgggcctgctggggccagcctgcttttctcagccatgtggcccctgagctgcaggtgtgggggctttgtggcctgcatttgatccattgttggttggaaagaaaacaaaaattttacctccaaggcgggcggatcacaaggtcaggagatcgagaccattctggctaacacggtgaaaccccgtctccactaaaaaatacaaaaaattagccgggcgtggtggtgggcgcctgtagtcccagctactcgggaggctgaggcaggagaatggcatgaacccgggaggcggagcttgcagtgagctgagattgtgccactgcactccagcctgggcgacagagagagactccatctcaaaaaaaaaagaaaaaaagaaaaagattttacctaaaaaataataagccatactaatatttgatatgttatacagtaatacatatatatacacacatatatatacacgtacgtatataaaacacatatattagagaattgggccccaaggtcgctcaggaagtgcttgatgccatttctccccgttttgtaattcttgttctgccttctccccagagtttggtggggtgactcagcacctggactctgtgaagaaggtccacctgcagaaggggaagcagcaggcccaggtcccctgtcctccacagctcccagaggaggagctcttcctaagaggccctgctctagagctggtggccactgtggccaaggagcctggccccatagcaccttctacaaactcctccccagtcttgaaaaccaagccccagcccatacccaacttcctgtcccattcacccacctgtgactgctcgctctgcgccagccctgtcctcacagcagtctgtctgcgctgggtattggtcacggcaggggtgaggctggccatgggccaccaagcccagggtctggatctgctgcaggtcgtgctgaagggctgtcctgaagccgctgagcgcctcacccaagctctccaagcttccctgaatcataaaacacccccctccttggttccaagcctcttggatgagatcttggctcaagcatacacactgttggcactggagggcctgaaccagccatcaaacgagagcctgcagaaggttctacagtcagggctgaagtttgtagcagcacggataccccacctagagccctggcgagccagcctgctcttgatttgggccctcacaaaactaggtggcctcagctgctgtactacccaactttttgcaagctcctggggctggcagccaccattaataaaaagtgtccctggctcagagccctctaagactcagggccaaaaacgttctggacgagggcgccaaaagttagcctctgctcccctgcgcctcaataatacctctcagaaaggtctggaaggtagaggactgccctgcacacctaaacccccagaccggatcaggcaagctggccctcatgtccccttcacggtgtttgaggaagtctgccctacagagagcaagcctgaagtaccccaggcccccagggtacaacagagagtccagacgcgcctcaaggtgaggtgggactgttgctaggtggtggtgatggtgttggatggggttagtcctggaggagagtgttttatagagcaggtgtccctgtggaatagctccccagggcctagtggaactttaatctcctgctatctgcagtaccccaatatcttgcttttttgttttttgttgtttttttgagaaggagtctcgctctgtcgcccaggctggagtgcagtggcgcaatctcagctcactgcaagctccgcctcttgggttcacgccattctcctgcctcagcttcccgagtagctgggactacaagcgcctgccaccatgcccagctaattttttgtattttcagtagagacggggtttcactgtgttaaccaggatggtcttgatctcctgacttcgtgatccacccgcctcggcctcccaaagtgctggggattaccggcgtgagccaccatgctcagcctctttttttttttgagacggactctcactctgtcgcccaggctggagtacaatggtgcgatctcggcttactgcaacctccac

SEQ ID NO: 9639 - DNA, 2300 bp, Homo sapien
gctgcacctatagcctatggcttgcctgtctctctgcggtaaccccatggagctgtcttattgatgctagaagcctcataactgttctacctccaaggttagatttaatccttaggataactcttttaaagtgattttccccagtgttttatatgaaacatttccttttgatttaacctcagtataataaagatacatcatttaaaccctgttttgcgtagtttatctgagaacatttaaagacacggcatgactgcccccttcctactatgtggtactgtaagctgacaggaacaggttacagcagatcaagtttgagtgcttggggaagaaaggcaaagacacaggacaaagcctgctgggcctggctgggcctcagcagacaaatctggaggagaaaggggcatcaaaatgctaagtagagacaggcccaaggaagggtagtgatagaccctttgagagtgttttggccaggtaccatccgtccgtcctgtcttcctgccgcaggtatctttggagtggcactagtgttttgttttttgtttttgtttttttttgagacagagtcttgctctgttgcccatgctggagtgcagtggcgcaatctcggctcactgcaacctctgcctgctgggttcaagcgattctcctgcctcagcctcctgagtagctggaactacaggcacatgccgccacgtcccactaatttttgcatttttagtagagacagggtttcaccatattggccaggctggtctcgaactcctgaccttgtgatccaccctcctcagcctcccaaagtgctgggattacaggcgtgagccaccgcgcccagccatggcactagttttaatgcctcagttgccctgcctgcctcctaagtagatgttaaaggctactgctgtctgcccatgtacacctgttacacttaccaatgtgtaactttagcagtagagtctgtggatctgtggagttctagtgtggtttttctctccaattgttaagctcaagggaagcaagtatcttacactctcacgtatccctcacatacagcacatggtaaaacctttttttttttgagacagagtctagctctgttgctagtgtgcacaatcacagcctactgcagcctcaactctccagctcaagcgatcctcccacctcagcctcccatgtagctgggactacaggcgtgtgccaccagcccggctaatttttgtattttttgtggagacggggtgtcgccgtgttgcccaagctggtctcaaactcctgggctcaagcaatctgtccttctcggcctcccaaagtgctgggattgcaggcgtgagccaccatgcccggccaaaatattttattgattaatttgtgctgtacttggttgacaatggcgcttccttgctgttctcccaccacctcactggcaacgggtgataaaccctttttcagatcctactacgtgtcagcctacttccggctgggggaagatggttatagcgagaggggaagaattggttcagtgatgagaacatggttggttcctgccttcgacaagctttcaatctaatgcctgtttttttccaaggacaattcagaacggtctgacaagggatttttttttttttcctgcctttcggcctcagaggccatctgggaaaaagagtttagaatttccctgccatttccatgccgtgctgggaggaacatttgaaatcgggcctggcggggtaccagcaggcagcaatagcaagcggggtggagaggagcagggccaggcccccgagccgtcgccatggcaatccagcctgctttccagtagcttataccacccacgtggagtagcatacactactttgtaatatcgtggttgtgtcgtgagaactttaagattttgcagttccttgtaggcaggagtcctgtttgctgctactttacaatactaggcttaagacattttatgaaatgaactcacacaacagtctctgagaggctcaagcccctccttcccttccgggacggaggatcatagagctgtctggcgcagcgaggcctcccggcgccaccgagacgcgcagaggacggctagagcgttgctcgccgagagacttcctcttcgttaagtcggccttcccaacatggcgcagtctattaacatcacggagctgaatctgccgcagctagaaatgctcaagaaccagctggaccaggtggggacgggccccagaggcacctctttcctgctctacatcccccttgcccacgcgtacttctcgcgcccggttccaagttggcagcctacc

SEQ ID NO: 9640 - DNA, 2300 bp, Homo sapien
agagagtgagagatgggatgaggcaggacaagagggtgttccagcatacatcattttctccttaaagaaccaacttctctgtcttctttccatttggagttataggtattgttctaaggcctccagattattcagtccttatgccttgtagctttttggaaaaagagggtctttggaggccaagcaggctggctggcggaatcatggctcatgctgggctggctagtttttcccttaattcttgcttctcagatgtatgtccctgggaagctgcatgatgtggaacacgtgctcatcgatgtgggaactgggtactatgtagagaaggtgagtgagagcatgtggatgcccctctaaacagggaagggaaattcaggggaagctctagagcgcagcatggccagagggagtctccttttagccccttattcacctctgatcttgtagacagctgaggatgccaaggacttcttcaagaggaagatagattttctaaccaagcagatggagaaaatccaaccagctcttcaggagaagcacgccatgaaacagggtaagtttttcctggggcacctcttgaccctatctccataataaggaacatggattgcagtgtgaaccacgggggtgtcccctttgctggagtaaaactatgtcttagtttctctttggcatctttagaatctgtgtattgcataatcactatctgtagattcctgggttgagcgtttgagaaatttagaggaaggaaatcatgtttgtgctttggtggagctcctatttaatgacgatggaatgggggaatgagatgaacacacaggaaggaatcatgatccaaacgaactaaataccagcaattataaccccgactgcacatgagaatcactcaggaagtttaaaaagaaagcttgggcccattccagattgactaaatcaacttggaagtcaaaggaggggaagttgtaccaaggtctgtttttttttaaaaaagctcccctctgttataatcaggattcagaaccagtgttccaaaggtaaaaatctttccccatcatagttttctgattatgtcagactcatttaataccatattgtgttcgtttttatatctttggttagcaggttttttttttttccgagaagagtctcattctcaccacacccagctgtgttagcatattgaccgatgcattgtagaccctaaatttgtgttagtgaccccacagtggatcactgagttaaagttttattaacaatgccaggcgcagtggctgacgcctgtaatcccagcactttgggaggccaaggcaggtggatcacctgaggttaggagttcaagaccagcctggccaccatggtgaaaccccatctctactaaaaatacaaagttagcccgggcatggtggtgcatgcctgtaatcccagctgttcgggaggatgaggcaggagaatcgcttgaacccgggagacggaggttgctgtgagccaagatcgtgccactgcactccagcctcggtgacaagagcaggattctgtctcaaaaaaaaaaaaaaaaggttattaacaaactgtagttagtcggtcgcctgtccttaaacttgcctgtcacttctccttaactctaggttctcctttttgcttctaacctttgactcttatttttttccacagccgtcatggaaatgatgagtcagaagattcagcagctcacagccctgggggcagctcaggctactgctaaggcctgagagtttttgcagaaatggggcagagggacaccctttgggcgtggcttcctggtgatgggaagggtcttgtgttttaatgccaataaatgtgccagctgggcagaatgttggtcttttcttggattaagcaagggactggtgatgagatggggggtgtggtcgagagtgtgggccccgtctcagagcctgatgcgcaggggtgatgcgatgcgcctcttggaggctccatcgcagggccctttgaccagctggaagaaatcctaggctgggagtctgctgctgctcactctgcagagctggttgccaagggaacggttggcaagcggaagtggggctgcgctggcgcttcctcttccgggtcggcgctcctgcctccctgcagggagctgcttatgggacaccaattcctgcgcggcctcttaacgctgctgctgccgccgccacccctgtatacccggcaccgcatgctcggtccagagtccgtcccgcccccaaaacgatcccgcagcaaactcatggcaccgccccgaatcgggacgcacaatggcacct

SEQ ID NO: 9641 - DNA, 2300 bp, Homo sapien
ttctacatcttcaaatcacttaacatttgttaatgaactctgaccaaggtcacctagttgatggcacagttatagctattaacctctgacatttgtttagcactttaaaatttattaaatagcttcattttattattttgtatggaaaacaaccatatgaaataattaggacactgcaaatgagaaaagtgagactcaaagaattcaatgttttttccaaagtctgtaagaggggcccccattctctttctttctttcctttctttctccctctcccttccctcccatttttttttgttttgttttgttttttgtttttttttttttttgagacggagtttcgctcttgttgcccaggttggatggagtgcagtggcgcgatctctgctcactgcaacctccgccttccaggttcaagggattctcctgcctcagcctcccgagtagctgggattacaggcatgcaccacaatgcctggctggttttgtattttttagtagagatggggtttctccatgttggtcaggctggtctcgaaatcccgacctcaggggatcagcccacctcagcttcccaaagtgctgggattacaggcgtgagccaccgcgcccggctctttctctctggcttgcttgacagggtctcgctctttgacccaggctggagtgcagtggtgctatcttggatcattgtagtctggattctcctatctcagccttctgagtagctggactaaagacgcttgccaccaccacgctggctaacttttgaattttttgtagatacagggtcttgctattttgcccaagctggtcttgaactcctgggctcaagagatcagcctcggcctcccaaagtgctgggattacaggtgtgagctaccacacccagccttacttttattcttaagtgagaataactggtttgggtgtatctaggtccaatctctctgtgactcactttcctcatggtgacagaacagcacccaccttatggggttgtaaagattataaaagcacttatcgtaacaagtgctcaggaaatagttttgcagcccggcaaggtggctcaggcctgtaatcccagcaatttgggaggccaaagcaggcagatcacttgaggtcaggagtttgagaccagcctggccaacatggtaaaacctcgtctctactaaaaatacaaacttagctgggcgtggtgaagcatgcctgtaatcccagctactccagaggttgaggcaggataatcgcttgaaccggggaggcagaggttgcagtgagctgagatagcaccactgccttcatcctgggcaatagagcgagaccctgtctctcaaaaaaataaaataaaataaagttttcctttttgagacgaagtttccctcttgttacccaggctggagtgcaatggtgcgatcttggctcactgcaacctccccctccggagttcaagagattctcctgcctcagcctcccgattagctgggattacaggtgcccgccaccacgcccgactaatttttgtatttttagtatagatggggttttcagcatgttggccaggctagtctgcgaactcctttcagatgatccacccacctcgacctcccaaagtgctgggattacaggcgtgagccaccgcgcctggcaggaaatgttagttttccaaccgtccccacctccctttccaggacgcctaaccgtgtgggtgcagcactgttcctcctctctgaggcttttccctcagctttccagccagctgcctgtgacatagcctgtattttcctctgggtgatccacaggcctgggaggattaatttggtacttccctgaatgtggcttatttcgggctttctaagcgctaagatagtgagtgggagaaggtgttcgggaattcggagctgggaaaaacagtagtctcatggaaaacaacagaaaaaaaccccactccagcctggtaaccaacggttggccgggggacgtgtccgcgctgctccccctccggccgccagggggcgcaggaagaagctttggaggtctgtcccgggaccgcgtactcgtccttctttcccgttagtcttttcttcacttccgttgagttccgcctcgccgtttgtcccttgcggtacccgtccgcatacgaatctagcccgggaaccgagttgcgggagtgcggtctgtgccgttccggccaggagtttgccgactgcagacgtcctgcgaaccggcaagatgtgctctctggggttgttccctcctccaccgcctcggggtcaagtcaccctatatgagcacaataa

SEQ ID NO: 9642 - DNA, 2300 bp, Homo sapien
ctttgtctatcagccacctggttcccaaacccttcccctaaaccttgggttcccagagttccttgaggtaaatcaaatcatggggctagaatccagaactcctgggccctaccctgaaattggtgcctacctgctggcgaaactgctgtgcaaccctccgtggacctccatctgctcctgccacctcccagctttttctttggagatctgggagagcaaaaggagcaaggaattgggcactccgagaaagtgaggggatggtgttgcagagtgaggagagtggaaaggatggggctttattcccctgacagggagagctgggagggggagaagtgtgtgttaaggaataacctgtaaaacaaccccagcgggctaagcccccctgtgggagagctgccggtgtcaccacttagctgcccagtcctctctcccataaatacctcagggcccatggcccaggtttcaggtaatagactttttgggtttccctcctaacctggctgcccttccttctcttacttcctattttgttgggaagtccttattaagttctaacttcagttctttctgtggaagagggaattgatgcatggcaatgagaaagggaaccaggagttcccaggaaagtcagatcactctggagaactgtccaccaaaggatggagattaaacccatggtctctaagagatggtaacttggttacccagggatggtaactgacaaggaatatggaggttagggcatttctttttgggggaaataatccaaagaggttaggtgtcggcatgaatgagttgacccaatgaccttctaccgccaccctcactcctgcttgtcttaaattttctcttcatcagaagatccaggttctgccccacaaagtgaggtaggcctaggtatcacctccaaacagtgaaactgaggcactgggaggaagactgagggacccccaagccaataccaagccttccccaactcttcaacccttcctccaggccttgctctggaaccaacctcagtgacactaaaagtttaggcagcagaaacctccacctcagaaccttccatgcctcttcccacaacatacacacacacacacacacacgggcacgtacacacacacaggggcacatacacactgctctcctgatctagaggcaggtgggtgactggggaagcaagcctctccatggtcagctggggcgggtgtggtgcgtgtgcctccagtgcgtcactgtgtgcatttgtgtgtgtccgtctgtgttcattcatgatagtggctgtacccatgtgagtggtactgtgtgtacgtgtgcatgcatcacccctgtgtttggccatgagtgtgtatgtcagtgcgttccagtctctctgtgtgagtgtcgtccccaaccccccatcccccccctggatctctaattagtggtttggggtttgttccttttccctcctgttccttccctcagcagcggcgggcggcagcagcctaggcagcagcagtagcagaagcagcagccgccgagcagcagcaaggactctggagtcagagtaggactgtaggaccggagcctgagtggaacaggagtggagctggcctgggagagagcggatccctcccagcaccctcaggccacccgttgcctgcactctccctgccagacctccagagaggagagactcgggacagccagccccaggttcccccaggtacatgacactggggagctctgggaggggtgcccacagatgcctatgggactgctgccgcgtgtaggacaccggggtccaccatccctttaacctctcccctcagcagccccccgaggaagccctgacaacttgcccatgctgctctcccctcttcctgcttcccaccccttccatgggcgcccctttttctcctctccctccctgatcccttctttggggagctcagcaaatggagcaggaaatttggaccctctgcctccctctctcgccctcctcattggatctggagccttctccgctgggaaagctgtaattagagggtggatccctacagacagagagcagccccccaccccggtcccttctaactttagatctcttctctcccattctcccattctccctccctctcccttttctctctctaccccccccaccccccggctcagctctctccatctgcctggctccttgggacccgttccccagcctcaggatggcgtcctccctgcttgaggtaactgtcccctcttccccccaggaaaccagccacaaccttaatggtcctagtccttgcccacccacctcc

SEQ ID NO: 9643 - DNA, 2300 bp, Homo sapien
ccaaccccctcctcacctgctatctcttctttagaatctagactttctcctcctctgcctcagtttcctgcctgatctaactgggtcgggcttttctgctggtgatacaggaatttctctaaagcttctctttctcaacttctgagttcggggccccggaaagccatctggcacctcagtctcagactcccccccaacaagggggagaccgcgaggtcacagggacaccccaccacgggcacttcctctcaggcagacgggtggggtggcccgtgtaatcagcggacacaattatgtgctatttatactccttccccgcccccccacctgcctggcaacacaaccctcctcctcctcctcctcctcctcctcctccggacctggctatgcctcaggctattttctctgtccttcccaagccattgtctccccatctttgttcctctgggcctgtttctttatctttttagtttctttcctgctctgttttttgttgttgttgttgttgttgtttaaagccacacatctggtcttctgttttcctgtttcctctctcttatacctggtgatatctcttctgattgtcttggactctttcatttgctctgtttcttcttttgctgctttctctttgtctatcagccacctggttcccaaacccttcccctaaaccttgggttcccagagttccttgaggtaaatcaaatcatggggctagaatccagaactcctgggccctaccctgaaattggtgcctacctgctggcgaaactgctgtgcaaccctccgtggacctccatctgctcctgccacctcccagctttttctttggagatctgggagagcaaaaggagcaaggaattgggcactccgagaaagtgaggggatggtgttgcagagtgaggagagtggaaaggatggggctttattcccctgacagggagagctgggagggggagaagtgtgtgttaaggaataacctgtaaaacaaccccagcgggctaagcccccctgtgggagagctgccggtgtcaccacttagctgcccagtcctctctcccataaatacctcagggcccatggcccaggtttcaggtaatagactttttgggtttccctcctaacctggctgcccttccttctcttacttcctattttgttgggaagtccttattaagttctaacttcagttctttctgtggaagagggaattgatgcatggcaatgagaaagggaaccaggagttcccaggaaagtcagatcactctggagaactgtccaccaaaggatggagattaaacccatggtctctaagagatggtaacttggttacccagggatggtaactgacaaggaatatggaggttagggcatttctttttgggggaaataatccaaagaggttaggtgtcggcatgaatgagttgacccaatgaccttctaccgccaccctcactcctgcttgtcttaaattttctcttcatcagaagatccaggttctgccccacaaagtgaggtaggcctaggtatcacctccaaacagtgaaactgaggcactgggaggaagactgagggacccccaagccaataccaagccttccccaactcttcaacccttcctccaggccttgctctggaaccaacctcagtgacactaaaagtttaggcagcagaaacctccacctcagaaccttccatgcctcttcccacaacatacacacacacacacacacacgggcacgtacacacacacaggggcacatacacactgctctcctgatctagaggcaggtgggtgactggggaagcaagcctctccatggtcagctggggcgggtgtggtgcgtgtgcctccagtgcgtcactgtgtgcatttgtgtgtgtccgtctgtgttcattcatgatagtggctgtacccatgtgagtggtactgtgtgtacgtgtgcatgcatcacccctgtgtttggccatgagtgtgtatgtcagtgcgttccagtctctctgtgtgagtgtcgtccccaaccccccatcccccccctggatctctaattagtggtttggggtttgttccttttccctcctgttccttccctcagcagcggcgggcggcagcagcctaggcagcagcagtagcagaagcagcagccgccgagcagcagcaaggactctggagtcagagtaggactgtaggaccggagcctgagtggaacaggagtggagctggcctgggagagagcggatccctcccagcaccctcaggccacccgttgcctgcactctccctgccagacctccagaga

SEQ ID NO: 9644 - DNA, 2300 bp, Homo sapien
cctgacctcaggtgatccgcctgcctcggcctcccaaaatgctgggattacaggcatgagccaccgcgcccagtctatatatttacttattttggagcaaggtcttgctttgttgtcctggctggagtgcagtggcaggatttgagctcactgcagcctcaacctcctgggttcaagcgattcttccaccccagcctcccgagtagctgggactactggcgcacatcaccacgtctggctaatttttgttattttttgtggagacggggtttcaccatgttgcccaggctggtctttaactcctgggctcaagcgatccgcccgcctcggcctcccatagtgctgggattacaggtctgagccattgcgcccggcggcagtttaattccctcaagaatttatagaaaacttttggtggaactattctgggttggaatctaacactacaactcatttgctttgtgaccttgggtaagtcacttctcagcctaaatgtcttcacttataaaatacataatatagctgatacttaataaaatcttccttttaaggatgacatggaatactaactgcctccctgacttaggcacctaacacggtaggcagtcagcaatcacttcacctttttacctgtttaaagcagcagaggcctcagttcttaccttcaaagggcttaaaatagtttaggagaattcacattttaaaacataagaacatataagcaggtgacaacatataagatacaaatactgaaggacatgacctcatcgtgtcattgacaagctattaaggccggctccaccaaaacacggataaagaggaggccagaaatccaggtgcctgcagtaaagtttcttaaccttcgtgattgcaaaaagctggagctcagctatcttgctttatgcataggcggtatttactattaagggggaaaaaatggaagtgacttatccgcactttagcctcaaggcttgaaaagttaaccagtcgtttaagtggttagcgcctttgtctgggggaacttaataaaatcgcgttttctggagtctcacggagactctgcatattggtcagctcagtattaacttattcggtgagtgctgtcaccagatctcgtcccgcctgcattcccagggcttgcagcgacattgaggcatctgcccgcctgtccgaccacccgggaggggggtaagatttgagaggtactttataggggcagttaaatgaagacgcaaacaagtcctagtgttgatgcggaactgcgcgccgaatgccttggctctgacacctgttgagctgcaggactccgctaaagcgtcccacctaatgactgtaacaacgtcccctgaggagggccaatatggcgacggtctcctcttggcatagccctcttccctccctcatgatgggcagctccagtaacgcccattggctaactaggaggcggtgccaggcctacttcgtcccctcattggattgaataactgagggagccgccaattctcctctgccactccaagtttccgccctcagttaattcggcgtttaattggcttttagttcacgtcaatatgcgtcctttcctgtctcttttcagtctaactccaatcataacgttcctggctgcccgcctgatttctgattggttttaatcagcttcatcctctcctattcctgcctacttcttacctctccgcccactaggattttgcccaagcatatcccggattctggttggccgttgttctgtcattcctatcaaagctttgcctatccctacgtctcagggagcccgcctgccggttgactggtttccttccaagccaatcatctccagctcccgcccatcttcacttcctgcatccttcattggcttttaacactgagagggcggtctttttaggcggacaccaggcacgcaacttagtctcacacgccttggagagcaagcgagtcttgccattggataattccaccgtctttcttctgcaagtccctcctttccccctccctcattgggcggggcagcagagaaggggcggggcctaggttgggcttgtggcgcgctgctccctcctccttacccccccctccctgtccggtccgggttcgcttgcctcgtcagcgtccgcgtttttcccggccccccccaacccccccggacaggacccccttgagcttgtccctcagctgccaccatgagcggtaaggatgagtccactccaagcttaggggtgggaggcgagtgagggggcgcgcgcgagggccgaccgggcgatccccgccgtgaagcgggggcg

SEQ ID NO: 9645 - DNA, 2300 bp, Homo sapien
acaactcatttgctttgtgaccttgggtaagtcacttctcagcctaaatgtcttcacttataaaatacataatatagctgatacttaataaaatcttccttttaaggatgacatggaatactaactgcctccctgacttaggcacctaacacggtaggcagtcagcaatcacttcacctttttacctgtttaaagcagcagaggcctcagttcttaccttcaaagggcttaaaatagtttaggagaattcacattttaaaacataagaacatataagcaggtgacaacatataagatacaaatactgaaggacatgacctcatcgtgtcattgacaagctattaaggccggctccaccaaaacacggataaagaggaggccagaaatccaggtgcctgcagtaaagtttcttaaccttcgtgattgcaaaaagctggagctcagctatcttgctttatgcataggcggtatttactattaagggggaaaaaatggaagtgacttatccgcactttagcctcaaggcttgaaaagttaaccagtcgtttaagtggttagcgcctttgtctgggggaacttaataaaatcgcgttttctggagtctcacggagactctgcatattggtcagctcagtattaacttattcggtgagtgctgtcaccagatctcgtcccgcctgcattcccagggcttgcagcgacattgaggcatctgcccgcctgtccgaccacccgggaggggggtaagatttgagaggtactttataggggcagttaaatgaagacgcaaacaagtcctagtgttgatgcggaactgcgcgccgaatgccttggctctgacacctgttgagctgcaggactccgctaaagcgtcccacctaatgactgtaacaacgtcccctgaggagggccaatatggcgacggtctcctcttggcatagccctcttccctccctcatgatgggcagctccagtaacgcccattggctaactaggaggcggtgccaggcctacttcgtcccctcattggattgaataactgagggagccgccaattctcctctgccactccaagtttccgccctcagttaattcggcgtttaattggcttttagttcacgtcaatatgcgtcctttcctgtctcttttcagtctaactccaatcataacgttcctggctgcccgcctgatttctgattggttttaatcagcttcatcctctcctattcctgcctacttcttacctctccgcccactaggattttgcccaagcatatcccggattctggttggccgttgttctgtcattcctatcaaagctttgcctatccctacgtctcagggagcccgcctgccggttgactggtttccttccaagccaatcatctccagctcccgcccatcttcacttcctgcatccttcattggcttttaacactgagagggcggtctttttaggcggacaccaggcacgcaacttagtctcacacgccttggagagcaagcgagtcttgccattggataattccaccgtctttcttctgcaagtccctcctttccccctccctcattgggcggggcagcagagaaggggcggggcctaggttgggcttgtggcgcgctgctccctcctccttacccccccctccctgtccggtccgggttcgcttgcctcgtcagcgtccgcgtttttcccggccccccccaacccccccggacaggacccccttgagcttgtccctcagctgccaccatgagcggtaaggatgagtccactccaagcttaggggtgggaggcgagtgagggggcgcgcgcgagggccgaccgggcgatccccgccgtgaagcgggggcgggcgggaggcggcggcggcggcggcctaggtcccgcccggggcggagggaagggagggagacggggcagtggcggggcctccgaggaggagggggatgggccgcccgccccgggggagggggcagcgtggcctcgcccgccccctgcccgccccggccacgggggacgggccttaccccccactactcggccgcccgcctgaggctcctcccgccgggggctggagccgcgggggcggcccgagcagcgaaggccccgcccgggccaaccgcctgcctggtccgccctctggtcgccgcctgctccaaggccctcctccccccactttccgtagatttcccttcccccccgccccccaccgtcccgccctttccacgcccctcaccccgaaaccgccctttccctcagggcccgccctccgccccgaaaccttctgactactaac

SEQ ID NO: 9646 - DNA, 2300 bp, Homo sapien
ctggtggtgatagtttgaactgtaccctccctttttagttagtggcctgttggcaggtaatgatgcatattttctcaacaatttaaattcaaatgtccaagtatagtattaagtggtaattttttttcattgttgaattttgtacgtctttcaggcagtatagtgtaatacaaagaatagagccggccgggtgcggtggctcacgcctgcaatcccagcactttgggcggccgaggcggagggatcacgaggttaagagatcgaccccttcggccgggcgcagtggctcacgcctgtaatctcagcactttgagaggccgaggcgggcggatcacgaggtcaggagatcaagaccatcctggctaacacggtgaaaacccgtctctactaaaaatacaaaaaattagccgggcgtggtggcggccgcctgtagtcccagctgctcgggaggctgaggcaggagaatggcgttaacccgggaggcagagcttgcagtgagccgagatcgcgctactgcactccagcctgggcgacagagcaagactccatctcaaaaaaaaaaaaaaaaaaaaaaagatcgaccccatcctggccaacatggtgaaactccgtctctactaaaagtacaaaaataataataaaaataagactagaacctggactttggagtcagacctgcctaagttcaaattccagctctgctatttcctagctgaatgactttgggcgacttacgtaagttcagttttcttacctataaaatggaaataataaaaataataggccaggcacagtggctcacacttgtaatcccagcactttgggaggccaaggcgggcagatcacgaggtcacgagatcgagactatcctggccaacatggtgaaaccctgtctctactaaaaatacaaaaattagctggacatggtggtgcgtgcctgtaatcccagctactcgggaggctgaggcaggagaatcgcttgaaccagggagtcagaggttgcagtgagccaagatggcaccactgcactctagcctggtgacagagcgacactcggtctcaaaaaataaataaataaaataataataataaatatttcaggggagaattagatgagatgattgtaaaatgcatagccctagctgtgccccagcacatagtaggtgcttgataagaaatttgttacctccttaataatgggtatttgttcagcctgtgaaccaatgtgttttttttttttaagtaaaatccacggctaggcatggtggctcacgcctataatcccagcactttgggaggccgaggcgggcaaatcacctgaggtaaggagttcgagactagcctggctgacatggtgaaaccccgtctctactaaaaatacaaaaattagccaggtgtggtggcaggcgcctgtaatcccagctactcaggaggctgaggcaggagaatagcttgaacccaggaggcggaggttgcagtgagctgcgatcgtgccactgcactccagcctgggggagaagagcgagactccgtctcaaaaaaaaaaaaaaaaaaatccacatagcaaaatttaccattgttactgttttcaatgtgttttttaaaaattcaggtaagttttgtatactttctgattcttaagttggaaaacaaggtaacctctaatatgggctgtgaggccttcctctgcccaagcagttgcagatatgaaccctgaatataaagagatcttaggctagaaaggatcttgggcagagctgaatggctctaagcatttgacctcacattggtttcctcctgagaagagtcaacagagtccagcatcttcttccaaggtcagggaagggcaaagatttgaaattaggcatcactgggttctcagctgggcctccaagttcccctcctctcactatgcagagcaaagaggaggttgcagaagagaagaggatatgagattggttctctgctcctccctttctttccctgctttccccacacccaccctctcccccacagcagccttctcccccacagaggctgggataggatgaggggggcggagttggggactgagggatcagaagccccaggatgccctgtatctgaagaaagatttggccaggggcagctgtgctggcttatgctcttctccttctgctgctgccatcctccagcaagatgctagggtctttggggctttgggcattacttcccacagctgtggaaggtaagtgtctacagggaggggaagggtctctccatccatccagcaagggaaaggggcgcttgaagcaagagcc

SEQ ID NO: 9647 - DNA, 2300 bp, Homo sapien
tctagaaccagaaataccatttgacccagcaatctcattactgggtgtatacccaaaggaatataaatcattctattacaaacatacatgcatgtgtatgttcactgtagcactattcacaatagcaaagacatggaattaatccaaatgcccatcaacaatagactgaaaaactgtggtacatatataccatggaatactatgtagccataaaaaggaatgagatcatgtcctttatagggacatggatgaagctggaagccattaacctcagcaaactcatgcaggaacatgttctcactcaagtgggagctacacagtaagaacacatggacacaaggaggggaacaacacacactggggcctgttggggggtagggtcaggggagtgagaatattaggaaaaatagctaatgcatgctgggcttaatacctagctgatgggtttattggtgcagcaaaatttgtgcagcaaaccagcatggcacacatttaactatgtaacaaacctgcacatcatgcacatgtaccccagcactaaaaataaaaattaaaagaaaaaaagtttaaaatatttcaaatgctttagtttaatatgacatatttggcataaaatttattgtcttaaatttttttgtatcccacttttttttttttttttttttgaaacagagtcctgctctgttgcttagtctggagtgcagtggcatgatcttggctcactgcaccctctccctcccaggttcaagcgattctcatgcctcagccttcccactagctgggattacaggtatgtgccaccatgcctagctcactttctttctttctttctttctttttttttttgagatggagtctcgctctgttgcccaggctggagtgctatggcgtgatctcggttcactgcaacctcccgggttcaagcgattctcctgcctcagcctctcaagtggctgggattacaggcacatgtcaccacgcccggctaatttttgtatttttagtagaaacggggttttaccatattggccaggctggtctcgaactcctgaccttgtgatccgcctgcctcggcctcccaaagtgctgggattacaggcgtgagccactgcgcccggccacttgtattttttttttttttttaaaggctgggtacggtggctcacgcctataatcccagcactttgggaggccgaggcgggcagatcacgaagtcaagagagcgagaccatcctggccaacatggtgaaatcccatctctactaaaaaatagaaaaattagccgcgtctgtagtcccagctacttcggaggctgaggcaggattatcgcttgaacccgggaagcggaggttgcagtgagccgaggtcgcaccactgcactccagcctcgtgacagagcgagactccgtctcaaaaaaaaaaaaaaaaaaaaaaagggaggccattgtagggaggccattgtagcaattcaggggagagatgaatccaggcgacagatgatgggaggtttggagcagggaagacagagagaagtggagagattccagatatatttgagagacaaaactgataatttggggtaagggaggtgaaggaggcagagggatcacggacgccctccttggtttctggtttaggctacttgacagatggcggagctatgcaattgagagagggaatcctgggagagattatgaaatctctgtatcttccgcaagaatgtttgtttgcttcccttgcgagtgtaagacggagccgggaacattgaggcttggggctgggactcagcagctcttctgcccttgccgagaactctgtctatatctgtattacaacacttaccatagtgtattcattttacaaggtattgcacccagtgaaccatgaggtaagagagcaagggaagagtttcttctcggtgtctctaggactttgcccagcagctggccccgccccctccagcgctctccgcctagccccgcccccaggagatttccggcttctcggtactggcctagccgtaaagggctccgctccgcccctagagcaaccgtttcctcctcagtcggaccagagtgattgattagtttgttgtctaatcatcagtcgagcggccacataattaccaattaggcagtagcagaggcgggtgccgaagcacggggtctgggtgactaggaagagccgagactgcgaaggagaacgcagcaagcccaggcggcggtggaaaggtgatggggtatctggattccataggtttttccttttccccttgctaggtcaagagtctcttcgcagct

SEQ ID NO: 9648 - DNA, 2300 bp, Homo sapien
tcctgaccttgtgatccgcctgcctcggcctcccaaagtgctgggattacaggcgtgagccactgcgcccggccacttgtattttttttttttttttaaaggctgggtacggtggctcacgcctataatcccagcactttgggaggccgaggcgggcagatcacgaagtcaagagagcgagaccatcctggccaacatggtgaaatcccatctctactaaaaaatagaaaaattagccgcgtctgtagtcccagctacttcggaggctgaggcaggattatcgcttgaacccgggaagcggaggttgcagtgagccgaggtcgcaccactgcactccagcctcgtgacagagcgagactccgtctcaaaaaaaaaaaaaaaaaaaaaaagggaggccattgtagggaggccattgtagcaattcaggggagagatgaatccaggcgacagatgatgggaggtttggagcagggaagacagagagaagtggagagattccagatatatttgagagacaaaactgataatttggggtaagggaggtgaaggaggcagagggatcacggacgccctccttggtttctggtttaggctacttgacagatggcggagctatgcaattgagagagggaatcctgggagagattatgaaatctctgtatcttccgcaagaatgtttgtttgcttcccttgcgagtgtaagacggagccgggaacattgaggcttggggctgggactcagcagctcttctgcccttgccgagaactctgtctatatctgtattacaacacttaccatagtgtattcattttacaaggtattgcacccagtgaaccatgaggtaagagagcaagggaagagtttcttctcggtgtctctaggactttgcccagcagctggccccgccccctccagcgctctccgcctagccccgcccccaggagatttccggcttctcggtactggcctagccgtaaagggctccgctccgcccctagagcaaccgtttcctcctcagtcggaccagagtgattgattagtttgttgtctaatcatcagtcgagcggccacataattaccaattaggcagtagcagaggcgggtgccgaagcacggggtctgggtgactaggaagagccgagactgcgaaggagaacgcagcaagcccaggcggcggtggaaaggtgatggggtatctggattccataggtttttccttttccccttgctaggtcaagagtctcttcgcagcttggggctaggatcttcatttgccttttttcttttttggaggaagggggctgtgtccacatatttaagtatttgaggttcttgggcaacttccttcttacttcgcctcgaggcgtatcctttttttagcctgaggtggggtcctccccagggagagagaaagttgtttgagatcctttcttactctgtgcgtggttaaaggcctccgtactcagttccagggaaagggagatgagtgatggtggggccgagactcgcgggtactgcctacttccgaagagttagacgcttccacctgggtggaggggccctgggaactagattcctgtgttaggaaccaagtaggtattgagggcgaagaaacaagtggaaagagacatttcttttcttttcttttctttttgagacggtgtcttgctccgtcgcccaggctagagtgcagtggcgcggtctcggctcactgcaacctctgcctcccgggttcaagcaattttcctgactcagcctcccgaataactgggattacaggtgcccgccaccgcgcccggctaatttttagatttttagtagagacggggtttcacgatgttggccaggctggtctcgaactcttgacctcgtgatccacccgcctcggcctcccaaagtgctgggattacaggcgtgagccaccgcgcccagccagaaaagagacatttcttatgtggaagttgtggtagttctccaggtaggagagcctactgtggggtggaagacgttagggctgggctccggtgctaagtccacttcctacctctagaccgtcatcttttttgcctcatttctttctcctcaggctggaggacacacctaaacatgtggaatcccaatgccggtaggtgtttgggggttctgttccacccctaaccctttttctgatgggctctataacaggaagtttctgtatcagctcccctacccccgacctgctgtacccgcaaaagcaaagtccttagtctagagctgaccagtgctttttaatttaatttaatttatttattttttgaga

SEQ ID NO: 9649 - DNA, 2300 bp, Homo sapien
cccctccagcgctctccgcctagccccgcccccaggagatttccggcttctcggtactggcctagccgtaaagggctccgctccgcccctagagcaaccgtttcctcctcagtcggaccagagtgattgattagtttgttgtctaatcatcagtcgagcggccacataattaccaattaggcagtagcagaggcgggtgccgaagcacggggtctgggtgactaggaagagccgagactgcgaaggagaacgcagcaagcccaggcggcggtggaaaggtgatggggtatctggattccataggtttttccttttccccttgctaggtcaagagtctcttcgcagcttggggctaggatcttcatttgccttttttcttttttggaggaagggggctgtgtccacatatttaagtatttgaggttcttgggcaacttccttcttacttcgcctcgaggcgtatcctttttttagcctgaggtggggtcctccccagggagagagaaagttgtttgagatcctttcttactctgtgcgtggttaaaggcctccgtactcagttccagggaaagggagatgagtgatggtggggccgagactcgcgggtactgcctacttccgaagagttagacgcttccacctgggtggaggggccctgggaactagattcctgtgttaggaaccaagtaggtattgagggcgaagaaacaagtggaaagagacatttcttttcttttcttttctttttgagacggtgtcttgctccgtcgcccaggctagagtgcagtggcgcggtctcggctcactgcaacctctgcctcccgggttcaagcaattttcctgactcagcctcccgaataactgggattacaggtgcccgccaccgcgcccggctaatttttagatttttagtagagacggggtttcacgatgttggccaggctggtctcgaactcttgacctcgtgatccacccgcctcggcctcccaaagtgctgggattacaggcgtgagccaccgcgcccagccagaaaagagacatttcttatgtggaagttgtggtagttctccaggtaggagagcctactgtggggtggaagacgttagggctgggctccggtgctaagtccacttcctacctctagaccgtcatcttttttgcctcatttctttctcctcaggctggaggacacacctaaacatgtggaatcccaatgccggtaggtgtttgggggttctgttccacccctaaccctttttctgatgggctctataacaggaagtttctgtatcagctcccctacccccgacctgctgtacccgcaaaagcaaagtccttagtctagagctgaccagtgctttttaatttaatttaatttatttattttttgagatggagtctctgttgcccaggctcactgcaacctccgcctcctgggttcaagcgattctcctgtttcagcctctggagtagctgagattacagacgcatgctatcacgcccggctactttttgtatttttagtagagatgggggtttcacaatttggccaggctggtctcaaactcatggcctcatgagatctgtccacctcggcctcccaaagtgctgggattacaggcgtgagccaccgcgcctggactgaccagtgcttttgtcttcctcagagttcactgtctccctcctctccctagcccttccagggacattcccccttttctccccaactcaagtttgtctcccctaccctccattcttctttgtcatctttccgtttccctttaagtattgagtgagaaagaatctctttctttttgttgtttgttgttggagactctggggaattctaatgtttattctctgcttcttccaccagggcagccagggccaaatccatatccccccaatattgggtgccctggaggttccaatcctgcccacccaccacctattaatccaccctttcccccaggcccctgtcctcctcccccaggagctccccatggcaatccagctttccccccaggtgggccccctcatcctgtgccacagccagggtatccaggatgccaaccgttgggtccctaccctcctccatacccaccgcctgcccctggaatccctcctgtgaatcccttggctcctggcatggttggaccagcagtgatagtagacaagaagatgcagaagaaaatgaagaaagctcataaaaagatgcacaagcaccaaaagcaccacaagtaccacaagcatggcaaggtcagtaccctctggagactggctagggaaggagtcccccc

SEQ ID NO: 9650 - DNA, 2300 bp, Homo sapien
gccgaggcaacagagtgagactccgtctcaaaaaaaaaagaaaaaaaaagaaacccaggatccaagcaaaagccacacattatatttggttgttattgccttaagcatttttaaattcctgcttttgttttatttactaactaagagatgggtcttgctctgtcacccaggctggagtgcagtggtgccatcataactcactgcagccttgaattcctcggctcaagtgatcctctcgccttagcctcttgagtagctgggactacagatgcatactaccatgttcaactaattttttttttttttttttgagacggtgttttgttcttgttgcccacgctggagtgcagtggcgcagtcttggcttaccgtaaactccgcctcctgggctcaagtgatttttctgcctcagcctcccgagtagctgggattacaggcatgcgccaccacgcctggctaattttgcatttttagtagaggtggggtttctccatgttggtcaggctggtcttgagctcctgacctcaagtaatccgtccgcctcggcctcccaaattactgggattacaggtgtgagccactgcacctggccaatttttttcttttttttttttccattgcttttttgacaagaccagctagctgtcttgtggaatgttgtgggtttgcaaaatatctccttgtgttgtattaaatttcctataaattgcaaatcagatctaatgacttgattagattaagattaagcacttttggcaagaatatttaatagatgatgtggtgtacttgttgcatttttccaaggaccacacggtgcaaagttgtcctactatgagtgatgcagtttgatcatttatgtacttgggtaaggtggtaactgctagatctctccatttgaagttgcttttaaaaaatttgttatttttgctactcgggaggctgaggcaggagaatcgcttgaacccaggaggctgaggttgtggtgggccgagattatgccattggactccagcctgggcaacaagagcaaaactccgtctcaaaaaaaaatttgttatttttgagacaggctacagtgcagtggccgtcatcatggctcactgtagcctggaccactagggcttaagtgatccatccacctcagcctcctaaatagctaggaccacaggcatgtgccaccacgccagctaatatttgtatttttagtagagatggtatcttaaactcctgagctcaagcgatctgcctgcctcagcctcccaaagtgttggaattatagacgtgagccactacccctggcccatttgaagttacttaaaaaaaaaattacatatatatatatatatatatatatatatatatatatatatatatttgcaaatctgtgtggtgatatttgatatttggtgtcatgatagtatcccgttccctaacaacctttctcaaaattttaatgattgatacacttgcctgaatcaattatttcattctgggttgcaaaatggtgacttttcaactctcattccttttatttctttcattccttctagatttattacatggaactctttaaaaaagagctttcccttatcaattacagatgaactatatacagttcttcctaaaaggaaagttaaatgcttaattctttccttttaagagtaaggagtttatacaatggtcacctctaacgtggcaagttagtttttttccttttcttttttgagtatccctgtagattactatcttcatcctttctctttccacccatccctttttcctcctctccacttcttgatgcatggcgactgctccctctccgcactaacatctgaactttccagccagtccactaggggccactggtttcctttctgcccccacgctccctctctatcgcaattcgtcgcttgctagcagccgttgtctcgctggtgcctacgctgtcaaaggagccgctctaggcttttgggaggccgtctgcattgcgtggggaaggcttggacgacgcaatcgcctcgccggcccccggggtggttagcgcttccggggtcgaagggtgcgcggggttgaaagcaggccgctccgccccgtccccctcccagaccagcagaggcagcagccggagcagccgcagcctgcgccctctcccgcccgcccgccctccgcccgcccgcccgccctccgccgccctccacccgccccggggtctctttcccccttcctcctcctcctcctccacccccccttcctcctccgcccgcccgcggggcccccctcgccttcccgcccgcccctat

SEQ ID NO: 9651 - DNA, 2300 bp, Homo sapien
atgccaccctgcctggataattttttaaaaacgttttcttgtagagatgggagcttgttatgtttcccaggctggtctcaaactcctgacctcaagtggtcctcctgtttcgcctcccaaagtgttgggattacaggcgtgagccaccatgcccagcctggaatttatttttttatttttttattttttgagacagggtcttgctctgttaccgaggctgaagtacagttgtgttaccatggctcactgcagcctcatcttcccacctaagcctacccagtaggtgggaccacaggcttgaaccaccatgtctggctagttttcatgggttttgtagagactgagtcttcctgtgttgcctaggctcgtcttgaactcttgggctcaagcaatcctcctgtctcagcctcccaaagtgctgggattacaggcagaagccaccatgcgtggcctttattttattaaattttatttttttgaaagaaagctagagtacaaactgtttattccttaaccaaggaataaacatgtccttgtctttaggggtcttaagtgcttaagcagtttccaggtctctagttatcagcctagagattaggctaataagtgatatttaaaccgcttaatcttcagaaggctaaatttaactagattaaaaccatgattttggatgcagcacgtgtttatgggaaagactataggctttgaatcaatacagtcaaatctataggtttgttttttttgtttgttttgagacggagtttcctccttgtcgcccaggctggagtgcagtggtgggttcccggctcaccgtaacctctgactcccgggttcaagcgattctcctgcctcggcctccccagtagctgggattataggcgcctaccaccatgcctggctaatttttgtatttttagtagagacggggcttcaccatgttggccaggctggtctcggactcctgacctcagtgatccacctgctttggcctcccaaagtgctgggaatacaggcctgagccaccgtgccccgcctgtttttagttttctaacagggtagaattgatgtaaatagggttgcattgttttatatctttcgtttttgtttttgtttttgttttgttttgttttgagatggagtctcattctgttccctaggctggagtgcagtggtgcaatctcagctcacagcaacctcttcctcccggattcaagcgattctcctgcctcagtctcccgagagtagcctggactacaggcgcatgccaccacacccagctagtttttgtgtttttgtagagatggggtttcaccatgttggccaggctggtcttgaactgctgacctcaggtgatccacctgcctcggcctcccaaagtactgggattacaggcatgagccgccgtgcccggtctgttttatattttttcttaatattcgatttgacttaattttttttttttttttgagatagtctcactctgttgcctaggctggagtgcagtggcacgatcttggctcactgcaactttgcctcctgggttcaagcgattctcccgcatcagcatcctgagtagctgggattacaggtgccagccaccatgcttagctaatttttgtatttttagtggagacggggtctcactatgttggccaggctggtcttgaactccctgacctgaaatgattcacctgcttcagcttcccaaagtgctgggattacaagcttgagctaccgtgcctggcagtatttgatttaattttgacatcatcttttttccccattgcctggccaagtgtaactgcaaaacagattattacttttatccttagcaagtacattccttcagggtgaaggaaaatatatttatggctaattttgaggaatttttcatgagcttttatctttacatcaaaaatagtttgagaggggcatggtatttgaaccttttgtctatggtggattatgacctcgcatgtcctaataagatcacttaccctaataagggtaagtggttctttaatggcagttactagtttccagggatctgcttattgtggtgttctttctttctgtaggacataagcagctctatgaccaatagcacagctgccagtagacccccggtcaccctgaggctggtggtccctgctagtcagtgtggctctctcattggaaaaggtggatgcaagatcaaggaaatacgagaggttagtgacttttgtcgtccttttagaaatgttaactatttgttccaaattggctctttgtatggctaggaaaagttagcaatgagatga

SEQ ID NO: 9652 - DNA, 2300 bp, Homo sapien
ctgccttggtctcccaaagtgctcggattacagatgtgagccactgtgcctggcccctacttcctgtttaactatggaagttacgttgaattatggaagattttaattgtatctagatgttactgaatttggtgttggaatgaaactcgaatggctgcttgagtttttgggagcgtatcgtacatggcacgacagagatcttaattttgttaattgctatattcgaagcacttctcatggtacctggcacatagaatggccttgatgtaaatattttttcagtaacataatgaaaggtgggtgatacttgtggggcttttgcttcgcccagagaactatcattagttgaaaggcaactatttagaaggaccttttgcttgagagtaggttaaatttaggctgttattcacgcttattcttgtctttcagtggctaatttatttttaactctaattcactaaacagtcctatctggaataagggaagagtgggacaaagaacaaaaagggaagattggaaatggataaatatctactagagttttaggctctgaaattgctgctggaggaattggaagagcatgaactgtttttctctgattttgaatttctttttactccaaagagtacaggggctcaggtccaggtggcaggggatatgctacccaactcaactgagcgggccatcactattgctggcattccacaatccatcattgagtgtgtcaaacagatctgcgtggtcatgttggaggtaagccctcaggctcatgctgaaaatggggggagggccattctggggacagagggactgatctatatttagtaagactagaattaagtgaggctgttaaggcttccagtgggggtggggctaaaaggttccctgagttcatattttccttcccctagctttgacttttcttatggtctgtgagcaaaaatagaaactgctaagcagcagtgatcttttggttcacagcagttgtagcagagtcggggagaagatgcactgcatggactaaggaggccagagatttatttgagttcctgagtagctgagttaaattactttttgaattactgtattttggttacatggaaatttgacatgttctttaacaacttgtcactttgtaggagggtattcaaagtgttacatagagtagaaaaatgtatgtatgatgatgtttccgaatgacttacaaggtcctgattatacactattattctattaaaagaatagcaaaattcaggaaaattaagccttttcagatttgtgatatggagttggtttcattggtgagaaatgaaacgaattttttcgtgtgtgtgtgtgtgtgacgggttcactttgtcacccagactggagtgcagtggtgcagtatcggctcactgcaacctctgcctatcaggcttaagcgatcctctcacctgtctccccagtagcttggtctacaggcatgcgccaccacacctggctaattttttttattttttgtagagacgggattttgccatgttgcccaggctggtcttgaactcctgagctcaagccatccacccgcctcagccttccaaagtactggtattaccagcatgagccgatgcacccaacctggaaactggaattttcaagtagagattagaaaaaccttgattgagcctttgaactatttatagatagtgtctgtattattctagacataacacttgagtactttatttgcagttttgaccttatttcctattcaggccaaaaaaatgtgagatactaaaaattatcaacaaaaatatacgtttaacagtttttcatgtccattaaatttatctaaaattttggaaatagtgccgaagattattacatggacatctcccttgatgagaatcagtttgaattgtgtagtccttggacttactgcattaaaggcaaataactttcagtagataaattgagattagatctagccagagacaatttggtaggtaaggggatggaaatagtttttaatttaactgacctgtgtgagctaaagccacacagctgaagcagctttgaaaccttatctctttttgtttttttcccctctgactctctcccagtcccccccgaagggcgtgaccatcccgtaccggcccaagccgtccagctctccggtcatctttgcaggtggtcaggtaagaaaattctcatttgtgggctagaatgaacagagattatatttgaaatgtcaactttgccagcatcacaccaagccactctgcatgcttgctgaaacctatactctggccatagtttga

SEQ ID NO: 9653 - DNA, 2300 bp, Homo sapien
gctatcttgtatacagggaggaagagtggggcttggtcagtcgaggcattgctaatctcacttcccacattttcattaagaaacagttatgtatattttgcctttgattgcagggaacttggctacctttataggattccccggaacaaagtcatatttagggttcaaagaaggccaatttgggtctgaccatatttgtgagattccatctactgcctcaatctctggcctcccccattctctagttcaactctggcttcctggctagttgaaatgtctttttccccccactgggtggctgtccgtgattggtttttaataggaactgttttcctccttttgtaggcctataccattcaaggacagtatgccattccacagccagatgtaagttttgttttcacttcttgttttgaaaagctccctctcccatccaaaattgtctcactcctctctcccaagtagccagaagtgagttgggtcttcagcatttgcagtattaagttgttttcttcacaaggtcaatcccatattttagccctttaatcagggtaatgccttgtttgccttttaacatttaacccctgaaatttaattcagcacattagcttctcctttccccctgtgtttcagattaccctgtttctaaaagggaaatgttccatggtatactgtgatttgttatctcagggcatagtttaaattgacattgggactgtgcttccttgcatgcagttctcttttccatgagggtaatgggaggttgggtttgcccttgggaactcctcaatctgagatgacaatttgaaaagtatttggagggatggggaaggggcttatgttacacagagagggataggaacctgaacatttcagaattcaactcaaacctttcttgctgctaaaacctcctatttaaaagtgccggtatttagacttcaagggcatttttttctgcacttttcttttatccttactaaccttttcaggtgctgagcattattagacttgggaagttgagtttcggtcttggttagtggtaggccccaggagagagggaagtagacgtgaagaaggattattttatgacagtcaggacagtttatatagatgaataaaaatagctgtagtagtcagtggtggcggtgatgggactaaacccagtatggtttcttcacctctctcctccttgcagtctccctgcccccctcatctccttccctctccccaatactgatgaaaccctgcatggtgtgttttccctagcaccactgcacagtttgtttacctagcctgtctgtgcttgtccctgcggcaactgttgcaatggctgcaaactaccttcattaagtagcctccaagggggatggtcgttgggcaagtgctgttgcttttctattcccacacccaaaaggcattcattctcttccaggcacccattctatttctaacccttacccttcatattctgccaatccccaggattgtgatgcaagccccatccctaccctctgttgtagtttgagtagtagagtcaattttgggaatcaggacctgcattttcaaattcgaatgtgcttgagccctggctctgttaaatcttctaatgccaacctcctgtttcctccttgcagttgaccaagctgcaccagttggcaatgcaacagtctcattttcccatgacgcatggcaacaccggattcagtggtatggatacctcagtgtttatttctgtaaggtgtagtgcaagagagaggccagtcccaaggtctcagcttgacatctgtttaaaacaaacttcgttatccagcatcctgctggtttaaacttgcctgtctactatggctaagcccaaggaggtaatgtgtttgttaacgtggttttcatttggggtcagttattctaaaagaaaaaaaaagccctggaaggtttgggggtgaggtttggggatgcttgtcaggcaaagggtaggctgatatttctttgagcccatcctgactgctgcccccttgatctgatcagcaccccctttctctccaccagcaattcacaggcttgggtagagaccatccatttgtgccaaattgtgtagtgttttttttgtttttgtttttgtttttattttgtttcgtttttggggcttttctgtataaggaataacttgtccgatagggttaggatgagaccaccaaactcattttcacttgtatcttaacaggcattgaatccagctctccagaggtgaaaggctattggggtaatgattaaaaaaaaaaaaatctgtagtattctactgttat

SEQ ID NO: 9654 - DNA, 2300 bp, Homo sapien
aatggagtgagattccttggggttctttgctggggtcattttaatagccagtggcttactgatttgttttttaagacagagtctcactctcgcccaggctggagtgcagtagcacaatctcggctcactgcaacctctgcctcccaggttcaagcaattcttctgcctcagccttctgagtagctgggactacaggcatgcaccaccacgcccagctaatttttgtacttttaatagagatggggttttaccatattggtcaggctggtcttgaactcctgaccttgtgatccacccgcctcggcctcccaaagttctgggattccaggcgtgagtcaccatgcccagccagcttactggttttattccttccagatttcagttgctcaggccattctccaaggtgtcagactcctttcagaatcattccctggctgcaatttatagctacatgcaagctactggtcaggcatcgtaatagatgctctgtgcaagaggcttctgaaattccaccacgtggatatttgctctttatggtactttctggcctgtgcagctgtctccccaaaagctgttaaaagacaaggcatctgcttacagctctccctgttcaatatctgctttttgctgttgtgccactcacccgctctctgagaagttcctggtgtggaatgggcagggagctgggttcagggccagggatgacctctgaaggaggtgggtccagtgggatttctgagccctgggagcacatgtcatcagaccgctcatctggccgctcatcagtgttggtgctgccaacttcaggtgtgccactgggggaaggttcactagctgtgccttcctccccatctgatggattctctgagctgaaggtagatagtgactggcgcatgttcaggctctgaggccacctacatgttgaagagggggattacagcttggttctgcccctagcagaaaacaagaatgccattaattcttgtaatgccatcacttacctctggcttgatgtcagctctacttcactgtctacctctccttcctcctcttccgatgagatgccacgtttctgcaggagagatggggtggggggggtctgattagaagtggaaagaggtcactaagaatccaggagaagggaacatagttacgaagggtgaagtagggaatggcttaaaattgagcataatgtgggggattagacttggaccccagggaggataaggaaaaagggaaagagcttgggagccttcccatactttacctgacttcgggtgacggcagccctgtacagcagtgcagctggggtcaagtgctgggacccagcccggcttcctccccggcctgaggtcccttcccttccagttcccagaagccccacaccttcaccaggccctactggaggaggtggttcccctttggctcccccaggtgaatctgggctggtggagccaggggctgagccctcacttggtggggtgtcaccccgggccggaggtggtgagccaggatccccagctccgcctgtggccccccggccccgggaccctagtgctgctgacagcaggtctggggacgatgaagacattttgcggagcaggaggtcatgatgaagcccacggagggcgggagggcaggcctcccaggctgagggtccccctcctaggccccctgggcttcctggtcctccaggttcatggggtggcacagctgtacgaagcccaggcaggtccccacagctccccttggcgctggccttgcggtgacgggtcttgccacggcgactccgtcctggtgagggggggcccttaggacacccaggaagccccaccccactcagggctgcatctagtttagggagcaaagactccgtcttgaggatatctggcctggaagaagaggaaaagtaaaaggttaagactgccaaatctatgtactcaaagcactccctaaccttggacactaaagtacacatctccctgctaatatacctgttgccacttcagtatccctcttgccatattggaaccacagtactcatgtcccaccttttgctatggggtgacagcttctgtggcacattcctcttcttgataagcttctccattgtgtttccatgcaggaggccccgggaagggtgtggcttcagcaggcctgggcacctccgctctaaagcttgctctcgcctaaagatccaggcaccttctcagctgggcaaatgaccaggaaggggcaccccagtctcagtaggacctctaaggcaggcacagctccagggcttggtgcataaggacagg

SEQ ID NO: 9655 - DNA, 2300 bp, Homo sapien
aggaggatcacagcttgaaggggagggggaccaacgcctgggcatgcaggaacaggtgctctctgactaatcttcaggtccagcctgctgtgtgtgtgtgtgtgtgtgtgtgtgtgtgtgtgtgtgtgtgtgtgtgtgtgtgtgtgtgtgtgtgtgtgtgtgtgtgtgtgtgtgtgtgtgtgtggagatggtgggtatatcagtccttgcccttcctttccttccctagagggggccaaaactctccctcctccttccctctctctcttcctgaggatgagtgggaggagatgttctcttgccctctgtcctttaagtctgtcccccaatcatcctccaccccaccccaatacggtcctttccagctctggaggcccttcgtctccaagctgggccgcggcatccctccgctccattcccttccttcccagccccacaggcgtcgggtccaggtccccagttcctccatccccacagcctcagcatccccacgccatcaccccgcaccaggccacatctgcatcccgaccctccctccacgcccggatcccaggacccagacccatccctgccccccacccccccacaactcggccaggctctcacctcgggggctccgcggccgcagcacaaaaggcggcgctgctgcagctccgctccggatgctgctcccgcctcctcctccttctcctcctccttccctcctccccccgctgccctccaccggacccggggcgctgtcacaggcgatgctcgtgcggtgtccggatgcacgggtgtcagcttcagctttctgcccccaccccccgacccctagccccgtccctgctcggcttgaactcccgctccttccagggcccccgcccctggccccccgggacggacacgccctgagcgggggatgctgcgatggagccgccggcctcttaaaggagcccgctgctgccatccggcgcgctccaggctcgtacctggcccgcctgggccccgcgcctccctgctggcggtgtcctatggaggtcccacctcaggcctcaggctgattccacaggaaccccctatgacccgtcttatagactcctttctacatcggagagagcagcccctcagttgggatccctagcgctctggcattgctccccctatcataccgatcttgccagctctccttcccttgattgtcaccactcactccaatttcacccacttggaattcactcggctctaggccccatcctcctccagtgttcctggatgacccctcattatcatttcaagattcctctggacctccaaccccggctcagagtaagacatctttcttgaccccttctcagaacactcattagaaccttttttttttttaatgtggtctctccctttctctctccaaggtcacaagatttccctcagcccagtggttgtgcaactttgggggaggaggcaatggggctctaggactaaacaatgcgcgtctgctcaacacccagatcagttgattaatcttaggcggccaaaattcacttttgctctcttcagctgagagacccaagactcatggaagagggaacaagaccaccaaggtgcctagtccttctaatcctgtcgtcccacattacagcctgattatcaggccccagaggtttcctcgccagttaaagagaggttcactagagcggttctaaaaaggtttcacaaaagaagcaacacctgaagggaggtgaaggacgacctaggaaaaggaagcaagttctgtgtcacggaggcccaagggcaaggggcttaggctgtgggttgaggggactgtctgagacggacttaaacctgcaccagctccagagccctgcggaaacagagatcggtcccctccggcgtctaggtaaggcccaccctcccagaccgcaaagagccaggatccgacggcagcctctccggaccaatcacaaccttccttcatcaaggaggcggggtcggggggggctgacttttccttgtctccgcccctttagtcgaagtaaccaatctcagtgcacctaggggaagtaatcgcaatgggagtaaccaatgacgccatgaagcttctcgtgcgtgcttgaccctgcctctccagctgcgacacagatggcgcgcgggctcttgggttctgtagttttctcgcgatccaaaaggctccgtgcccaagtgagtccttaccgcctccctacccagcggcttcccctccgctagtacgcatgtccacagcttcacggaccgggagagagggggcgcggaaggaaggaggcgggacggtattacaaaca

SEQ ID NO: 9656 - DNA, 2300 bp, Homo sapien
gttgaaagtgcataccccctgacacagtgcaagccaggaacccagtacccaccaaatgcactgaatgtgggggcataaagcccagtgttccagtgcagtctgggaaccgggccaaccccaaactatttagagctggaggcagcagccactgccccggtgcacgccgggaaccactgcccactgccccagtgcttgccgggaacaaccctcaggccaggtgcatgctggggccgcgccgctactccctccgcacggccccacgcttttcgccctgaaggaatcggtacgagacggctcacctaggcagcccgcagcccgtggtagtgccggagccttgctcctcttcactcattccctcctccgtccccgcgggcgccaccgtgactgcagcctccacgcgccccaatacacagccgacgagctagggccggggccaagcccggagtcgcggccggtagggcccgccgcggggcacgctgggatatggagtcccccgcccaccctacttcgtgagcctccatctggaggggagctatccgccccacaaccctctgcgtgcgtggctcgcccgggcaggctgcaccgccttctgggaggagcgggccctccgccgtcgcttctcgagaaggccgtatttttttgtttgtaataccgtcccgcctccttccttccgcgccccctctctcccggtccgtgaagctgtggacatgcgtactagcggaggggaagccgctgggtagggaggcggtaaggactcacttgggcacggagccttttggatcgcgagaaaactacagaacccaagagcccgcgcgccatctgtgtcgcagctggagaggcagggtcaagcacgcacgagaagcttcatggcgtcattggttactcccattgcgattacttcccctaggtgcactgagattggttacttcgactaaaggggcggagacaaggaaaagtcagccccccccgaccccgcctccttgatgaaggaaggttgtgattggtccggagaggctgccgtcggatcctggctctttgcggtctgggagggtgggccttacctagacgccggaggggaccgatctctgtttccgcagggctctggagctggtgcaggtttaagtccgtctcagacagtcccctcaacccacagcctaagccccttgcccttgggcctccgtgacacagaacttgcttccttttcctaggtcgtccttcacctcccttcaggtgttgcttcttttgtgaaacctttttagaaccgctctagtgaacctctctttaactggcgaggaaacctctggggcctgataatcaggctgtaatgtgggacgacaggattagaaggactaggcaccttggtggtcttgttccctcttccatgagtcttgggtctctcagctgaagagagcaaaagtgaattttggccgcctaagattaatcaactgatctgggtgttgagcagacgcgcattgtttagtcctagagccccattgcctcctcccccaaagttgcacaaccactgggctgagggaaatcttgtgaccttggagagagaaagggagagaccacattaaaaaaaaaaaaggttctaatgagtgttctgagaaggggtcaagaaagatgtcttactctgagccggggttggaggtccagaggaatcttgaaatgataatgaggggtcatccaggaacactggaggaggatggggcctagagccgagtgaattccaagtgggtgaaattggagtgagtggtgacaatcaagggaaggagagctggcaagatcggtatgatagggggagcaatgccagagcgctagggatcccaactgaggggctgctctctccgatgtagaaaggagtctataagacgggtcatagggggttcctgtggaatcagcctgaggcctgaggtgggacctccataggacaccgccagcagggaggcgcggggcccaggcgggccaggtacgagcctggagcgcgccggatggcagcagcgggctcctttaagaggccggcggctccatcgcagcatcccccgctcagggcgtgtccgtcccggggggccaggggcgggggccctggaaggagcgggagttcaagccgagcagggacggggctaggggtcggggggtgggggcagaaagctgaagctgacacccgtgcatccggacaccgcacgagcatcgcctgtgacagcgccccgggtccggtggagggcagcggggggaggagggaaggaggaggagaaggaggaggaggcgggagcagcatccggagcggagctgcagcagcg

SEQ ID NO: 9657 - DNA, 2300 bp, Homo sapien
ccttctcctcctccttccctcctccccccgctgccctccaccggacccggggcgctgtcacaggcgatgctcgtgcggtgtccggatgcacgggtgtcagcttcagctttctgcccccaccccccgacccctagccccgtccctgctcggcttgaactcccgctccttccagggcccccgcccctggccccccgggacggacacgccctgagcgggggatgctgcgatggagccgccggcctcttaaaggagcccgctgctgccatccggcgcgctccaggctcgtacctggcccgcctgggccccgcgcctccctgctggcggtgtcctatggaggtcccacctcaggcctcaggctgattccacaggaaccccctatgacccgtcttatagactcctttctacatcggagagagcagcccctcagttgggatccctagcgctctggcattgctccccctatcataccgatcttgccagctctccttcccttgattgtcaccactcactccaatttcacccacttggaattcactcggctctaggccccatcctcctccagtgttcctggatgacccctcattatcatttcaagattcctctggacctccaaccccggctcagagtaagacatctttcttgaccccttctcagaacactcattagaaccttttttttttttaatgtggtctctccctttctctctccaaggtcacaagatttccctcagcccagtggttgtgcaactttgggggaggaggcaatggggctctaggactaaacaatgcgcgtctgctcaacacccagatcagttgattaatcttaggcggccaaaattcacttttgctctcttcagctgagagacccaagactcatggaagagggaacaagaccaccaaggtgcctagtccttctaatcctgtcgtcccacattacagcctgattatcaggccccagaggtttcctcgccagttaaagagaggttcactagagcggttctaaaaaggtttcacaaaagaagcaacacctgaagggaggtgaaggacgacctaggaaaaggaagcaagttctgtgtcacggaggcccaagggcaaggggcttaggctgtgggttgaggggactgtctgagacggacttaaacctgcaccagctccagagccctgcggaaacagagatcggtcccctccggcgtctaggtaaggcccaccctcccagaccgcaaagagccaggatccgacggcagcctctccggaccaatcacaaccttccttcatcaaggaggcggggtcggggggggctgacttttccttgtctccgcccctttagtcgaagtaaccaatctcagtgcacctaggggaagtaatcgcaatgggagtaaccaatgacgccatgaagcttctcgtgcgtgcttgaccctgcctctccagctgcgacacagatggcgcgcgggctcttgggttctgtagttttctcgcgatccaaaaggctccgtgcccaagtgagtccttaccgcctccctacccagcggcttcccctccgctagtacgcatgtccacagcttcacggaccgggagagagggggcgcggaaggaaggaggcgggacggtattacaaacaaaaaaatacggccttctcgagaagcgacggcggagggcccgctcctcccagaaggcggtgcagcctgcccgggcgagccacgcacgcagagggttgtggggcggatagctcccctccagatggaggctcacgaagtagggtgggcgggggactccatatcccagcgtgccccgcggcgggccctaccggccgcgactccgggcttggccccggccctagctcgtcggctgtgtattggggcgcgtggaggctgcagtcacggtggcgcccgcggggacggaggagggaatgagtgaagaggagcaaggctccggcactaccacgggctgcgggctgcctaggtgagccgtctcgtaccgattccttcagggcgaaaagcgtggggccgtgcggagggagtagcggcgcggccccagcatgcacctggcctgagggttgttcccggcaagcactggggcagtgggcagtggttcccggcgtgcaccggggcagtggctgctgcctccagctctaaatagtttggggttggcccggttcccagactgcactggaacactgggctttatgcccccacattcagtgcatttggtgggtactgggttcctggcttgcactgtgtcagggggtatgcactttcaacctgcattggggcacaggatcgtgcccaccttaactgaggcagg

SEQ ID NO: 9658 - DNA, 2300 bp, Homo sapien
ggtgagtgtgtgtcccatccccatatcaccattgcctctacttcggttgagacttgtgctctaggttctgatactttctctggctgccaaggttgtcattaggtcctcacatctgaggaaatggttccgcagcctcctaccacttgcccctggaagccagtcccttccccttgtgacttacgtgtccagggtatttgcccatcttccttccctgatacccccttggcacaggaggaagacagcgaacccctcccaccacaggatgcccagacctctgggtcactgttgcactacctgctccaggcaatggagagacctggccggagccaagccttcctgtttcagccccagaggtgagtctgaaagggacacaagcatggcaggggctgggggtggaaagggcaggaggcagaggaagaggagaaggaagggggctagagaagggagactgcggggacctgaggacaaatctttcctaaggtttggcagaaatacccagggatcctggaggaatgaatggctgagtccccgggctggagaggggctgaattcccagttctggagcctggctgcccctcaacgctttgggaagaagtgacatgtcatcccttgatatgtctgcatgcaaggtccacacccaaaagtgtcaatgtttgccccccaaataaaattgtctggcttctgaatccatgtgtgtctgtgtgagactttacagggctgggtggaagcccaagggcaagaaccactgcccttcccctccaccaaacccagccctccagcaaggcagccgacaacattccacgaggccactgtgcccagcctcctcccaccagaaaggaaaacaggagaatggctggaacaggagctcagggaaggcacacaaaagtaatgtggtgacctcctctgctatccacactgctcaaggaaacagaagagaagggcttaaaaatccacaaagcagcatatttattccaggctctagtagacagccccctgatttcattcccattcatcatcaccaataaaatgaggacggatcctgggctggctgaggctctgtggtccttggctccttgccctgtgccttctcagcttcaaggcaggcagtctgtgtcagaggtagagatggcacccacagagggtaccagagctgcgcagatacatgagcccagaggcagaaagagcagggagcaaagggtgcacatccatgagtccagctggggcttcacttgctgcctgccatgatcttgaggtactgcagggcacggcgggcagcctcaccacgggctgcctccctggtggttgcagagccatgacacacagtggccggctgggtggacagttccaccaggcactggcagagtccactcaggctcagctcctctggagagcaagagagaggagggaggcaatgttgggggaggtagccctggggaggggtgcgttcacgttatcatcacccccttctacttgctccggtccagcccccaccatcccctggctcgctccccagctagccataccaatatccaggtagctgacgtgaaaggcctgctcctcagagagctcactgaggacacggcagcaggcagggcccagggcacccagggagcccagggagcaactgcggagggacaggatcttctctcctactgaatttcgtagagaatcccaggtgcaacctgggccccggtttcgaagaccatccaggcgggagcccacaccctgtcaagatgggaacagtgagaaagatgaagcgagagactgtgggacccaggcattgagacattcaacgtcaaaggagaacaaagcacaaagaatgcttcctccagcttgcctccccccagtcaatccctgggtggccccttctaactaccaggccctgggccagatggccagggatccctcctcaccccagtaacagagctacagagcgggcctacagtcaaggctgagtcggccccaggaaccctgggtctggtaggaaaactgtggcagaagcagacctagggcccagagaggctcactgctgagtcacagacccaagtccctggagccctgccctggcatggaggatgggccacggtgcccggcccacatgagccactcacaatggagaagtggtcatcatcaggctccacctcattgccatcccgggcatccagaggcaccgtgtgcactcgaagcagcattttggccgccgcattccgctttgccaattttttggaagtgccactccctgcatgtggagagagggctgctgggttatgattccccacagacccagtgcttccacccag

SEQ ID NO: 9659 - DNA, 2300 bp, Homo sapien
aggtcaggagttcaagaccagcctggccaacatggtgaaaccccatctctactaaaaatacaaaaattagccgggcatagtggtgtgtgcctgtaatcccagctacttgggaggctgaggcaggagaatcgcctgaacccgggaggcagaggggttgcggtgagccgagatcgcaccactgcactccagcctgggtgacagagccagactccatcgtaaaaaaaaaaaaaaaaaagctggagtgtaagaatgaactctctcttcaaaaatatgaagagcttttacacatgaaagagatgagatgttctgttgagacttaatggagcaaactaagaccccgagtagaagtcacaggaagcccaaagccccctcggcacaaggataaatatgtccgaagactgtctgaggagatggtaagttccccgactggggcacatgaggcaatcacagctaacgttttgaggatacctgttctatgcaagctgttttattgaatggattacaaaaagtatgttaagtaatgcacaccctaggaaggcgttccttgtaaaatgggcccatgtttcaggtgaggaaactgaagctcagagcgggagacagcttgctcaagcagaggccaaggcctttacgtcatggctcttcctcagcacaagctagagacccacactggtggggatgctccaaaagggactcgaggattagaaggaacctgcaccatatggctttgaaggcctctccctgaggattagtgattctgatttttcttaagacaggattctaggctactctatatgagagccagggccaggcagaggctgtggagaccagagtcggggtcagaatgatagtccagccccacagtagcctgctcctgtccttctgggactccctggagactggaccctagcacctccactcagcctcaccctcctcacttcctctgcagaggtctattctaggaaaaggaaatggccggagctggcaatgaggagctgtgaccacagggtggcagcagtgcttcagctgtggagagtgactataggaagggcgatgaggcaggtcggaagcagtgctctctagtgaggatgggggtctgtctgcaaagattggaagccacactcattcagtgggctccaaaatcctgtagcctccctctatatcttaataattttttttttttgagacagagtttctctttttgccaaggctggagtgtagtggtgccatctcagctcactgcaacctctgcctccccgattcaagcgattctcctgcctcagcctcctgagtagctgggattacaggtgcctaccaccacgcccagctaattttcgtatttttagtagacagggtttcaccatgttggccaggctggtctcgaactcctgccctcaggtgatccacccgccttggtctcccaaagtgctggggttacaggtgtgaggcactgcacccggccaaaaaaaaaatggtttttaattaaaaaaaaaaaagatacaggctgggcatggtggttgacgcctgtagtcccagctacttgggaggctgaggcaggagaatcacttgaacccaggagccagaggttgcagtgagccgagatcgcgccactgcactccagcctgggcaaaaagagcgaaactccatctcaaaaagaaaaaaagttaaattctctccatcatcatgaagttgaatatattttttctatccacaggcaaatctgagtagcctccaagaggcacacaagcagaggatgggctgtgttgccctgactgccagccccaggcacagaggaccaggcctggtcatcctcacagactctgaccctggctcttcccactcctcttccactccaggacatcctacttaacccctcctgacatgagtttcttgtgctttagtctacaggttaggaaagaggggaagtgataaacaagctctccaacctgttgagggattaggggttcgtctaaggctccccagggcctggctctgacaaagcgtctgcaactaatgatgcttcttgagctctggagacaggatttatgcatctaataaagtctgtaactccaggcttaggggccgggggcaggaggctgagagcatgaagtcctgggggcgccatgggaggagatcccaggtggctcctaatgagccctgcatttccatttgcctgctctagattcccctaaggctactgtgaggctgggggtgggggaacagcaggtataagaggttggggtggctgtaggagggtaggtggcagcatggattctaggcaggctgctgcactgctggtgctg

SEQ ID NO: 9660 - DNA, 2300 bp, Homo sapien
atgcctgtaatcccaaaactttgggagtcccaggcgggcggatcacctgaggtcgggagttcaagaccagcctgaccaacatggagaaaccccatctctactaaaaatacaaaactagccaggcgcggtggtgcatgcctgtaatcccagctactcgggaggttgaggcaggagaatcacttgaacctgggaggcagatgttgtggtgagccgagatcaagccattgcactccagcctgggcaacaagagcaaaactccgtctcaaaaaaaaaaaaaagataaaactacaagataccatgatgatgaatgtcaggttttgtggttgggaccaaccatgagacaaagcttacgaaaaggtttaccctggcttagtccgcattaacagaaatatggtatctggagcatccagatccaaacctgctctaatctacgtgtctaaaggataagttggttcctagatgccttgccttaaagagtggggtgcttccccttgagcaaaaaagactatggagtgggccaggtgcggtggctcacgcctgtaatcccaacactttgggatgccaaggtgggtggattgcttgaggtcaggagttcaagaccagcctggccaacatggtgaaaccccatctctactaaaaatacaaaaattagccgggcatagtggtgtgtgcctgtaatcccagctacttgggaggctgaggcaggagaatcgcctgaacccgggaggcagaggggttgcggtgagccgagatcgcaccactgcactccagcctgggtgacagagccagactccatcgtaaaaaaaaaaaaaaaaaagctggagtgtaagaatgaactctctcttcaaaaatatgaagagcttttacacatgaaagagatgagatgttctgttgagacttaatggagcaaactaagaccccgagtagaagtcacaggaagcccaaagccccctcggcacaaggataaatatgtccgaagactgtctgaggagatggtaagttccccgactggggcacatgaggcaatcacagctaacgttttgaggatacctgttctatgcaagctgttttattgaatggattacaaaaagtatgttaagtaatgcacaccctaggaaggcgttccttgtaaaatgggcccatgtttcaggtgaggaaactgaagctcagagcgggagacagcttgctcaagcagaggccaaggcctttacgtcatggctcttcctcagcacaagctagagacccacactggtggggatgctccaaaagggactcgaggattagaaggaacctgcaccatatggctttgaaggcctctccctgaggattagtgattctgatttttcttaagacaggattctaggctactctatatgagagccagggccaggcagaggctgtggagaccagagtcggggtcagaatgatagtccagccccacagtagcctgctcctgtccttctgggactccctggagactggaccctagcacctccactcagcctcaccctcctcacttcctctgcagaggtctattctaggaaaaggaaatggccggagctggcaatgaggagctgtgaccacagggtggcagcagtgcttcagctgtggagagtgactataggaagggcgatgaggcaggtcggaagcagtgctctctagtgaggatgggggtctgtctgcaaagattggaagccacactcattcagtgggctccaaaatcctgtagcctccctctatatcttaataattttttttttttgagacagagtttctctttttgccaaggctggagtgtagtggtgccatctcagctcactgcaacctctgcctccccgattcaagcgattctcctgcctcagcctcctgagtagctgggattacaggtgcctaccaccacgcccagctaattttcgtatttttagtagacagggtttcaccatgttggccaggctggtctcgaactcctgccctcaggtgatccacccgccttggtctcccaaagtgctggggttacaggtgtgaggcactgcacccggccaaaaaaaaaatggtttttaattaaaaaaaaaaaagatacaggctgggcatggtggttgacgcctgtagtcccagctacttgggaggctgaggcaggagaatcacttgaacccaggagccagaggttgcagtgagccgagatcgcgccactgcactccagcctgggcaaaaagagcgaaactccatctcaaaaagaaaaaaagttaaattctctccatcatcatgaagttgaatatattttttctatccacaggcaaatc

SEQ ID NO: 9661 - DNA, 2300 bp, Homo sapien
ctttcatgtctgtcatcttcatcactcccccatttcttaggacagaaggaacagggatttttgtctctagtttttatacatgggagatacagcctagagaaagtggatgatttctataaattacaaagtatgacagaaggcccagggcagagctcctgtggactgccttggagacaagggcccttggcatcctggcagcaagtactcacaggaaacttagtatgtgctttatgtggatggcgggtgggagagttgctgatggcaaatggccttttacttttcagtgttttgttgccaacccccacccaaccattaaaaagtggctgttgtgaccagggagcacacacacagacaaagacggaaagtatagctttctatggtaaggaggaggctggtctggaaatgaggggtagagtttacttagaagcaggtaagaaaaccgggcatggtggctcatgcctgtaatcccagcactttgggaggctgaggcgggttgatcacctgaggtcaggagtttgagaccagcctggccaacatggagaaaccccgtctctactaaaaatacaaaaattagccaggtgttggtggcgggcgcctgtaatcccagctactcaggaggctgaggcaggagaatcacttgaacctgggaggcagaggttgcagtaagctaagatcgtgccgttgcactccagcctgggcaacaagagtgaaactccatctcaaaaaaagcaggtaagagttcacaagaaaaacaggtaatgctcagagactgtgggaatcaggaagaggtgtagggaaatcacagataatttattgcatctgtatattcctttataaataacatcacaaatgagaacaatgagccaggctgaagaatttgacaaaagagatagcaggtgtctctggagtttcccagtaggagagaaatgacttaagaagctatctgtggctggtgtttggtagacacttgacacaaatagcctgtgcctcctgaggagagcaggaaaggcagtggtggtcttcactgtgttgtggccaggagcacatgggtgtccagagaagggtaagaaaggaaattgctgaaagccaaataccaaagcccagattatgaggttttggaggttcccaccactgaagctgcactctgaaaactgggcagtttacaaaattagaggaatcaacccattccaacttcaaaggagaccagttacctccatcctggacacaggaagccagctaaaccagcctctttctgaatgcagctcagcccagagccacttgtaattgatgtttagagaaatactagaagcagcaggatggtaaacatggaatggctgccctatgctacgtggaatggtagattgctttactgttcacctagtgataacaggagtagtcacttcattttattgatgataaattgaggtttagccaagtcacacagtgaagtgcaagagctaggattacaactgagttctgtctggcccagaaccagctctgcagtgtcccatccaccctcacaccgctgctcctctggacctctgtcacacaggagcagacaaggatcattctgggatgcagcagctactgcccacagaaaagccatctccccgtggccttgatactcccttttaagaagtggtaaactggccgggtgcaatggctcatgcctgtaatcccaaaactttgggagtcccaggcgggcggatcacctgaggtcgggagttcaagaccagcctgaccaacatggagaaaccccatctctactaaaaatacaaaactagccaggcgcggtggtgcatgcctgtaatcccagctactcgggaggttgaggcaggagaatcacttgaacctgggaggcagatgttgtggtgagccgagatcaagccattgcactccagcctgggcaacaagagcaaaactccgtctcaaaaaaaaaaaaaagataaaactacaagataccatgatgatgaatgtcaggttttgtggttgggaccaaccatgagacaaagcttacgaaaaggtttaccctggcttagtccgcattaacagaaatatggtatctggagcatccagatccaaacctgctctaatctacgtgtctaaaggataagttggttcctagatgccttgccttaaagagtggggtgcttccccttgagcaaaaaagactatggagtgggccaggtgcggtggctcacgcctgtaatcccaacactttgggatgccaaggtgggtggattgcttgaggtcaggagttcaagaccagcctggccaacatggtgaaaccccatctctac

SEQ ID NO: 9662 - DNA, 2300 bp, Homo sapien
ctttctctaggctgtatctcccatgtataaaaactagagacaaaaatccctgttccttctgtcctaagaaatgggggagtgatgaagatgacagacatgaaaggccagtgacctcccagaaaaggggacaatgggggctgtggatagaggagtgaagcatcagacataacagtggttcacttgatagtttaatgttatatttgcagcataaataaggcacaatatatgccagggcaagggagggagggagaaggcatagctggggggataactgctaagtggcaagggggaaaggaagacagtatggttagggagaatagagcgaagcccctgcctcagcccagtcccaggagattgtgagaaccagctcacagggatcatgctgaatcaggtggaggggaaaagggaaaagacagttttgtaacaaaaaacaaaatagcctgcagcactgcatcctcctacctgtcaaaggccaccactgggcactggggagacccagaccgagttgagttccttgataagatggagaggtgttgctacatgtcaaaaatatatagatgaacagagatataatcatagatacacactgcttccttttcaatagatactatgttaggatgtggcagcctccactcttggggctggaagctcatctcctccctgcctgaaaggtgtgtgtgttgtagggggaggaatgggacagctgaagcttggctggtccttactgtaacagagaacatggagtgaccagtctgcaagggaatatgggacaactcctgtccagaccaatgcatggttttagggatacgactaaaatgaagacaaatctagcttttgagatcagtgatatgatggggaagactttaaagggaatggaggaagagactgaaagaaatgaaagcatgttagtgcaaaggcaaaagatgtatttgaaatatcctccacacctgtaaaaatttcccagcttatccctaagaaatggttctcaacctttagtgtgcattagaatcacttggagtgcttttaaaccctgcccccagagtctgtgattcaataagtctgggatggggcctgagaatgtgtatttctaacaagttcccagattactgtggcactgccctaaggtaaagtcagtgaaactattgctcatagccacttcttacagctaaaacatcactcaccagtagctactgctggtgagataactctgtgctattagccccccattaaaaaaataaaccctagtagctatgatacaaacctacatctacagaggacataagctcctttaacctgccctactctccccagccttttctcattctggggtaggactttaccccaaagagagacaacacagctgatgcagacggtggtaatggtggccagcagccacctacgctcattcctgctaggtaaccaccttggtatggggtgggggaatttatgtctgtatgcacatttgtgtgtacaaacagacacagagaaatcagtcctgtactatgagagggatgactagagttatgggaggctgtagtggggtggagggagtcctttaatctgccttaggatccccacctttcctgttcttccagacacccccacccccgtcaaacattaagtctaaagaaagcagaaagagcatatcaacaaggcatatgtgatatagctaggaagactggaatctaaacaggctggttatgaaatttaaaaaaaataatgtatttccttcctgtgtatataatgtacaatattaatgaaaaattaatgatttggggatgggaaggaagttatgaaaaaaggagaaaactggcggggatagctgtatcaggggctagcacctttaaggagcctctcagtgtggagcaggggagccccagaaaccacaggaagaatttttttggtgtctgtttggtggttcaggctgtacatagggcacggttggggttaagcactccatctaccaggatgggtggtgctagagggcagtgaatcaagaaaggagccaaaaccaacagaacagggatagagaagtgagcgagaggaggttcagtttgctcagtccctctttaaccactacttagagtacatggtctaatgcttagggccaaggagggaggtgaaggctaaggaagtcagatttgagatgcataaccagcagcaaaagagtaagtaaagggggcatgactttttttttgttggcctctctagtattgtgggaggctttcttagacttttcaactctaagcaaactttctgttaggggaatggggcagaaagtgagcagaccagaagacctg

SEQ ID NO: 9663 - DNA, 2300 bp, Homo sapien
gcccaggctggagtgcaatggcgggatcttggctcactgcaacctccgctttccaggttcaagtgattctcttgcctcggcctcctgagtagctgggatttacaggcgtgagccactgcgcccggccaacatacaaatttttcttatatatttaaggtatgtttccatcactgtattcttttaagtaggaattgttttaggggagaatagtttggaagccaagactcctctcaacttttctcaattcactacataagaaagaaagattttacatctgtttcattttaggtatctagggagaaatcacccagattcttcctacctctcagagggtgctgtgaggatagatgagatgctagacagaaagttcagaaagctgagtaacataaagctgcaaaaggagagaacagagattccatagataatattttaagtcaactacaattcgttaaattttaagaaaattatttattttatttatttatcgagacagggtttcactctgttgtccaggctggagtgcagtggcctgatgtgggctcactgccacctcaacctcctgggctcaagcgatcttcccacttagccccccgaatagctactacaggtgcaggccaccatgcccggctaattttatattttttcgtagagctgagttttcgccatgttgcccaggctggtctcaaattcctgggctcaggcgatcctcttgcctcggcctagcagtgttgggattacagacgtgagccactgcacccagcctgttttttgtttttcttttttcttttcctggtttgtcttgaacaagacatataaatgtaagactatagactttgcatttgatatttcccccgaaatcttcccaggtcataattcaactcctggtgtgttacttcctcaaagaggtcttctctcaaacactaggagtaaagcttcttccccactcctagtcaccttctgtctcactatcctgaagcgcttttcactatttgaaatatttgtgtttattggctttttaactgtctccccttcctcactcaaatataaattctacctgggttggtaactccttaaccccatgcttagaacaatgctttgcacggggggtatagctcagggatagagcattcgactgcagaacaatgctttgcatgtagtatgccctacgttttgtgaaaatatttgctgaataatatagtgattttaaaaaatccccaagcagtttcatgtatctcatttgatcattacaactatttgaataaaatgagattgttagtcccattgtacagagactcagagaaggttttcacccaaggcaatagggctagtaaaatggtagtgttagaattgctgtgcgggtggattgctttgtccgtacatggacttcatttctagcgctaagggtattttaaattactttgccgttaaggaagcgatgactctgaaagatagtagtaaccaccactacaggcacctgtaaagatcctctctcctttttcctttctttctcccgctagattctgcagccgaacacgtgtgacctgtgtggacagtactcgctcagtctccctccccagccctgcccacagtaagcccggccccttcttttcccggagcccccgcctctcggccgctttccaactcagcccccacggatctcgcccttcccccgcggacccatgacttctcgcgagagttgagcgcgcctggccggacgggaggaaagtatccgttccgccaaggggggaaaggaggagctggagacagattgtaggaccgagcgcgggcaggcgggaggcaacggagctaccagccggtaagtccttttaacattagctagtccatgatctgacgggagtctccctttcaactctggccagtcccagcgttccaggctggggtctcccctcccagtctgtgttggacgggggcgctgaggcggtggccgggccctgtctgaggaagagggtggggcataggccaaagccgaccaatgggagagaaggaagcctcgattggcggcgatgagcgctaatgggagatcgcttttacgttgccgagcgccgcccttctctccctactcccgcctccttcctttggggggaaggcggggccagaggcttgaagtgtggggagaacttggtgtaagtagccccggggggcacagggcgtggcaaggagaggggaattgaatcctgagggaagggtagtctagtggagcctaatggaaggatcatgggatggggtggaatgggagaaagaggagggatactaaactaagttagaaacccagggcttcc

SEQ ID NO: 9664 - DNA, 2300 bp, Homo sapien
aaatacaaaaatttgctgggtgtggtggcgtgcgcctgtagtcccagctactcgggaggctgaggcaggggaatcgcttgaacccaggaggtggaggttgcagtgagctgagatcgtgccactgcactccagcctggtgacagatcaagactccgtctcaaaaaacaaaaacaaacaaacaaacaaaaaacatcaatttagaatagtacctggaacatagtaaaatctataaatattagctattgcatgtatacagcgatagccaattgttccaccacgatttgtagaatccttttccctctgattttatttttatttatttatttatttatttatttatttatttattttgacacggagtttcgctgttgttgcccaggctggagtgcaatggcgggatcttggctcactgcaacctccgctttccaggttcaagtgattctcttgcctcggcctcctgagtagctgggatttacaggcgtgagccactgcgcccggccaacatacaaatttttcttatatatttaaggtatgtttccatcactgtattcttttaagtaggaattgttttaggggagaatagtttggaagccaagactcctctcaacttttctcaattcactacataagaaagaaagattttacatctgtttcattttaggtatctagggagaaatcacccagattcttcctacctctcagagggtgctgtgaggatagatgagatgctagacagaaagttcagaaagctgagtaacataaagctgcaaaaggagagaacagagattccatagataatattttaagtcaactacaattcgttaaattttaagaaaattatttattttatttatttatcgagacagggtttcactctgttgtccaggctggagtgcagtggcctgatgtgggctcactgccacctcaacctcctgggctcaagcgatcttcccacttagccccccgaatagctactacaggtgcaggccaccatgcccggctaattttatattttttcgtagagctgagttttcgccatgttgcccaggctggtctcaaattcctgggctcaggcgatcctcttgcctcggcctagcagtgttgggattacagacgtgagccactgcacccagcctgttttttgtttttcttttttcttttcctggtttgtcttgaacaagacatataaatgtaagactatagactttgcatttgatatttcccccgaaatcttcccaggtcataattcaactcctggtgtgttacttcctcaaagaggtcttctctcaaacactaggagtaaagcttcttccccactcctagtcaccttctgtctcactatcctgaagcgcttttcactatttgaaatatttgtgtttattggctttttaactgtctccccttcctcactcaaatataaattctacctgggttggtaactccttaaccccatgcttagaacaatgctttgcacggggggtatagctcagggatagagcattcgactgcagaacaatgctttgcatgtagtatgccctacgttttgtgaaaatatttgctgaataatatagtgattttaaaaaatccccaagcagtttcatgtatctcatttgatcattacaactatttgaataaaatgagattgttagtcccattgtacagagactcagagaaggttttcacccaaggcaatagggctagtaaaatggtagtgttagaattgctgtgcgggtggattgctttgtccgtacatggacttcatttctagcgctaagggtattttaaattactttgccgttaaggaagcgatgactctgaaagatagtagtaaccaccactacaggcacctgtaaagatcctctctcctttttcctttctttctcccgctagattctgcagccgaacacgtgtgacctgtgtggacagtactcgctcagtctccctccccagccctgcccacagtaagcccggccccttcttttcccggagcccccgcctctcggccgctttccaactcagcccccacggatctcgcccttcccccgcggacccatgacttctcgcgagagttgagcgcgcctggccggacgggaggaaagtatccgttccgccaaggggggaaaggaggagctggagacagattgtaggaccgagcgcgggcaggcgggaggcaacggagctaccagccggtaagtccttttaacattagctagtccatgatctgacgggagtctccctttcaactctggccagtcccagcgttccaggctggggtctcccctcccagtctgtgttggacg

SEQ ID NO: 9665 - DNA, 2300 bp, Homo sapien
ggctgggtgtggtggctcacacctgtaatcccaacactgggaggccaaggtgggaagatcttttgatgccaggagttccacaatagcctgggcaaaaaataaattaagagcaattaagatgttggattcagaagtgttttaacctgggacaatctgagttcagttcatttaatgaagtggtatttaatagccctaagcattcactgagtatttcagcctgtgacatattagaaagcatgtaacttaaaagatccaagttcaagtctatcctctaccactaccacagtttcaagactgggtttagggtcacgctcttgcgttaagtatacctaataatcatctgggaaacttgtttgaaatacagggcacttgagccttattcccagagatcttttttgtttgtttatagacagggtttcacgttgttgcccatactggacaactggcgtgatcatagctcactgaagcctccagctcctgggttcaagcagtcctcctgcctcagcttctggagtagctgggactacaggtgcacttccacctcacctggctaattttatgttttgtagagatgaggtcttgatgtttgcccaggctggtctcaaactcctggcttcaagttatctttccgccccagcttctcagtgttgggattacaggaatgagccactgaacctagctcccccagagatcttgaccaggaaggtccaagttgcgcccaagaatatgcattttttaatacgtacaccacccagataattctagttcagatgggcttctcacttcacttggagaaaccctgcctttaggtttttaactcaccttctgtttgaggtaagttcacttctaccaacttagatacctatagggtgtcagatcttctttagatcttggggagacacaatttaatacttttttttttttttttgagacagtttccctcttgttgcccaggctggagtacaatggcgcaatcttggctcaccgtagcctctgcctcctggattcaagcaattctcctgcctcagcctcctgagtagctgggattacaggcatgcaccaccatgcccgactaattttgtattttcagtagagacggggtttctccatgttggtcagcctggtctcgaactcctgacctcgtgatctacccgcctcagcctcctaaagtgctaggattacaggcgtgagccactgcgcccagccactaataccttttggatagactaataacagagttcctccttgatcttcctcatcttattaatacaggaaattgaagtattttcaggaatcagatacttccagggatcagcaaagagattgttggagaccttccagtgtcttggccttcaacaaatatctcccaaaactacaaagactctaaagggcaactttttgtttgtttgtttgtttgtttgtttgttttgagatggggtctcgctctgtcacccaggctggagtgcagtggcgtggtctcgtctcactgcaacctccgcctcctgggttcaagcaattctcctgcctcagcctcctgagtagctgggattacaggcgcgtgctaccacacctggctaatttttgtatttttagtagaggtggggtttcaccatgttggtcaggctggtctcgaactcctgacctcgtgatccgcccgcctcggcctcccaaagtgctgggattacaggtgtgaaccacgtgcccagcctaaacggcaacttttaaaggtccagatgatgaagtcttgagaagcgttccttttgaataaaaactaaggaaaacttaggcaaaagacactctgggaaaattcctgtggcaactgcaaatcatgaggctatggaaatgggtaacaggtcttacctgaacccaagtgttcacttgttcagaccaggggaagtcacttcattataaggaaatcttgggagctgtgtggggtttctggaagaagtcatgacttcagggttttaattctatttctgccaatgacttaaggtcagtcactgttttctgggccagttaagctttctagggccccttttctgctaataaggatatagtttagtgaataaggagcgtttacaatactgcttctgtaattccagctctcctgccacagctcctcaccccctgaaaatgttcgcctgctccaagtttgtctccactccctccttggtgagtacctgcttttctgggagagttttaaaggagagacatcttgtctctctctttccatcagaccttgttcttcacagcaaggctgggggagaggaggtccaggcgggcagatcacttgaggccag

SEQ ID NO: 9666 - DNA, 2300 bp, Homo sapien
atgcgctgagccttcctttcgctcttcccgctgctccgcccctctctgtcttctctgcagtgggagcaggtaaggccttgggacctagagccctctgtgcgctgcgcacgcgcgcgggacacctcaccttgcgcggatgctttgaggcgcttaccttgcgtgctcccaccctggtcctctcgccctttcttgcttccgctatcccttagccttagagttggctcttccgcgtgccggtgacctccaaccgcgcgggcctggcgccatcttggatgtctcgcagggggaggataccttggagctggccaaagttagatcctggagtgctgcttttcacctgttccacccagtccctgcaaacactcttttctcgccctctggccctttcagattgtgacaacccccaggctctcccctcctatctctgctttctcttctcatcctgacttgtgccttctttattctgaaatctccagactttaggccccagaacctcaggtgctccgagcaatggagatagtggatcgtctaaagtcaccaatccctctagtcagcacccctcaatttaaaaagtaaaccttgaacatggtagaagtgggaaaaaaagccaaaacatcgcctcccgttaggttgtggcttgggatagctaaggcagaagagagaggctggttgctttggaatcactagttatttaccagtacctttctcgcatcccggcacgctggtgaagttgtaaaagtcacaaatggtgggctagagatgagggtttctgttgaggcagcaggcccagaaaggtggggtaaggccaagctagtggggccagcatgagaccctgcctgccagctttcctgtgaaggattaattaacctccccagattctgctgttacaaggaaaagaaggtttaaggaaaggaatagttaagttactacccctgtgactcatctacactgaggaaaaagcccgtgatgattttggagtcctgattctggatagtgcctttgcccaagttgtaggctaacaattgcagagttgccatggttagatagccaatggtgggatcacttaattgccaccccttgttgtgggtttattatatgccagcaccacattaaactctttatgtatgttaatttgtaaatgaacatacttaatccccctaagagctgcattttacaaagaagataataaggtataattcccttagaaaagaaccaccccttctttttctaaaagccttaaagaactattggattttgacccaagaaaacctgaatagtacggcagcaaaattgggttagagttacatataggcaaaaatcagagttctagataggacaagagttgaagacatccattaacttaaaagtaattaaggctgggtgtggtggctcacacctgtaatcccaacactgggaggccaaggtgggaagatcttttgatgccaggagttccacaatagcctgggcaaaaaataaattaagagcaattaagatgttggattcagaagtgttttaacctgggacaatctgagttcagttcatttaatgaagtggtatttaatagccctaagcattcactgagtatttcagcctgtgacatattagaaagcatgtaacttaaaagatccaagttcaagtctatcctctaccactaccacagtttcaagactgggtttagggtcacgctcttgcgttaagtatacctaataatcatctgggaaacttgtttgaaatacagggcacttgagccttattcccagagatcttttttgtttgtttatagacagggtttcacgttgttgcccatactggacaactggcgtgatcatagctcactgaagcctccagctcctgggttcaagcagtcctcctgcctcagcttctggagtagctgggactacaggtgcacttccacctcacctggctaattttatgttttgtagagatgaggtcttgatgtttgcccaggctggtctcaaactcctggcttcaagttatctttccgccccagcttctcagtgttgggattacaggaatgagccactgaacctagctcccccagagatcttgaccaggaaggtccaagttgcgcccaagaatatgcattttttaatacgtacaccacccagataattctagttcagatgggcttctcacttcacttggagaaaccctgcctttaggtttttaactcaccttctgtttgaggtaagttcacttctaccaacttagatacctatagggtgtcagatcttctttagatcttggggagacacaatttaatactttttttttttttt

SEQ ID NO: 9667 - DNA, 2300 bp, Homo sapien
ataggaggaaatagatttagagggggttaaacagctagctcaagatcacacagcaatttgggaacccagatttgtctgaacgcagaacccattattctatgagggcaagggagtgttaaacatcgcaggctgtaacaacttttggaaagagccagctttagcttcctcccaggccccttctctgatcctcctctgggattgttagccatatctgagtgtctaaattgtcgcaacagctgcaacagccgtttgggggtggtggctcctaagaactgtggactttctctgccactgaggatgtgaagctgacagcttaaaagaattccgttttggtgggaatggagatgtctggagacctcaggggataaacttgtgtctttgctagcctgtctttctcctaacagcatctccacagtgcctggcaccacttggtacttgataaatacctgttgattgattcccaaagatcccagttccatttcccacgtacctgcccgctcggggcgcaatcaacaactaaaactggagatttggggatttcagaggaacctgtgagaatcctgatggagctggaaatgcgaatttaggaaagacaggcagtctaccaccctcctcttctcgcccgcttctcctatttctccccactccttcccctccctttcaggagctcagggccataaaaatgcagatggaggatcggtgtgaaataacgggcccatataaatccctctgccgcccgcctgcaagatggattggccgcattgaaattcctccgcgaggataattaaactcggggcctcatccgggcaaaattacattcctgtaatggcgtcgctcggggtcccgggaaattgctccgtgggctttcagcggcggtttttatcgccggccggggtgtgcctgtctgcggctcgcctctcctccgggaccgtaaagctgctgccgtgatttatcctccccttctcccaaatccgattaaatggaggagctcggggccggggcgccgcggggcccgggagccgggagggggcggcgggaaggacggggccaaggaggggaggacaaacggcccctcagagagtggcggatttgcctttatttacagccgcggctttctttttattttttattttttatggggtttggtgagcttttcccgtctttctcgtgctgcgttcaagcacgatgcagggacggcaggggtttggaactggataggccttgtcgccctgttccaaagggcagggcaggtcctgtctgggagacaaggaggcctaggaaagatgagggccaggaagcctcccccacctccttccatcaggggaagggcgagcgaaaggggagagaaaacccacgttcaggagagcatgggggcgggaggggagggcgctgcttatcccaactcgcgtagttgaaacctgagcagaggctcgggcaagcctggagtgacctcgcaaccttacagcgggtcgcaggtgcccgttattcctagactgtcccaggagccaggaaagagggattcggatcatatttaaccctatcttctggctcgctgatgctgcttctctcatggtttatcaccggaatggaaaggaggaaacggggagtgggggaaagggcgaagccaccagaagcagctgcggcattttgctgactattcgcccatggagccggtttgccatccagtgatgccagagtcccggcgcgacagaaagcaggactcccaagatcttcctcctgctgcattttaggcactgaaccccaatcccgaccgtatgttaacactgaattctgagtaggagttttgttttggcagtgtgacgactgcgcatgctcggaaaggggacgcaagtccgagatcccaaacgcggtacagaccaaaccgcagtccacgttacggatcggcttactccgcggagttggcctcatttctgcagtcggcgctccctgtagtttctcctctcgaacgccaggtggagcaaccggccggataccgccacagccctggcaggcggcgctgtgatgcctgagctgatcctgtatgttgcaatcactctatccgtggctgagcgactcgttggcccgggtcacgcatgcgctgagccttcctttcgctcttcccgctgctccgcccctctctgtcttctctgcagtgggagcaggtaaggccttgggacctagagccctctgtgcgctgcgcacgcgcgcgggacacctcaccttgcgcggatgctttgaggcgcttaccttgcgtgctcccaccctggtcctctcgccctttcttgcttccgctatccctt

SEQ ID NO: 9668 - DNA, 2300 bp, Homo sapien
tatagttaagaagatcctccgaccctcagctaagcttctcttggatcttttgctgtcttcaaattcacccctccccttacaaacctcctttttggagcctcactgctcccttgcggatttgatttcttgcttcaagcctcgtagtaatagtcccaggattctcagcctcccctcagatctccactcaccagcaagtaaaataacttgttttgtatgacttatgcaggtgaaaacgtttttaaagtgtagttgagtctctttcaggagatactatctcaaggaccttgcaataaacagtccatataggtagcagtgcagaattgagttgcaatgcccttaactatagaagcagtgatgatgatggtgatgatggtggtgatggtggtggtggtggtggtggtggtgacgatgatgattttaatgctagcaattactgaactcttactgggtaccaagtaccttgctaaaagcttcatatgtattatcccaatattggctgtgtgataagtactattattcttctcaatttacataggaggaaatagatttagagggggttaaacagctagctcaagatcacacagcaatttgggaacccagatttgtctgaacgcagaacccattattctatgagggcaagggagtgttaaacatcgcaggctgtaacaacttttggaaagagccagctttagcttcctcccaggccccttctctgatcctcctctgggattgttagccatatctgagtgtctaaattgtcgcaacagctgcaacagccgtttgggggtggtggctcctaagaactgtggactttctctgccactgaggatgtgaagctgacagcttaaaagaattccgttttggtgggaatggagatgtctggagacctcaggggataaacttgtgtctttgctagcctgtctttctcctaacagcatctccacagtgcctggcaccacttggtacttgataaatacctgttgattgattcccaaagatcccagttccatttcccacgtacctgcccgctcggggcgcaatcaacaactaaaactggagatttggggatttcagaggaacctgtgagaatcctgatggagctggaaatgcgaatttaggaaagacaggcagtctaccaccctcctcttctcgcccgcttctcctatttctccccactccttcccctccctttcaggagctcagggccataaaaatgcagatggaggatcggtgtgaaataacgggcccatataaatccctctgccgcccgcctgcaagatggattggccgcattgaaattcctccgcgaggataattaaactcggggcctcatccgggcaaaattacattcctgtaatggcgtcgctcggggtcccgggaaattgctccgtgggctttcagcggcggtttttatcgccggccggggtgtgcctgtctgcggctcgcctctcctccgggaccgtaaagctgctgccgtgatttatcctccccttctcccaaatccgattaaatggaggagctcggggccggggcgccgcggggcccgggagccgggagggggcggcgggaaggacggggccaaggaggggaggacaaacggcccctcagagagtggcggatttgcctttatttacagccgcggctttctttttattttttattttttatggggtttggtgagcttttcccgtctttctcgtgctgcgttcaagcacgatgcagggacggcaggggtttggaactggataggccttgtcgccctgttccaaagggcagggcaggtcctgtctgggagacaaggaggcctaggaaagatgagggccaggaagcctcccccacctccttccatcaggggaagggcgagcgaaaggggagagaaaacccacgttcaggagagcatgggggcgggaggggagggcgctgcttatcccaactcgcgtagttgaaacctgagcagaggctcgggcaagcctggagtgacctcgcaaccttacagcgggtcgcaggtgcccgttattcctagactgtcccaggagccaggaaagagggattcggatcatatttaaccctatcttctggctcgctgatgctgcttctctcatggtttatcaccggaatggaaaggaggaaacggggagtgggggaaagggcgaagccaccagaagcagctgcggcattttgctgactattcgcccatggagccggtttgccatccagtgatgccagagtcccggcgcgacagaaagcaggactcccaagatcttcctcctgctgcattttaggcactgaaccccaatccc

SEQ ID NO: 9669 - DNA, 2300 bp, Homo sapien
agttattcaactatttagtagcagggctaggactagactccagtctcctgcctcgaagacagctgttctatccatgccacttgctggcaacatgtgcatctagcaaaacacatcataaagtatcctcatcttaagccatcaggaatggaaatcaaaccatttaaacccttcctcttctctctagcaatattttttcttcgcatttctctgtgccctggtctctctctctctctctctctctctctctctctctctctctcgtttttaaaatcactcctgtttctttcgtggctctttctcattgtggcatgcctgcatgagtatcttgatttttctgctctaagctatggtttcttgtccaaagaaacatatataaacaaatcaaaacccttccttggtgacctttgtagaaaaggacacttggaatttctatatgagagaagctgaacctctctcttagcctatccagtcaattaaaatgagtctgtggcccccctgagggttgttaaccaatcctaagaaaggaaagatcaatctcatttcttcgtcaccactgggcagggaggctgccaaccagtcagaatctgccactcacagtcattaaaaaaactggccaatcagtccaaccttgttatatggtctggtaggaaaagaaagggactgattggaaaggatagttctgtctccacaccctttccttcctggaccccggttttccctttgtgaagtgaaagaaggacccttccccaagcctatagttaagaagatcctccgaccctcagctaagcttctcttggatcttttgctgtcttcaaattcacccctccccttacaaacctcctttttggagcctcactgctcccttgcggatttgatttcttgcttcaagcctcgtagtaatagtcccaggattctcagcctcccctcagatctccactcaccagcaagtaaaataacttgttttgtatgacttatgcaggtgaaaacgtttttaaagtgtagttgagtctctttcaggagatactatctcaaggaccttgcaataaacagtccatataggtagcagtgcagaattgagttgcaatgcccttaactatagaagcagtgatgatgatggtgatgatggtggtgatggtggtggtggtggtggtggtggtgacgatgatgattttaatgctagcaattactgaactcttactgggtaccaagtaccttgctaaaagcttcatatgtattatcccaatattggctgtgtgataagtactattattcttctcaatttacataggaggaaatagatttagagggggttaaacagctagctcaagatcacacagcaatttgggaacccagatttgtctgaacgcagaacccattattctatgagggcaagggagtgttaaacatcgcaggctgtaacaacttttggaaagagccagctttagcttcctcccaggccccttctctgatcctcctctgggattgttagccatatctgagtgtctaaattgtcgcaacagctgcaacagccgtttgggggtggtggctcctaagaactgtggactttctctgccactgaggatgtgaagctgacagcttaaaagaattccgttttggtgggaatggagatgtctggagacctcaggggataaacttgtgtctttgctagcctgtctttctcctaacagcatctccacagtgcctggcaccacttggtacttgataaatacctgttgattgattcccaaagatcccagttccatttcccacgtacctgcccgctcggggcgcaatcaacaactaaaactggagatttggggatttcagaggaacctgtgagaatcctgatggagctggaaatgcgaatttaggaaagacaggcagtctaccaccctcctcttctcgcccgcttctcctatttctccccactccttcccctccctttcaggagctcagggccataaaaatgcagatggaggatcggtgtgaaataacgggcccatataaatccctctgccgcccgcctgcaagatggattggccgcattgaaattcctccgcgaggataattaaactcggggcctcatccgggcaaaattacattcctgtaatggcgtcgctcggggtcccgggaaattgctccgtgggctttcagcggcggtttttatcgccggccggggtgtgcctgtctgcggctcgcctctcctccgggaccgtaaagctgctgccgtgatttatcctccccttctcccaaatccgattaaatggaggagctcggggccggggcgccgcggggcccgg

SEQ ID NO: 9670 - DNA, 2300 bp, Homo sapien
aagaataatagaaacaaaaaatcaaaatgatgagaggcacagactgaagcggagacagatacaaagaaaattgtagagatactgataaaagatgatgaaaaggtgatagggatggggagaagagggagagaaaagcacagacaaaaccattaggataaatcctgggagtagggatgtgcatggctttctagggggacaggagttgctggtagtaggtagaggctgaggctgtcatttagggactcccagaaatcatttggtggtacagaagaggctggaggatcttgcagccagtcccagttctctccacacctgttccatgtccatttccacaccctcctcctggagttgtttttgtttgttttaagacagagtctctttcaggctagagtgcagtggcatgatcagggctcactgcagcctcgaccttccaggttttaagtgatcctcctgcctcaagcctcctaagtagctgggactacagacatgcaccaccatgcctggctaatttttatatctgtggtagagatggggtttcaccatgttgcctaggctggtctcgaactcctgacctcaagtgacccacctgccttggcctcccaaagtgctgggattacaggtgtaagccattgcgccctgcctccctcctggagttttaaggctattgcaggtcctccttaaggatgacccatgacctagtatggaaggatcttgttccatgttccatgaaatgcaagggaaaactgaggtctgagatttgggaggaattttaatattagagctacccttttttgagcatgaaataacttgcaaggttgttagttctctgtcatggcatctcatttgacacatatcgcttttaccttatattacggttatttctctgtattgtctttttgctaatatataagctccttaacagcaagatctgtgtcagcccttctttgtggctcccacagtgccttgttcttattaagtgaaccaatgaatggcccctggagatgtttaagcagaggttggatgactaccaacgagagatgtggtccagggaatttctttactgaatgagtaactggaaatatatctctaagagcatttttggttttgaggttctgtgagcccatacatatgaaccgggctttcctggttctttccctacttctccaaatatgcagaggtaagaggaaaagtgggaaactcaagattaccaagtacctaccatgtgccaggctttgtacaaggcattttacacatctgatctcattcaatcttctcaataacaggcaggtgttagccacagtttgcaaagagggcttaagatagatgaagtttatatagggacataaagcctgggtgatttccataataccatgtttcttataattcgaaagatttacatagttttagaaaggaggaaaggcaaagagggagttgagaaatgaaagaaacagggagaagacatggcttctaaattcagggttgggagagagattctggactccaagccaggaaaaaaaaaatctacttttgtaagttagaataggacatctctgctgtcatgcgagtatcaacagacttggggaaagaaaaagcgcgaaggaccacgacaggggaatcctgaagatggggtattgaggactgaaatctttttttaaaattccagtttttaaaaaataaatagggatgggggtctcactatgttgtccagcctggtctcaaacttctggcttcaagcgatcctcctgcttcagactcccaaagtgttgggattactggtgtgagccactgtggctggccttgaggactgaaatctttggccctgggttatgggactggcagtatggggcacagaggtgcaacaaaaatgcagtcttggagatttcaggcatttgttttccagctaggaaggatattgtgagtctgaggtgattaaagaacatttgggagtctgggcatgtccaggctgtggaggtcctattctgtggcagggcttagaccagtgctgtgcagtagaaatgtaatatgaatcaaacacataattttaaattttctagtagccacattaaaaaaaaaggtaaaaagatccaggtgaggttgggcgcggtggctcacgcctgtaatcccagcactttgggaggccaaggtgggtgcatcacgaggtcaggagtttgagaccagcctggccaagatggtgaaaccccgtctctactaaaaatacaaaaaaatcagccaggtgtggtggcgggcccctgtaatcattccagctattcgggaggctgaggcaggagaattgcttgaac

SEQ ID NO: 9671 - DNA, 2300 bp, Homo sapien
ctcattatccattcccacctccaaatctttgctttggcctagaagaagcttaccctccccagtccccatcttgccaaactatccaaatttaatctatccttcaaatacttgaatatttgaaagtaatgactataattaaaataatgaattacatttattattttaaaataatgaattacatatattattttaaaataatgaatatttactattcattctttcaataaaagtaactgaatacctagcatagtacctgccacatatttgttgaatgaatctgtttcacattactttgtgccttgcactgagcacataaatgctcagtgaacatttgtctcctgttaatgaaccagcactgttccttagaacaatgggagttagtatcacatgccagagtttctggactgggagtatggtgactgcttgtgcttaaatcttgattctgccactcactagctggatgactccaggcaagtcattaattgtgcctcaatctcatcatgtgtaaaatggggataataacaaggcgtattacataagcctgttgtattaaatgggaaaattcttagcatagtttgaacagatcataagcacccaagaaatggaagttgttaccatttttagctccgagactgttttctcgtagacctttattttgggcggaagacaagagccaagaactcttgagacttgggtccttgaacagacctcactcttaacccactccagaccttgagctacctcctcatccagaaactggttccctaactcataaatcctgactaatgacacagacacatcaccttaatgtttgtgcagcccagtaactaatttttaagtgcctggagatcttcagatgaaagacactgagggcagacaccgcattcagtcataaaagcaaaacactaccaaaaaacttggaaaaggcagaagctccataacttagtgcagtagagaattaaagcaggcacctaggaagaggaaatcaatccttaagactgtaatcctttaatgcagagccagagaaagaggtaattctgaatgcctccgactacagggatggagaatagcgagaggggggacaggatgcccaagtctataacgtgacttggggtgtgggagacgtgtcaatctttcacctctcctaaataaaaaccggaacgtcaacatgtattgttatcctaattaatttaagccacttaaaaggcttgggcaaacaggccccataagtggcttgtttgtgaattgtgacaggtcctgaattatgccaagctcccttttcaatttcattcttctcattccaccgctcctaccaccacctcagtcaattgtatcctcttcctagacccagaagccactctgggggagcccagtccagatgtggatatggtcaggccccttagcactgaaatcctcaagttggaaaaaaatggtcagctgtgcagaagacatcattcttacaaggtctgtccctgagattgaagtaaagaagaaactgctataccccagctatcagtttcccatccccaaaatggtgggtagctgtggtgtagtggcaagaatatatgacgtggaattagccaaggctaatgcagttctacatttcatagctttgacacttcacaccgcctccttaaccgtacttcactttctacatctataaagcgtgcataacgcttaacgcctatctcacaggtgggtgcgaaaagtacaggacgggacgcaacagaaaccgctctgcccaccgttaaagcgttatatggaaggctttagagccgtaaatcctccccagcccccaacaacgcacgttacaaaccagcagccacccctaatgcagccggccccctcctaagggatcatgggccttgaagtcctttgctggccacaccctcgttttctgtcataggagtgagaactacgcctcccaggatgccgcggtgaggccgccgtcacggacgccctcttccccgccctccttgcgcgcagccttctgggatgtatagtcctagatccgagcacgcagcggcaaaagggcgcagaagaaccacaaaccccagaagccctcgcgcccactcttctccctcccctccagaagtcggagtgctgtttttgttgttggtgaaaggtgaggggaacagctgatccgtctgttgggtaagaaacttggcctaattgggggcgatcttatgggaggggagggtcaccccactttccagtttggggaaggataacgtaagggaactgtcgaaggggaatacaggagcgtttgggttgtaaccctttccgtactggagaagcca

SEQ ID NO: 9672 - DNA, 2300 bp, Homo sapien
gtttctcctggcagccctgcagaaccctgtccacagcgccccactacttccacctgggagcagcacttcacagaaggggaggccaggatctgggttccacttctactacccgcggctggaaaaaggcaggcgtctccacccacccacccccaccagccaggccttaggcaagggggccaacgtcatacaacccagtctagacttggccaggccctgtttgctctcctcgttttaccttgaccttggactccagcagcaggataagcagtttcctagcagagccggctcccagcaagaccctatcttccactgggctcatctctccccgcccctccctcattgccctcaatgcacactcgagctggtctccttatgtcttaactctctttctgttgtatttttcctcctaatgccagcccagcccgcagcctgctttctgaactctgagctgacccttctggatgaagatcacgcagataagaattactatcctaactcaccgatgtccgggtgctctcaaccgtcaaacaccaccttctccccacaaagaggagggaggtggcccgaaggggtttctgcagacctgtccatttgctctccacttgaggggtgcagtaggtctggctgagcgaggcgctgctctgtggccatggtctgtgcgctggctgcacacgagcactcagcatttaaaacctgtggcagagggaggaaagaaggaaacgctgcagcccctttcccctcttatttttctctcttcattacgatttctcagggaggtcctgtgctgaaagggaacttgactcaattccacggagatgctcccttagaaaggggtgactctattgaggctcctgacaagttgggagattgggaggaaagaagggagagcttttgaagaatcagtaagttggtgttaattttttctttgaaatagggggcagttttagatcatgaaactattcctcactaaaagagggtgacctaagaaagccgtgggagctccattgcgggtattcaaactggggactgtgtcatgtggcttaacccaggcccctgagggcagaggtgggttctgcagggtcccccagagtggcgccagagagaggtccctccaaaggtgtagcactgaatctcccccattttccacgttttcttttgtatacctatagaaagcgcgctctccttcgcatccagggcttttagctttcccaggctgaatcttgcgcccccaccacccgcatttctttgaaaaacctcactctgagattttttatttctattacatattgaaatatcagtctattctattgcttttatttccctcgttttattctttctccatttattgccgagtatattccattgcctctcgatcccctgccccaggtgatgaattctgtatttgggggttgtcacacccctctccgcttgagaaaaatccagcgaggtaaagcagagtgtccttttcagacatctagagttttggggaatgtggctgaaggtaggaaatggaaacacaatcccggcatcaaaggctcgctacgcagcatcgggttctttccagccgcgagcggaggcgagctgccagggccagagcgctcctgactgttttctattatcttcatttattattttttaaaacctggtttcttccccacccttagcttcaagccccaatccagagacttcagcagtcacagtgatcggcttggcggtagggggtctgtctctccggtgcacatcctatgcctaggcggaggcgcccagttacagcgctctcctccctacacccctttgcgtcggccaaattcagcctcccccccctccctctccctccctggggcctgccgggggcgtctccctgtccctttaaatctcccagctcccgcctcctttggcctacctgagatccaatcagcacagactttttccctttcgccccgccccacctcgaggggagggaaccccaggagacctggccggggcatcacgtgcgcagagcgggtcacgtgggcgcgggaggggtgctgagaggtggagagcgggagccggcggatttcttaatgaagtgtctccgcatgcgtagagggaatgtagggagggaggtggaagcactaggaggaggggaggggtggagagaaaagaggggagggatggggggaggggaaacaggagcgaggtgtctccctagctcgctgcctctggcaagtggagtttttaaaaagctccagcagatcatgtcatgacgacttcgctgctcctgcatccacgctggccggagagccttatgtacgtctatg

SEQ ID NO: 9673 - DNA, 2300 bp, Homo sapien
aaagaggagggaggtggcccgaaggggtttctgcagacctgtccatttgctctccacttgaggggtgcagtaggtctggctgagcgaggcgctgctctgtggccatggtctgtgcgctggctgcacacgagcactcagcatttaaaacctgtggcagagggaggaaagaaggaaacgctgcagcccctttcccctcttatttttctctcttcattacgatttctcagggaggtcctgtgctgaaagggaacttgactcaattccacggagatgctcccttagaaaggggtgactctattgaggctcctgacaagttgggagattgggaggaaagaagggagagcttttgaagaatcagtaagttggtgttaattttttctttgaaatagggggcagttttagatcatgaaactattcctcactaaaagagggtgacctaagaaagccgtgggagctccattgcgggtattcaaactggggactgtgtcatgtggcttaacccaggcccctgagggcagaggtgggttctgcagggtcccccagagtggcgccagagagaggtccctccaaaggtgtagcactgaatctcccccattttccacgttttcttttgtatacctatagaaagcgcgctctccttcgcatccagggcttttagctttcccaggctgaatcttgcgcccccaccacccgcatttctttgaaaaacctcactctgagattttttatttctattacatattgaaatatcagtctattctattgcttttatttccctcgttttattctttctccatttattgccgagtatattccattgcctctcgatcccctgccccaggtgatgaattctgtatttgggggttgtcacacccctctccgcttgagaaaaatccagcgaggtaaagcagagtgtccttttcagacatctagagttttggggaatgtggctgaaggtaggaaatggaaacacaatcccggcatcaaaggctcgctacgcagcatcgggttctttccagccgcgagcggaggcgagctgccagggccagagcgctcctgactgttttctattatcttcatttattattttttaaaacctggtttcttccccacccttagcttcaagccccaatccagagacttcagcagtcacagtgatcggcttggcggtagggggtctgtctctccggtgcacatcctatgcctaggcggaggcgcccagttacagcgctctcctccctacacccctttgcgtcggccaaattcagcctcccccccctccctctccctccctggggcctgccgggggcgtctccctgtccctttaaatctcccagctcccgcctcctttggcctacctgagatccaatcagcacagactttttccctttcgccccgccccacctcgaggggagggaaccccaggagacctggccggggcatcacgtgcgcagagcgggtcacgtgggcgcgggaggggtgctgagaggtggagagcgggagccggcggatttcttaatgaagtgtctccgcatgcgtagagggaatgtagggagggaggtggaagcactaggaggaggggaggggtggagagaaaagaggggagggatggggggaggggaaacaggagcgaggtgtctccctagctcgctgcctctggcaagtggagtttttaaaaagctccagcagatcatgtcatgacgacttcgctgctcctgcatccacgctggccggagagccttatgtacgtctatgaggacagcgcggcggagagcggcatcggcggcggcggcggaggaggaggcggcggcacgggcggagcggggggtggctgcagcggagcgagccccggcaaagccccgagcatggatggtctgggcagcagctgcccggccagccactgccgcgacctgcttccgcaccccgtgctgggccgcccgccggctcccctgggcgcccctcagggcgccgtctatacggacatcccggccccggaggcggcgcgccagtgtgccccgccgcccgcaccccccacctcgtccagcgccaccctgggctacggctaccccttcgggggcagctactacggctgccgcctgtcgcacaacgtgaacctgcagcagaagccttgcgcctaccacccgggcgataaatacccggagccgtcgggcgccctgcccggtgacgacctgtcctctagggccaaggagttcgccttctaccccagcttcgccagctcctaccaggcgatgcccggctacctggacgtgtcggtggtgcccgggatcagcgggcacccg

SEQ ID NO: 9674 - DNA, 2300 bp, Homo sapien
tcaatggcgctcatcaatgtatcttgagaaggggaaataagatgttacagatgctgtgacctggaatttgcagctgagagatgctcctctccgtagcctcccagccccttatcagttaggcacaaaaaggccaatccaggctgagtctcctgctcattccttggcgccaccggctctaactgaaggtggcggcttcgggtttgcagcccatggcttgccctaagttccgacaagtgcgcctaacgcggggccggctcctgggggcgggaggggctggaccaggccgggcagctaggcaagcaggggcggggaaggggaaccggccaagcagggcaagggacaggcaccgagctgcgagcttcgaactgctccgggcagggcggcgcccgcggggacacatttctgtcggagtgagcagctacggtttgggatatgaaatcgcccggggagcggtggaattcaaagaatctgcgtttctctctgccgcgtcctgcagaggagagaggggagggagaggaaaaaaagggagaatcttctctgcttcgatctgcttttgcagctttggcttattctcaggctttctctgatatttaactttcacctaaatgggtttctttctcattctctccgaatctctgtctccaattttctttcaatcttctggtattttttcgtatttagacgtttactgaactatttatccaaccctgtattacttaagccatgcattggttagaagctcgaaataatcacatggaaattcgagtgttttttctattagaccccaaaaggatacatctggtttgggggagttttattttgtctttctttttaatccgcttggctgtgttctgtggacctagttgagatcggattgtggttttgcagatgttgattatctcaccaatggccagcattgcttctcggccttctctggagggagcttctgagtttgcaccataaatataatttcaccccccaataagataattcttcaagggttttttccctcaatcctagccccctcaggaggcaacctactgcgggcctctgcactgctatctgatggtcccaggggcaggcttggccggttctggggtgcagttgtctcctccgcagtgagaattaggcccctctcagcccagtcaagccctgttaggggtccaaagcttcccactgcaaagactccaggaggcccccagaagctcctcagttccccggaaatgacagcagaagagtagttcgcccccagattttcaggagcaggcaggcaggtccatgtggagctaggcacctccttttgctgcattctctacctcccttccgcatccttcctctagccgtgagtggaggtgtgaggctgggtggctcccggctccagaggaaaacccggcattatcaattatccttgagtattggggaagaggactccaaatgtctctccaaattcctgaggataaagagctgataaagaagtgtgcagcagcagctggggcgggaagagataacggcagggaaacctgtccttacccccacttcgcctctactgtaaataaaccccgagccaaagggctcatccgtctccttaaacagtcagtaaactttatatgacacaatatctaatagtaatttattgaggagatattgtaaattccaacggttttagttaataaagaagctaattaaagagggacaggctgtgcttggccagctgttggcgataagataatatatgggggggggtgcaggttataggggtgtatatatgcgggcattttttggtgtgtgttttttcccttttgccccgtgttgggcaattgctttactctctgcgttaggttatatacattgttttagaaaatcagttcagcaaataaacctgcccccgccctttgttaccccactcacccccaggattggggaagggggaagttagagtgcgggatgggatggtgggggggggggatcggttgtccccacccctccccctggcggccgtgcccacgtgagtggggcggccaatgggtgactggtgcagatttaactatgtttaatgtcagatagcaataaagtagaagctgccggtcgggccccgcggaaatgggcgagcataatctcctgaatcccgggtttgtggggccgctggtaaacatccacacgggagacaccttctacttccccaacttccgcgcgtccggggcgcagcttcccgggctgccttcgctgtcctacccacgccgcgacaacgtgtgctccctgtcctggccgtcggcggagccgtgcaatggctacccgcagcc

SEQ ID NO: 9675 - DNA, 2300 bp, Homo sapien
gccacctaagctggtggacgctgctcagaggttcctgggacctatggaggaggtagtggggagggagaaggacagctcctttgcccccacaggccccacccagcttcctctgtggagagattgtcccaggatgctagcaacccgaccctatttcttcccataaaagccctattttacgagccggtttcactggccccctcaccaaatgctccaaaatgaaggaaatgtcttaaaagcaggctggaaatggagccgctgctattgggcttcagtttcctaagccagttgtagtggcacagaaaataccttttctgggtgggattgccctgttgggccacccagatctcccgcctcaccacagagcagaggcgggttggccggagccctgattctctggctttagctcctacattaaggctcggacctagtcctcctgatcaaagtgagctcgcggcatttttatgagatcaacttcagcaactctttattagcgatcagatgcctgggtcgaaaatgcaaaagggaacaaacagctaatcaatccaaaaggaaaaagaaaagagaggggtgggaaggcatggggtgaaaaacttcaggtgacacaaagcaaaaagattccagtcaccaaaaacaaaaacaaaaaaaaatcttttgcccccagcaagaatcatttgtttgggatctgttccagcctccaggccctgccttctgcctgcacattctgccctgatttccggaacctggaagcctaggcaggcagtggggaactctgactcgcctgtgctctggagcttgatccgaaagcttccacagtgaggactgctccgtggggtgagtgttgtggcctatgcctccttgccccagcaaggaaagtgccttctgctcaggatttacaagtctcccccattttgctgctttcctttcggcgggctcagtggttttctcctcactacagtcagaagttgagttacaggaagattcgccagagatttatcgcctggccccaaacttggagagcctcgttgtcataaacagccatctattgtctagacttttatctccgggtatggatcgtgcattagcgaggctcaggagacatggggctggctctgtggggtgtttgtgcagccggtgcctgcccgcaggccccaggggtttctttgggtcattttatgagagtgcacacatttgtgtacactcttggagctgggcaggtacgcctgagtgttcacgagtggaggcccaaggtagggaagtctctttttctctgtgttggggaacattccggtgcgtgtacttgtgtgttgggtgagaatttgtcatggtatgctttgtttctggggcattttaagtgttcctgcctgggctttttcaggttttattaacttgcatccgcctggcctgtttatatcccttccaagcagatcatctggtgtttttcaatattggagtgcattgtgtgtatttggcttctctcaggaaatggttttgggtgataccttcccaggcttactccctcagatacccccacccaccctgaatcacacctcagcctctgctttcaccaggttgtctggccctgccccactctctgcaagtccctaaatctccaaagtgcctgccaattttatgtcacagacatgaagcacatttttgtagggtgaggtctggctatctctatctttcccacactagggggaagcgtccagctcataaaccacctcactaactggagctccccttcccagactgaggggacataagaaagggcctccccagtccatttcaactgtttaaaatactatccaccgaactctagatactgccaaagagagcctgctgttccctccctggggcttcccggctacccctccagcccgttgagcccaggcattttgtaacataagtggcactttgcccagattaaacgtctatggcagagacacttatcaccttagatcttggggtcagagctgctttgaaagccaggatcatttaacatcaccagaaataatcaaatcctcttcctttgttttttatgatgaaaacacagggtaagagagcaccaggcactgaggcctgggagttccacagaccaacacccctgctcctggcggctcccacccgggacttagaccctcaggtccctaatatcccggaggtgctctcaatcagaaaggtaaagtgggaggtgggggcagatcccagaggccatttttccagttgaggagggtggaggtgacaacaattagaggcttttggagcatcagattgaaccagaattccccatcattgttttc

SEQ ID NO: 9676 - DNA, 2300 bp, Homo sapien
ctcgagtttaatgaggtcagtgtgaaccccattaaaagccatagtccatagttccccaccactataattaaaaatgctggccccatctcactctataaaaagggctagaggaaaaaggaaacacagcagatttttcttttcatggccccttaccaacagaagtctcacacttcagcaaagccccaatctagttcttctttgcttcagtttaagatctgaccagaactaaaggagtagcgcccagcattgagtgcgtagaggggcacctgagacctatccctgagtattccagaaccaccctgagaatgggacccatggtggaggcagactccactcaggtgtcacttaaatgctgagcaagtttgaggaggcaggagcattgaggaggaatggattttaggggttacatatggagacaagctacaattttttgtgtcctccttatctggtttgggagccgcagcaccttatcatgtttcatcaagacaaatccattctaatttctttaagtggaaactaattttaactgagggttatggatgtaaagagagttcgggctattttttgttttcccctgagtgtgcattgggctgagcccttgggggcttcggttcttcccctccttcccaaacaaattgtgccctggcagctcctctttggatccaaggttgctttcagctcatgctggttgcttttggccccttggacccagtccagaacctttcaataaagtgattttcagatgcccacatgtgtcctgtggtgctcagagggatggaaggcaaggggttggggatgcagaatgactgagcctacttcttgggctacagctatccaggaggctgacagacttgtaggagggcaggacagggctgagaaataggaaggaggcactaagatctggtcacagccccagggacagaggctgggggctttgactagggagtggccgctgggcctcccctgatgccacagcatccaccgctcctttccactgtctggttagtctcttctggagacccatacctggccccaccacccaccttacagtcctcaaaatcatccaaggataagaaccccaaacctagtcccccccaccatattcttcctggacccctacactaggcttcttttcagcgcactagctgaggctgagccactaagccaaagggccctgacatagaagatacatggctctcattccaatccttttctttggggtttgggatttgaaaatccacagtggatgtagctttcttcacattgattgacaataaaggcaggcatgaaatattcacccagggccactctctcatactaaatatttaacacaacattagagaaggtttttcccagacttcgccaggcaccggctgggcggctggcgcactgctcaccactcgtttatgactaatctgactccctagccaggggcagcacagcaagccagacaaagttgggacactggcttgcagctgggctgcctcacctttgggaaacttcagatactcttccgggagtctctctaaggactccagaaaggtagtcttgacacccagctctggccaggaaaagagtggacttcttcaaactcttgtgaacaggcggtgtctctgcgggttggaagggtaagagtccctgagatttaagggaaaggattcacttctctggggaaatcaggcagtggggaaagaagtcctcactcccaccctcctggtgctgctcacagagaggaggcaagacccccatacatgagagccctcctccttcccccaatcctgggggaaaaaagagcagcagctagaaaaaaatacaattaccccttcccagccaccaccctcgcccatcccaccgcccaccccaccccaaccctctctctcctcctttgctcgtgctgtggtatggagagaaggggagtgacgagagaaaaacgaatacaaatctgcaattgattttcataatgtttctgcggtgtttgcaaaccaatcgcctgaacgtccccgatcttacctaagagagaacccctcctacgtctgcgaagtgctccgaactgatatatgacaatatctactttggatcacgtgctcagagagagagagactaagacggataacgcgtcatctcgccttcccaaattttcccccctcgctagaccgggtccaaaacctccatccggagccggcaggagaggagaacgatgtttaactcggtcaacctgggcaacttctgctctccgtcgcgcaaggagaggggcgcagatttcggcgagcgagggagctgcgcctccaacctctatctgc

SEQ ID NO: 9677 - DNA, 2300 bp, Homo sapien
gactccaaagtggggggtaagggtagggaactgggacgctaaattcctgggaaaagcacaccaggcaggaaaataaaggagacgtgaaagaggggggagggaacccccaaagccatataattctcaattgctttggtatttaatttcatcgtcccataaatgaggaaatatcagttcccatactaaatttttatccctggctgataaatatgacgggaaattttcgttgggtcctcgtaaaagggaacggtttcgatcaaactggtggggaaagactaatgcagataatacaaacagagtggccataaagtctcgcccgtttcccgcgggatgggcggtgggacaaatggctccctggattgactgctgcccggactgtcccaagtctggggcctaaacagcctaaccttgccctggataacccccatgctgaggccacggtgaccctgcatatgaaaacacaaaaccatttcaaatctcccctggccggtcctgcaagcaaatcatacactccacatttccttccagttttccggaggttcaggaacccctgcgtcttctctctccacccctggatggggaaattcggcggatttctttctgcggtcttctagccgcagcgggcttgggcctccttagaaacggtctagcctcctcactcctccactccagggcgctgggctccagtcctttccccgccaaactccagcccttcggaaagtctgaaccctaggctctgtccaaggaaaaatgtggggcgacaggaaagacaagttgttctccagattccgtttcctgaggaaggggtggagagtttagttcgctttggaagaaggcgatggagaaacggaaataactgtttgaaacatacggttccccttatttcttccttttatttaaaaacaaccacaaaaatagactggtctgtcttctttcaaacatgctcccagcccgtgcgctctgtaaaggacgcttctctgggtcgggttttgttgcgtcttgtgtgctggtttcccgtgtgatacgtgactcctccaaactgaccgaggctccgcaggttccctctttctttcccggaatattccctgttttagcgggggcaaggtcaagcggaaagcgaggaccgccagggcctgaagtaaagcagcagaaccggctccaaggccaaagccttgtgggcccctgagatggtgacccaggagccgcccaccctgccaggcccaggccacagctctcgggtcggggatcgggtgcctctggtctctggcttcctctttcccctaccccgcgtccattcggaacctccttttccgagcagccatgaagtgaccgtgaccccctccctggcccaccctagaggctggagattcccagtcaacccccacaggaaacttgcaactccagcgccgcggcccccaagcttccagccccgagggccaagcccggggaaaagaggaggcgggagagcagaaactttagtcctgtttggtattccttaactttttttcccctttctctgctcatcagatccccccaaacccccccccccacaaacctcaccccactcccatccccaaggtaagaagtgggagtcgggtccggggatatggaaaggggagatgaagagtggggagaagtacctgattcgtgtctcgaccttttaatttgaatttgactgttttgagccccgggttgcctcgctctctccctctctcccgcatttcccccctctccgcccccttctccccaggagttacaggctggttactggataaacaaaccccactcttcctagaacccccacccccacccccacccccctccacccctctacctcccctgccgcccggggggcgcttcctttgttcgcggggaagggctccggtgcccctaccccgaggcagctgctagatggcgctgttactccactctgcgcgctccgcctgccgacaacttgaccccgctgacgtcacggccgtctgaatcatcaaggccattttcaaatcccattggtctagccgtcacatggtgagaaccgaatgcgcggataattacggagctgatatttccccccctccccttctttttcctccctcccctccaaccgcgccccccctcccggatggggaaaaaaaaagatgtcagctcctccgctgtagtattgctccttaaaaacccctctctctgaaaatgacatgccctcgcaatgtaactccgaactcgtacgcggagcccttggctgcgcccggcggaggagagcgctatagccggagcgcaggcatgtatatgcagtctgggag

SEQ ID NO: 9678 - DNA, 2300 bp, Homo sapien
tgccccaggcacacagtcagttggggcaaagcgtgtcccaggcagggactgggtgctcaggagcatttggcttggagatagagtccctgatgggccgaaattcactaatgaacgacttctgtgctttgggtctctgtgcccccatttccgtttcagagctgttgggcttatgtgtgggaggtcagagagccaggggttgaggtgtctcctccccaaatgcagagaaatggagcgaggtctcatagggccaaggtgaggaccagtctggtggtcagagtccacccccggcacaaggccgtggatcatggctaaggcgatggtaattatttattcccttcgccggaagggagtcttcagaaggaacagcgtgaagagaagagaaaaaattatctctctcgtctgtggatattaagatggatttttatttcttaaaggaccctccccgccgagagcgcataagcgtaaacttaatatatgctccgcagcccaactccagaaatcgcaataaaagttaaaacctcccctactgttttttttttaattatgatatgggaaagaggagcaggatttatagagctgaactctcagtgtatgaatgtttgagacttgcgggaggaagaaaaggcaagagctcgccaaggcgagccttggtctctgagatctctcgtcggctgctggggctccggctcagcctggcagatccgctgtggcctctctgggacctcgccccggcccacggcctgacttcggctcggagatgcagcccttcccgagaacaggtgaagaagacggcggcagcggggactgggggcttcgggtgggaacgccagggctcagggctttgtgtgggtcgtgcagggggcgaggttcgaagtcctgggctggaccgcagcacgagtgtggcccggacggctgcgtggccagaaggggtgttcgggcagggtgcgagagcaccggcaaggtggattgtgtatggactttggccgcagacagagcagagcgggctcccgggctgtggccggcggcgaggcgggcaaccgcatgttgagtctatagaaaggaccttgaggtctgctgggtgtttgggctgccctgggggcggcggcccagagtgtggagcaagcggcgcgcggggcgcggcggtcagcgtgggagaggctgcaggccctgcacgcctctgcagctgccgggccgtgtccgggacgtctgaactgaggccgaccaatggtcacagcatgaaaaataaatgcaatggaaggtctttctgtcttttcttttccgcgtaaaaggtcctttcttttttctctctttcggatatacctggatttggtccagaccaggttgcccgcgggagggccccgcgagcggcagcgcgcgagggagggagagagagggagggcgagaaggagggagggagggaaggagggcgggcggcggcggccgtggtggccggggcttccctccccaggcgggagccgcctgtcctgtatctatggccgtggggagcgaaggaccaggtaacgaaggcgcttccgaagcgggattggaccaaaccagagggacagagtcttctgggtctctctgcctgaggccctggagggagagaaggtagggagatcggcgcccgccgggcctggcaaagaggcctcgggaaatgttgaacctgtatgtgatctcaggctcacactcatgttgtgggtctgtctgcctcaggagatgcggtttgcctttctgtctgagacgccccaaaccctgagctctccttcccaaggctggaaaaaaaatcgggaaaaacggcggaatttgcactttcattcattgggttatctgcaactgagaggggctggttaaggcgtccccaagttggaagggcgctttgcttctgttttctggatgcagagtcctctgactccctctgccacgggctgagtttccggctccaggttcgcgtgtcgccctgaggtttgaggccagacagctcgcagtcgggcagggagggcgggggagagacgagcggctctggccccttaattgtacttcgggctcgtattgtctctcctttcgccacctccgcttcctcagtctgggctccaaagtcactgcaaatttccttgcgacacatacatcacacaaaagatcaggtaacaaggcgctcagggccactggggctccgggcagggcagggagcggctctagctctggggcggctccccctccagccactcccaggctggaaaaccagaccgcgttgggggagccggaaatagccccgcttgctgcggagcgtcagggcgggggcg

SEQ ID NO: 9679 - DNA, 2300 bp, Homo sapien
tttccttgaactagtgagggagattttttgattgacagctaacccaactccatcaaggccaaagagatattctgtttcttgttgtaagttgggcttcccagctcagtccagctcaagggaggggaagacagtggcgccaaggagctgaacccccaagtcgcctctccccaaccaaacacatccctcatcctcccccatgagttgaaatcccagccccgttaagccgcccccttagaccaaaaaggaaaaggaaagagccagagagggggaggagcagagacttgggagggggcctatggagctggggtcggtgctgccagctgcagctgtctccccctaactttcctccccccggaacacacatactatacacactctccccagcccctctccaccccagaggagaaagatccatagagacgcaggagaaaactagcccccgcccctacccctggcgtttggtcccctcctggggacaggagagggaaagaagggcaggcgtggccgggtctgggaagactcctaccctgctgcctccagagcctgcatctcaacctcagctcctgtctattttccctggccacagactgggactcttcctttctgaccctgaaattgcacccctcctttaaattcactctaccctgcctaagtgcaccatatttctgggggtttcacctgtccctttctccccaccccccagccaacctccatgccccctcttcttcacccaccctgataatttcctacttgactaaagcccccctttactacaccaccatgggacagtctgatgcaaagcagagggctgggcacaaaccctcaattgaaggaggagggtagcaaccaacttattggggggaggaatccaagttgtctgatattcctctgcaatcacactgccccctctggaattcctgcatccgaccccaaagaaattgctttctcctgttcctccgttgcttttttcccgttccaaaaacagcctacaattttatttaatgaaagatacatttatgaacaatcaaatgatcctcataaaaattttattgagggacgtaaaaacaagctacttgcccacgaccgaggtcgctcttttgccttgcccgctctcaccctggctctctgcagacagagcccgggagcgactttttggggggagtgggggtggggaagtgtcgcagagatggagttgggggcaaaggagggtgcgcaggaagatgggatggggacgccccacttaagttgtgtagatctctcctacacttcttcaagctggcaaagaaagataaatagatatagacaataaatttaaaataaaggcgcctgtatatctgtgccaaagcaaagagaagacttctgaggctgctgataaaggtgtatgagatcctgaggttctacccctcccacccagggaccaccttccccaggcttcccctaccccagatttggggggcagagttggccagtggcagaagaacgctccccttccctccttccctccctgtatctcagcttccccagtcccctcccaccctccctccctcaccgcccctgctgctcctgaaagaaatacatacatacacactatttaaaaacgcatttttaaaagccacgttccgaactgacaatcgctgatctcggctcgcgcagagactgcgggagcgtcggggccgacagagacggattacgtcaagaaatagttcctccacctacctcggtcggcctccccgcccctgcggggctcccgcgcccagctcggccctgggggtccgagaaccctggcttcggggactggcattttcaccccattaaaaaatcctcatggttggggggaggccatctgcttatgggtggacatgggcacaggggcttctcagatgagctaggagccgtcctgagggggtgaccggtgccttgggtccagagttccggacccccaggaaatcgcaggtcgcggggagcagcagagagaagggggtgggagagggggaaaagaaggcaaggaaaaaaaagcccctgcgcattgatccgcgccgtatttttgggtaaatacgatcacgtgggggccggggagccaatgagctgtggggaaaaggctggaaaaataattacctgacttgattgttctgtgagcagataaaaagtacatatacagttcatacaataatcttatgtatgtaaaaccccgttacgatgtcggcgacggggcccatcagtaactattacgtggactcgctcatctctcacgacaatgaagacctcctagcgtccaggtttccggccaccggggctcatcc

SEQ ID NO: 9680 - DNA, 2300 bp, Homo sapien
gagacgccctgtcctgacccctactgttctggaccctagggaggcctgcagccctggcacagccctcttctgacccttccctcgtgctgctccaatgccagagttctgggtgtctaagagtttgggcagctcctgagatgggggtgggattccccaaatgcaggggatcctggagggagctcttgctgcctgcaccagtgaatctcctttgggaatttgacagagagtggccatttccccagcaattacttagataatagggggactgggttgggtgggaggaggtgttcattctctctaaaccatcctgccctgaaccgccattccttcttccatctccagagctgggctccggatggggaaggaaaaggtctggttgcctaaccacctccttcctcatccaaccctgaaacccccaggatgtggaagaaaaacaggtagcattttgctttcataatgcaaagacctaaagatgcatctgtgtttgtcaggcatgtatgcatgtgtgcctgggtgtgcacatgtgcgtacagtgtctgtgaggtggcagggatgcttccaggcatgtgtgtgctagtttacactgagcatggacttgatgtgtctcagggtgaaaagtagcacgtacagtgtgtgtgtgtcctgagtgtgctctaggatttcctgggtgtaacagcctcacaccctggtgagggagaggactggaaaaataattcttactcatctttttcattcatatgcacacagcatgcatgtattctcaccttctccctttttctctctgtctgtgttaagcccaaatcactgtacacacttatggccagagaagggtgctgatggactaaggttctttaatccattagaattaacttgaacgtattcagtcttggggatgggggaaccctccagagaaagtgtggataaatatttaaagagtgtctgttgatagttcccatccacatcctggcctgggcagcctgcctggggaagagggagctgcagtgaagccaggggccccaccaggctgagctggcatttcctatggcatgggggtatgtggggacaagtaagaggcctgctccagtcccctccaactcagatgcaaatagtctcctaagaagaaatgtcctgaatcagcccagctagaaaccagggacacacagctgccctttccttttagtctccataagcagctttgctctcagagcccctagccaagcttgtggccattgcctgggtttcctgctccatgcaggggctcgtgtctgaaggggcagtgtggccctgactgggtatatggagttttccccagccccacctcctctgaccctctcctctacccatagcaggtagcaagagagtctcctggatctaaggaagaagacagaacagcttcggaccctggggaggggccaggggatggagggtctgatgcctgaagtatttgggagtatggtgtgcttgttcctcctcaaagtctccagacttagggaccccctaggaagcccatcttttgggttaggggccctgctctggcttgcaggtattcatccccttggaggtcttatacctgttgaggtaacctgggttgacctgctggctcaggtatctctctctctctgagaagaaggaaaagagaagcgaggctgggggcgagaggcaccttcacatctaaattcgtaccctggaaaactggccccagccattagctggggctggctcaccacccccctacacacaccacacacccccatccctccccctctcctcccctccccttcctccaggtccccccagccctgtacccctcaacccccgccatctctctctctctctctctctctctctctctctctctctctctctctctctctctctcgcctgtcttcatgtcgtggattgatgaacgcgaatcgcgtgtaagcgccgccaccgccgggagtctgaggaattcgcctgggctgttagaggaaagagctaagtgagagagcgcgagctctacctaccgacagtgaggagcgccgccgccgccgccgccgcccgctcgccgcccgccgccgccgccgcccgcgccccagccccgggagctctgctgatccggccgagctcagcaccgaggcgccccccaacctgcccagcccccagcccaccagcccagcccagtcccggggagccagctggcctggggttcggtcccggggggaggggagtttcgggggtactgggcggggtactcgtgagccagaggggagggggccgcgggttttcatgtacccagcatgagctcctacttcgtcaac

SEQ ID NO: 9681 - DNA, 2300 bp, Homo sapien
cctctgttttctcgtttggaaagaaatggaggtaaaaacccgttttatgggggaacgtaattgtgagcgggatgcgctctctttagaatcgcgtcctcccaaatgctcccgccgtcccattaccggaatggggaccattcggctgctgcagataggactttctctcccattctttacttttttattagccaatcaaagtggcttccgaaagccatttgtgatttgtgaaaaatagtatctttcaaaatgctgagttgaagcatctcgctcattgctccttgaatttattattctaatctcaaccgtagagctggaataatgcagctattaagttggggggcaaattcgtttctctggattaaattttttttcctccccactccctcattgcatcagccaaggaaggtgcggacctgcaagagatctgggggtgggtgagagaggtagtgagcgtcctgaagggctccttgagggacccttggataggcgagtggtttggtctccccagtcttatcttccccagataagatgccctaatgactgcctgctggctgggaaagttaccccgcccaattagggagaattcaggacaggttgtgccacagtctagaagtaaaatttccggtgagctgcccgcagcgccgtcccattctccccgctgcccattgtgaaaagctgggccagcgcttccttgtcgtaatttttaactacctgttataaaatttatgggtgggtttgtgaaaagaaacgaggtccctgcatccggcctagggaactgcttttcttactatggaggaagtctggggaaggcatgaggtatcccctcttggtcagggttgaggcacccaaccattgagattcccatgccagcttgatgcgggaccaagtggagagatgccggccttcaaatctcgagcccgtggggagagtgacctgcctgcaacccctcccccggcaaatagtctctatgggggaatttattctggactcaccttcaaaattaggggtctggaaaaacaggctgctcgaaattttagcacagaaggtggaattcagggcagtaaaaggttattttttcaggcctcggtagtacatcccagctgcccagacattgaatcaggaaatttttctgagaaaggcaggtgggtatgggcaatctgacacgatccaaaaggcttactgccttgcacccctccccgcaaaaaggaagtagagaccaagatcttgggctttaattttatttttaattgtaaaaagatttcaaataagccaccatttgaactgggaagggaaactagggatggtcttgggggaaaatgtcattctctctaagaaagggaccccggggatgtgggtcgttttgagggtcctagaagttgaccccaattctcacctctcctgctgcactgcaggattgcccagggtaggtctagtcccctaggttcttcagaccactccaggtcaggtttggttgggtggctgccagtggtcttccactactgttcctgtctagggtggagtaggagctttcaggggtacggcatagaggggatgttgttctcttactaaaaaaaaaaaaaaaaaaaaaaggtaggggtagggaggcaccctttcaatccctgcaattcaccagccatcactgcctcaaggccacaaatctttgcaaagctttgaattccgcctgatccaaccttaatgcccccatttattaaggacaatatttaaaactcggcaagccaggagaggcaaccgaccctcagtgcttgaagctttctttcgcctgggcgtccgccctcagctctttctgcgctcgcctgcagcagcctggcccgtggggagtgggcggtgggtgggggtaggggtggggtgggggtccggggatgctccctctatgagagaattgggtaaacatggcgaccgcggcgcccatttgcacacgctacacaaatgcatcgcattcccggttgtttgcagaaaatttacagctgagtaataaaagtttacgatcgactcacaagttggattggccacaagaagtcatgtggattccatccatgaacgtgaactttttattgtggtttgtccgttccgagcgctccgcagaacagtcctccctgtaagagcctaaccattgccagggaaacctgccctgggcgctcccttcattagcagtattttttttaaattaatctgattaataattatttttcccccatttaattttttttcctcccaggtggagttgccgaagctgggggcagctggggagggtggggatgggaggggagagacagaagttg

SEQ ID NO: 9682 - DNA, 2300 bp, Homo sapien
ggggcctgaagcctcagccagctgttggaaacctctgctcaggcatgccatgaattcgaggacagctggattctagggcaaaaagcaactcacattggtgtctatgtttgtgtacctgccaagtcaccccaaaaatgagataactcatctaaaattttttttcttaatttaaaaatcctcctctaccctttccccttcatttccttggggagaagaaagtgtgatctagaaggaggaacctttataattataggagtctttccccttcccttccaaataccgacaaatttctgtcctttctggaggattggggctgtattttctaaaaccaacacaaattgtctggcaggaagactcttcaaccccctaacgaggttcatgtattaactaacatgttgtctccaccagctcctgcacactgtctgcttttgggttcgaaactttatttttcccccctagcgacactccagggaaaccttaacgttacagaagatgaataaacgagttttttctcagcatagtcccgtttatggctttattgctacccattgattactccgctttgttacacagaaggaaaagatcataaaatccggcgacatccgggttcttgttatagccagctttccccccccccaacccacccaaaaatggtggggggggggggatatgagctttctctgctccccgcacactccccaccacccttctttgtcaactcaaggcattttcagcctatatcacgatatcaaattaagtttggactaatcaggagaaaacccccatctgcacactttccgctgtttcagttcgcctactgcggctccctcacaagcctcggattcagctgccttttcgtaaccgtctcttccctttttttagccccaagatgggggaataaaatgggcgttgaggttgctgagaggcccatccccaccacgggtgactggcacttgggtgagagctccttagaacccctttctgaagtctccaagcctcatagctcaggtccaggggcgcctccactggcggtgccctgagtctggagggggcaggggggcttctgaccaaggcaggggcttgagcctgcaggaagctaactgtccatcagagccccaccagccttctctttctggctggatcctatgtgaattaccccacaggccctcactggctccaaataataaattctcaccaacataaacaggagttgatgtctctagaaagattctcagagttttcgttcttcctctctctctctttctctctgtctttccccctccggtgccacctccctacattttacttctttttctcctttttctattgcattttttatacattttcccttttaggcaaaaatgctggaagagttttcccaacagaggggtcctgagaaggaggcagaagggagccaggaggcaaaggagagcagatgcgtggcccatttgcccactccagctctgccactgtaccctgaagtcttgcccctttagacctagttgttccccacatccctactacattcaagactctcagccacactctacttactcaggggaacaggttttatgaaatttctttctacttttgatttttttttaattattggtgaaaaaaatactagtttagtgatgggactcactccatggagtgtcaaaacaggatttcctgcaggatttctagggacccccctcctgtgctgggagggagttcttcccttggagaaatcaggatgtaattttagaagggggcagatataaaacatgaaaccagattgaaaatacaggggtttctctagccctggctctggccacagcacagcaaagttagctggggctgagagatttcctggtagtacagctctccttccctgagtcccaaggccctgctcagggacatgcacccctccttcaccaccaaaccagttcccttacatatatatatatatatatatattttttaaaagaaatccaagtcttactttcaaagcacacacttagtctcaactagggaatcaacagaagcagaagcgatttttttcccccttcctgacatctggcttgcgattggctgggagggggtcagctgactttgtcattttgtctgtcctggattggagccgtccctataaccatctagttccgagtacaaactggagacagaaataaatattaaagaaatcatagaccgaccaggtaaaggcaaagggatgaattcctacttcactaacccttccttatcctgccacctcgccgggggccaggacgtcctccccaacgtcgccctcaattccaccg

SEQ ID NO: 9683 - DNA, 2300 bp, Homo sapien
agcccaggcgcccggccccggccttctgttcgttctcgcgatcgcactgaggggctgggaggcctctctgggctccctgcgcggagcaacacacacaccctgcgggaaaaagccgcgtaggattttgttgcggggggagctgggatcagtcggtttgggcaccaaccccacgcaggcctttcttcctgcctgtggcagccggtgtcctcggcgtccgaaccctgaggcgccccgaaagaccagtaaagaagcactatccaggcaccagggtctcctccacccactcccgggagttggaggcggggggcgccgtgagagcaagccccaggcccgcgccaagctggctgttgcgaaacgtagcggaggcggagagcggagggaaagagaagaccgcgggactggagccctgtcggcagggattgagcgattcaaggacatctcgagagagaaagcctggaaactgagctctcgcctgctctggtactcctgacgtggccgggacaaaattccttcttcattacagctccagccgggctggttccttacttttctctcctcaaacgggtgaagaggcgggtgaggagcgcagccggaccctaaccatttatcaaccctggccttctctctccaagcctggccagagaaacctgagtgggcctacagggagaggtgttgaggagggtctccggagggaaaaaatccgccagagttttccgggcccttcagattccctccagcgcccccaccctcgcctccagtgcctccaccagtgaggagggggccttctcctggcggggcggagatttcctgggaagaagcaggcagggaagtatgagacttggggctacgggggaagaggatggggccgaatggctgcagataccctgcgaaggctacccaggcgcctgccctgcccaccccccaggtccgccccattcctcttggtagctcagaaattgctctcttgtgaaccttatggattcaggtccctggaaagcctagcccagagaccttttccccaaagggcacataacgggccttttcctctgccatgctcacgtaatatttgtggaggcttcaatcttgcttctccatgtcctcaattaacatctattttctgtctaaaacctctggcataggtaccacataaggatcgcacacagggaaacagagcagtcctctagaccattgtctggctctgtccgtgtccacacacacacttgaaaattgccttgttgccactctggggaccctagcatggtgaggtctagccaactccacctggctcctcacctccagatccatcccaaacagcctgcaacaccctcagcttcatgacccccctatcttgttctgaccactcaggatccctcctcctgggcgtcctgtctacctcttcagaagctaattctactttctcttgctgataggcacctcttcagcagtagtggagccttagggcctgagaggcaagggacttctacctttggtttagggaacctaagttaaaccccattggttctccagcctgggcataggccaccttacctaacttaatcccctttcctcagccatttttgaagattggaagaccctggaggttgggagaacgggactttcattacaaaaagcactctgtgcgttataagtggggcctcgtcttttcccaattttaaatagaatttaaaaggctagctcaggggttgccccaacaaccagcttctccttcacagtgtaggaaatccagccaccggaaagcaagctggcgctccaggatgcaattcccccacataggcaccaggtgtcgctgtgggcttgttgtcccggctacccccaattccaagaacctttttttttttttccctcccccttccctctttctctctctcactccctctcccccttggttgggctttgccaacatatcgagatgcttttcgccggcttccatcactaacctcccggaggtcatcaagccaaatttatgagtggccgctcgagtcacgtgactctatttaaggctcccttatttgggaagagcgcataggataaagaaagagatatctccacctataaattgtccactttggagaacaaaaaacccctcaacttcaaagagtcacaaatcacccttaatcaaaaagggtgcagaaatttttttgggccctccccgccatgagctcctacgtagccaattcattctataagcagagccccaatatccctgcctataacatgcaaacttgtgggaactatggatcggcctcagaggtgcaggcatccaggtactgctacggcgg

SEQ ID NO: 9684 - DNA, 2300 bp, Homo sapien
gggaaggcaacgagggcccaggcgggaatccgcaccctttgggcacggctgtgggtccagcttccctctcattccagccctttggggaagccctaatttggaagtggggaccctctccaacatcccaaaggtgatgagaaaaggattggaatctcttgccttcagtctccctctcacaagggctttattttttttttccctttcccctcctcattcccttaattgcagatgttctaattaaaccctcaaatagttgttatgccgttttaaaaggtacttattcaagtgtcaaccaggctgggctgggaggaggtagcgtagggcggcgaattaaaggtagattgactaatcacggcggcgatcataataataaaatcagagggaaaaaaaatcacattacgacttttcgtggaaaggagggagcaggcagccagcggccgccagccctgcgccgccgccgacacaaagagtgcgggcgattccgcgagactgatttatgacgttttacagccctataaaagctgtagcgacgaggcaagcgctcctaccaccgctggcagatttagtctaataaataaaacataaacagttaactttatgtgtcacttttattgttatcaagtaaaatatagctgagccctggcaagctatgattttaaactataattgttatcaagtacaacaaggggacccggctccctccctgggctctcccctccgctaccccccgcaactctgagttatgggcgatcagttaattggaatcggtggcatgacaggaccacccctagctggggggggggggtggtggttaggaaagcagcttttcctggccccctccctcctctacggccctgtcacccccctccatcagagtattactgtgagtgggtggcagagagagagcagggggtgtgaatgggctggagaccccaaaggctggccgtgcctccccaacttggtgagcttagccttccgtttttggaaagcagcctggagctggcctttaggaattcgtgtttacatgtaaacacacgtgttacatggatacagctcctagccagaagcaagcaggctctacccacacaggcctccctcttagctaggtctgccctctgtggggacagagaaagaactctcaggatcttggctgggcaccatcacagggcactgactcctggcagaaagctctcctccttgccccagctccttggagataattgtcagaaaatagcaggccgggctgaatggggagtggaaacagaagccagcagtagaagagatcctctgctctggggctggggcagggagggtcagtgggtagcaggggaaggcgagacttctgaactctgcttttgccaaccacttcctgtctctcttcagcgggggctcaacccccagacctccagaaatgacgtcagaatcatttgcatcccgctgcctctacctgcctggtccagctgggaccctgcctcgccggccgcatggccagagggttgggtgagtgtgtatggggaagaggggctggactctggtatccttggatggggggcactccaggctctccagcctcctcggctcagcctgggcccctccccatccaacatccactccagtcctcattcaacttcctcttcctgcgaaagaggggcgctgccccgtgacctacacagactgagacacgatcgccatgaatggagacctctggaaaagctcaggagccgaggcccacggggcccagcagaggcctgaggggagaccctgggcgggggctgaatcactgcctcccgacagtcccccaatgcccgggctttggaggggagccgggagcttcccatctccttttgcaggggagggttgtcagtctggcgggatgtgcactgggggcactccaacctctgctagctaaccccacatcaccacccacccccgcctcccagcaccaccaccaccacacacacaaaaaaattggatacattttgaataaagcgattcggttccttatccggggactgggttgctccgtgtgattggccggaggagtcacatggtgaaagtaactttacagggtcgctagctagtaggagggctttatggagcagaaaaacgacaaagcgagaaaaattattttccactccagaaattaatgatcatgagctcgtatttgatggactctaactacatcgatccgaaatttcctccatgcgaagaatattcgcaaaatagctacatccctgaacacagtccggaatattacggccggaccagggaatcgggattccagcatcaccaccaggagc

SEQ ID NO: 9685 - DNA, 2300 bp, Homo sapien
gattaaggctgatttctccagtccccttccttccccctgagtctgcagagagaccagactcctctgggggcacttcagtggagctgagggtggggagtgtctcacttttctatagttaggtacagtttcttctttttgtcttttctctctcttcccttctccctcctctgtgctgagtaggcctgcctactttgtagacaagggggcaagtttagggagtgggaaggagaatagttttctttcatcttttagggctcttttgggatgagggattaaggaagacatcccctcaacatttgagttcttaaaagaaggaaggttttgagctggtgactctgaagcagcaaagtcacctgtcaggatgccttctctgtttgtttaggcttggaaaaaagactggccagaggcctgggaggtacccttgttatggataggcctcaaaggctgatgcctggagataataaaagacttttacctttttattctctaacttttattatggacctgccaggtgttgcgaagagacttagggagagtcaaggaccaccctctcttcctataacctcccaggtcctggcagcgtatggggatagcctgaacaagtttctctggctgtaaagaaataaattaattaaataaatttgtttccttggggctaaaaaagaaacaaaaaatcttgcctggattacctgaatacattcaagccaaaggctcccaaataattctggtcctgagatccaggccctagcaaggcctgcttaattttttgcttgtttgttaggagaaggtgggaggagggctgttggtgaccttcttctcggacgatttatccatatttcaggaagaaaggcaattagaagtagaagacagagggagaagagatctagggtatgcagggaagccagggataccccttccccctatccccaaattctggagtgaaaggcaacagcaggactaagttgtacaaatcacattggtgtgctttgaatttatttccttttgaaccacttgctggttgttacttggtgtgtgtgtgtgtgtgtgtgtgtatgcatgccctcacacgtgtgtgtgttggggggagtctcttagtcctttaggtctacttttcctccctcagtggtaccctggagacaacaaaacatgctgcctacagtatgaggaggcaggccaacaattatctggagttttttatgtaatcaagtgaattaggggccaaatctgactgtagcccctatcgtcttgaggcgattgcccttggaacagaaaaagggggttctagctgtgcttaggaaaagggaaggaaggtctaagggcaccagggtgtcttttcaagcctgtaaaggagctaagatggaaagcagggaaggggtaaattgagatccatggttctttcctaagtttgctcgcgtggctttcagggagtttatccctctcctcctgaaagtggaagagatgagagtgaggagggggaaaattactacattttatttcctaagtttctccctgaaattgcagaagggacactctagttcaggaaaagcagcataaaagggtcagaacacttattttatttccccttctttatgtcttctgtttcttctccttcctcttccctcacatacatggtcattctgcatgtgtctccttctgttctttctggtctgaaaaggggaaacatcagaaatccataattcttgacaaatgaacccaaactaaaatcccttacatttgagtttgaagattttggcctctggccttccctccagtgggctccattttctcccctttccccaaagctctcctttgccttggacttggcaacccagaatggcatggcagggttgggatgtggggggccagtctgggccgagggccccaagctccagcagtcttggtccctgctgctctgcctgatgctgctacagcctcgctgggaagctgagggctgggcttttatttaagttgggttgagcagtggggaaaggctggggggaggacacagcccaggttcacggggaggacacagcattttctctcccattgcctttatattcggcagcgcctctgacctctcccccacccccatctctgaccctcccaagccagcccttgctcagccctggtctccagataggatgccactgcttttgtaggactggggatttcttgcccagagtaatgggagaggcaaggcgcatgaatgcctgtaagtgcattgtatccctctctcttcaatggctaagtaaaaagaagacgggtgaaatgtcgacaccaatcttccagggttccttctc

SEQ ID NO: 9686 - DNA, 2300 bp, Homo sapien
attcatttaatattaacaaatcgaaatgaattcttttaatgccaattaacttcgagcggccccttattaatagtaatttagattcatacttgggagaaacagggacgggggctgggccaaatgtgcccagaatgtcaatgtgactggggaactgaaaggggaggggggcagttttacttctgcccagttgggttccgtttccctgagagaaatggatagtcactggaggcggacctttgggaaacacgaattactcttgtaattttatttttgttacttcaaggaatctgaatagtttgaagccatgtcacaccattttaatagtttattttcacagtaatgctaaaaagaagaatttcctcagagctgggatttacttcaaactctctcctaagccaaaccttactgacaaaagggacaagtccccaggccagctctctacccttctttgttcagagctagagccagagatcaatatgggcttccccaatccctgccccttctaccttaaccaaaactaaaaggaagaatcaacactgtgtgtctctctgagaagtctcccccaggaggtaaaagacccaaggggctgacccctaagctgttcagcttacatttaaggaagaaaaacaatctgcctgcacttttcttagaatttagggaaaaaatgagaatttaaaattcaatttcatgtatcagagttctccagaatacagccaagtgtaaagaacttagtcccaaatgaaaaagttgaacagaaattctgctctcactcgttttgccggcttggaggtcagactggaggtgtcctgaactagaaccagagcataggttctgacccaagaaggacactgtctacttcccaggcatccctccttggctgggaggagaggggaggatgagtccgttggaagctgagaattgtggaagctggagatgggagttctgagatggaggaggcaggcgcgtgaaggaggtcagggaaaggcaagtaaatctactaaccattgaagtttataaaataaaaaccttaaaaatggtttaacatgcaaaaggttaaattttaaaaagaggccaggttttaaagaaggtaaaatacctcaaatttaaacaaataaaaacgaggaaaatacacaaaacatttcaagcaaattgttcttcagaagaggagaggttggaattaatcaaaagaccttttttacacacacacaccccccaagagtttcccaaacaataaattcatttacaaaacaaaaagaggaatcaacgcaaaacctcatccacacacagaggaaaataaattgtggtgattctgtaacagctgaaaaactagtgagggaggagaaaaatgaataaactctaaatctattaggtgatatttataaatagcaaaattggaggatggaatggagaaaggagttgaacttatcattaaagaagtaacacatgtgaaaacataaggtgtaactcatccccaaagaaaagtaaactctccataaagtagcaagtatacaaatttattgaaaaggaagaaagtaccactcaccccccccaatataagtgtattaatttgaattaaaattttctccaaatccaagataggttacacaaaagaatacaaacatattttttttctttcaactaagaggaaaaacaaaatccgatttaaattcacgaatgggacaggaagggaggctgtggtttgcaggtgctagtaaacggggtgagggttgtgaagagtttgaggggtagaggaccagcttacctcgctttggagccgcggcggccaacaggagtgggccaaggaccctgccagtgcctgagtgataggggaaataaggaataggggattcgggtgcccctagacgaatgaggaggatggaaagactgggggtgcccatctcccctcctctgcccgcctccctccctccggtacccaggcctagagagctactgaaagttacaaattgcttccattattagctcatcccgggcggcctggtcattggccagcccctggccacgtggtccctcgtaccaatcgatcgaattctagtcgcaattctctgtctgtccctcggctctggggagaaagggggggctgtggcgtgggggctgaggaggggctaaggcgggaggggcgcctcatcccttcaccctcccttttcgccatgtgggggccctgagcgccgccccagaagaggtcgagggaatgttgtgggctggggcacaccagcacggcagaaactggagaaagcgagagacgtcgccagggacccagggacctctccctccagttcccc

SEQ ID NO: 9687 - DNA, 2300 bp, Homo sapien
ctcatttcactcattattgttctgccagaagcagactttgaatgtggaggggctgccaagatgacaaactagaacagaagtgctgggcaagcaagtgacagaggggtcggggtggacaggagggttgtccaagggatggtggaaatcctggaatttttaagcaatgagatgacaccacaatgaggtcccttcaccttatttttggtcagaaacacagaaatacatagacacacagagatgggggaacttgttctagaagctcagattctcttattccagtcattctagggtaagaagcagaaacagggagatgttcacagagggagacagagacctgcagatacagagagaaagctacacaagagactagaaatagagataaatttacataagtagagaggggcaaataacataggcagagagagacacagagagggagaggatctggtaaaaattaaagctcaggaaattatgggcttcatgaggtggatgattaattccatttccaaagtcttgcaagggtcagggtagtttctcacccttgatgtcagcaggtcactgctcacagctccctgaagctcctactgcacccattaagtttttgttgataggagatcagacaagtcctgggaagggaatagcatcctttttctctcacttcttcctgttctggggtttataggtctccttttctaccactcacagggagaccttgcttctgtgattagagccttggctgtgctaaggtgtgtggagattgtggggtgggaggaatatagaagataactaaccttagggggttcccagtctaatgaaagttttagagtcacgacacagaaccagacccagatagagcacaagaacaaaactaggaataggacagatttggacatagatattgggatgggggaatggtgggggaatggactgttaggtgcagccatgggatgaggattgatcagggaagccttcctggacaaagtatttgagggagaagatttggatggaagagtgatagctaactttatgtgtctacttgagtggtctaagggacacccagatagctggtaaaacattatttctggatatgtctgtggagtgtttctggaagagatttgcatttgaattggtagactaagaagatcaccctcattaatatgggtgggaaccatccaatcccttgggggccagtagaacaaaagagtggaggaaggcaaattctctttcttcatgagctgggacatctattttacctgcctttggacatcattggagttcctggttcttcgtccttcaggctctgggacttagcagtgagcctcctcccctgctttggactttcctgaattataccacctgttttcctggttctccagtgtatagacagcagagcgggagactgtgggacttcttggcctccacaatcctgtgagccaattcttggaataaatctcgtcatatagatagatatcctgttagttctgttctctggaaaactcttgactaatactgaggttatagggttgggcagatagcaaggcagagaaagaagtcaaaatggtgacactctggagatgggcttggacagtaatgggggatgccccttgctaaaaagttgttaggagctaccagaaatgtcttcgtggatgttctgtataagtaatggcaggctgcaaaggagaagtctcttatacccacggtggcagggggcctagcaatggtctttagctattgttaataccttcaggtgggtgagggattggggatggttgaagcttcctgatttgcaatccctttgggaaaatagtgaatgaacttttggaagggcgatgccctttagggatagaacccaggatttcctaggtacttacaggctgtggcttttcacttctcaagacttcctgatttaacgctgatggaaagattaaactacaattcccagcgatctttagggctaatttagtgcgccttccgggattggagcatttccggcggaagtggctgcgggtacgccaatctccttccctaaacaatgtagactacgactcccactgtccttagcgccgggggttgggtttggggtgggggaaaggaaccggaaacgggatggggagctggaccaggtgaggaagtagggggctgggaatccgggactgtgggggcaagttgacggctcccagggtcgtcggggctgagccgagagggtggttagaatttctatattttggggtccctccctccgtatggggtaagactcagtgcagggagagcccagcctatgaaaccgcctgggaggtctg

SEQ ID NO: 9688 - DNA, 2300 bp, Homo sapien
tcatcgaagcgtagctgggttaagaaacagtctgatcgtaaggatgttgtcgattctgacccatggatgaccacaagaaaaagatatttatttctgcctggataattgagagttgactaactttggaagtcagaattcccaggaattagagtaactgctctggaaagttaaagtgtgaagttttttagatagtttcataaaaacaattctggtttctttttgcttgtgctgactttcttggattttaatctacctcatcttgtctttttagagttacttcaacttgtcactttaacattgtgcttgactttggttgttttctaagatggaatttttcctgttcattgacagcttgttctcttgccttttcattctgatcctcatttcatctaacatcatctcatattgctcctctgtcaagagaaatgttttaaaatagtttaaagtcttgttttatgggaagaaagtgatcctccaatgctatttgtttctgaggtcagtaagagaaggagttaaaacaaggcagtggggaagggaatgaatcctgcactggaggcaaaagctgacaaggaaagagccattaattaagacaatttcaaagtcaactgattgtgatcattaatgtcacaatagatcaaaacctaattatcacagcctaggtaagagccatcagtattaatcggaaaatctaataggaaactattatcaagaaattaggccaaattgaatgcagtgaactttttatcttggcattctctatttttttgtgatgtcccctggcattggcaggtgtgaccctaacagtcgattcaaggccaagtggtcagtttgtcagccttttttaagggatttctttttatttttaggaattccaaacagagttaacctaaactgtcattgccaaaagatcagtcttaaactttcttagcacctgtacctgtttaatgtgatcagctatcagtgaggaaaaaaaaaaaaatctatttaggtcttggaatggttcctgtacctagagtatccatattgaaccttttttttttttttttttttttttttttgagatggaaacttgctcttttgcccaggctggagtgcagtggcgtgatcttggctcactgcaacctccgcctcccgggttcaagcagttctctgcctcagcctcctgagcagctgggattataggcgcctgccaccatgcccggctaatttttgtatttttagtagagacagggttcaccatcttggccgtgctggtcttgaactcctgaccttgtgatccgcctgcctcggccactcaaagtgctgggattgcaggcgtgagccagcacccggccacagtatctttattacagctcactgcagcctcaatctcctgggctcaaatgatcctcctgcctcagcctcccaagcagctgggactacaggcgcacaccacggtgtctggctaattttattatttaaaaaatgttttgtagagacagtctccctgtgttgcccaggctggtctccaactcgtgagctcaagtgatccacgtgcctcagcctcccaaagtgctgggattacaagcataagccaccgcacccggcccctagtgaacattttactgtatgtgttgataaatcatcttttgagtttctgttgtatgtggggacttcctacactggctgctgtgaagaggtatggaagaaaggagaggctttctgcctagaaattctttgagaacacctgaaaagacagtttaatcatgtcacaacactcttaaggctcaagtcagtgttctggtttccggtagctttaggattggattctaaacgagggctggtggtgagtttggtgtttgtctcgtgtcaccctcacccctcacctcctcagtttaggataagagacataatgatttctaccagaatccaaagtaaatccaaagggggagaaaagacataactgttttttcttctaccttttttttgttaaagagttacatctctcacaggaggaaagaattcaagagtctatatgattagttacagagaatattttcatcccctctccctgaatagaaaagcaggggtcaccatttgtatccttacccttgaggtgtttttgaagatgctgtaactcttgaagttgagctgaggcagaaaggttggaaaaatgcagccctctgggtattgtggggagggatgtgatgtagtaagagggtgttttgtggtgctaggattcccacgccaccaacttgcagctttataagagcgctaccaagaaccaccactggggaaaaggttcttattcattgtttctg

SEQ ID NO: 9689 - DNA, 2300 bp, Homo sapien
tgctgggctgggcagatggccttcaagttaagatcaaatgccgggaaaatcagcctacatgggagcacccattttaaacctggagagaaccatgatgttttcttcttcaaataacaatctagttttttttcccccagtactaaaattgtattgtctttcagacaatataatttttatttaaaattggaacatactatcttcatgctttctaagctaaatcttcatttagatttcactcctcagtagatcccagagaagaagctatataggatccagattcaaatttaacagtgtcttctacttttttagttatgttttctatcaactcctgctgccttttcaaatacggatatttttcaggagactcttctacttgtccactgactgtattttttcctttttgatccgtagccctggttaaatggctgacatccttccgtggatgattcttggaggtagtctcagaattccaaagtgattgtctgtcttcttcttgtcttgatcctaatgcagacattcacctctattatttatttattttttttagacagagtctcgctctgtcaccaggctggagtgcagtggcacaatcttggcttactgtaccctccacctcctgggttcaagcgattctcctgcctcagcctctcgagtagctgggactacaggtgtgtgccaccatgcccagctaatttttgtatttttggtagagatggggttttaccatgtttgccaggatggtctcgatttcctgaccttgtgatctgcccaccttggcctcccaaagtgctggaattacaggcatgagccaccgtgcctggccacctctattaaatttttgtggacaaaaataaaattgtcattatttgtttgctctcatggagcactttcagtaatacaattttttttaaattccagttgccctctttgttgctctgtcctctgtaatacctgactttgctaaagacttgaggggtggtttcagaggagggtcaggtgatgggaaggcaggatgagaaaagccctggacttgcatgtttgagaaggcttccaaccacatcttcactcagactcttggaattcctgtccccaaaacaagcttctgttttttgctcacaatgctatatttctaaatttttcctgaattactgagaagcagtcattagctttgttaagtttggtttggggacattgttggtatcaaaaatcgaagtcttattcatttgatgtaggccatgaatcatcaataactggttgctggaaagcttgactaccatccactggggtgctattttgagaaggatttttgggtatctttatagtctgcaattagttgatgattgctttctagtttatcaactgcatttatatttgcttttctgttcatggaaaatcctttatttgctggggttttttgtttgtttgtttgtttttcccacttacagcaagtaaaagtggtctgaggttatccttgtttttcttcgcggtttgccatgtgtgaaagtagatttcctgctattgatatattctcattatagacagaatagtggagaacagtgttgccatggacaaaatccagttttggtccactctggggagcatttggacctgtggtgcttctaacaattaaaagtctagatggtccttgactgtcccccagccatactgcatactactttgtgcattctactttgtgtcattaatgaaagattggttctgtccctgtaacttaggcatttattattcttaactcttcattcctgttctgtagccacccagcagtccattttccctatgttcaggccaaaccacagggcattggggaaggtttttgggattttcttattgagattttgttgaatctgtagtttaccccagctttcctaaggtacagtgaggggttggagggatctgtgtttggcccggggagcaattgtctctaccttaaggttcagttttgagggcataaaatactactttgcaatgtcatgagaacaccgttagatctgaaatgtggaaatggtttctcacaatttaaaggaaaaacccactttgcacccatgatcccatcattttggttgagattttagaataaaaaatatagtgttgagatccgtacttttgtaatcagaccaccaagcatgcctgtggcaaggcagagaggaaaggtctggagccagtgtattgcagtttcatgctacctttacctgctaatcataaaaattatgttttcaaaagtagatgatactagccttacacccaaaaacatgttctgaattagatgccccctcacccaattt

SEQ ID NO: 9690 - DNA, 2300 bp, Homo sapien
gggaccacaagcatgcaccaccatgcctagctgatttttgtattttttgtagagatgggttttgccatgttgcccaggctggtctcaaactcctaggctcaagcgatccacctgcctcagcctcccaaagtgctgggattacaggcatgagctgctgcacctgagcttctcaggataattttaatttttttttaattgatttggaatcatgcttaaggaaccatgtagctagatttttttttgttatacttggtattagaggccctactgagataattgaaatttgtagctaaatttttatttgctcgttgttccaatccacagttctggccagaggggtaatgagtatttaaacggacacaaggtgaggagggttaagaccccttcacttagatgatctggaaactggattgaccaacctgtgtataattgacttgtgcataatcaatagagctgaatgtaggttttttttttttttttttttgagacggagtcttgcactgttgctcaggctagagtgcagtggcgcgatctcagctcactgcaagctccgcctcccgggttcacgccattctcctgcctcagcctcccgagtagctgggactacaggcgcccgccaccacgcccggctaattttttgtacttttagtagagtcggggtttcaccgtgtgagccaggatggtctcgatctcctgacctcgtgatccacccgcctcggcctcccaaagtgctgggattacaggtgtgagccaccgtgcccggcccctgaatgtaggtttgattgggttcactcacatgctcatattcacaaataaaaattttggaagcagattaatattatttattattcatctttttaacctaagcccaccatggtttacatctaaattctagctacagacatctgtttctgtataatatattagctattaatccatttacttacatttcttcttgaaaatattgaaagggtccttttcaccttgaaaccaaggtgaggaggaaatcaagtcaactaaatccatataatgacataaacgtatgtctggacagattctttcactcttcctctccttttaagtctcatattctttctctccaggaaagacacagatgaagctgacctggttcttgcaaaagaagctaatgtgaaatgtccacaaattgtgatagcattttatgaagagagactgacatggcatgcatatcctgaggatgcggaaaacaaagagaaagaaacagcaaagagctaaaggaggggatggtctctgtcatttctctttgtacataatacattcacctccctgcctcctctcctttctacccacccctttctatcctaaacacatccataaaaaatgtgcttatcactgtgctccacaggagaaatgttggtattggttctcttgtaacataactgatggtctgattaatgataagtgtctctctgtgaagaccaggcatttacatactgagtgtaatacccacaatttttttttcctttgccctgatctcttccttctgcttccctgtgacctcaagatgagtttcaactttttaatcaccttagagtcttgatcttttcagggttggtcgctttttaggttgggggattttgttacaatgatgttgaattttggtttcttgctttggttcttagaacatgttgctgactagctggcctttgttctgacatgttgagatggaaaggatgttgcccatctgttaaaaagccaatagcaactgcctacctgttggggctttcccaaccttgttcagctctacccaggagaatacagggtttctggtgtggtcttctgggccaccctctgttgttcatcctcactcatcctcccagaattactccatcctttggaagatttgaaattttacactgaaatctgtcaagacactctttttagccccaggactttcggtattgcttttagcactccccacttctgcttctgtaaagtgatatcaatttgtgataaaatgacaagattattaactgtgcagatttgtagctatagtacatgaggatgatggggtagggtacaattgtctttattatcatatatggtatgtatgtatgatttctttccattcctcatatttagactgtatatttatgtaggtgtgagtgattgcctggtgcttgcttgtgccaaggtgctaggcaccctccaaccctgccaacttttgtggcctcccaaagcattcctgttaccaaagaggcttcaaacctgaccctcacttctcagtggacccgagtttcccttccatgccattattttca

SEQ ID NO: 9691 - DNA, 2300 bp, Homo sapien
attcaaatctgaggaaatcttttgtaattaaaaaatttctggccgggtgcagtgtctcatgcctgtaatcccagcactttgggaggcccaggtgggcggatcacaagatgaggaaatcgagaccatcctggccaacatgatgaaaccccatctctgctaaaaatacaaaaattagctgggcgtggtggcacatgcctgtaatcccagctacttgggaggctgaggcaggagaatcccttgaaccagggagttggaggttgcagtaagccgagatggcgccacagcactctagcctggtgacagagcgagactccgtctcaaaaaaaaaaaagaaaaaagaaaaaaatttctactttggtcttacaccctatggtttcttctgtttgacagtcgtaatagtcaccattgtgcttcttctcaactgagttcttttttttttttttttgagacggtttcgctcttgttgctcaggctggagtgcagtggcgcagtctcggctcactgcaacctctgcctcccaggttcaagcgattctcctgccttagcctcccaagtagctgggattacaggcaagtgctactatgtctggctaatttttgcatttttagtagagatggggcgtcaccatgttggtcaggctggtctcgaactcctgacctcaggtaatccacctgcctcggcttcccaaagtgctgggattacaggtgtgagccactgttcctggctcaactgagttctttgcttttgattgtccctttttcttactctcctatggcagccacttctggctttaaagttcccacatctataaagcagagtagagttttggagctctctaaaatgttctttagagccagaagaatggaaaacttacagtatttcaagtctctatatatcttttttatttatcctagtactccttttctcaagtattgagacatactgatacagagagttgtatattaataatgtatcaggtgatgaataattatttaaaaatctgttttataacattatagagcaacctataagtggtttaaatttatcaaccattaggttgtggcagaactgctctcctcttttttttttttaagcttcttaggaatttttttccacctaaattcattttgttttattttttcgagacagtctcactcttgtcgcccaggctggagtgcagtggtgcgatctaggctcactgcaacctctgcctcctgggttcaagcgatttctcctccctcagccccctgaggagctgggactatatgcgcctgccaccacacctggctaatttttttgtatttttagtagagacggggtttcaccacgttggtcaggctagtcttgagcacgtgacctcaaatgattgccccgtcccggcctcccaaagttctgggattacaggcatgagccactgcacctggccctccacctctaattttagttaaaaggggttttttttttttttttttttggttgttgttttggtagtgcttcatgtctttggattttgtctctagtaatccccccaaagaaggaaagttatatagtgtctttaaaatacttcccctcccctgtttcctgttatttttcccctcaagcaattttaattaactgttctgtgacagacggtaaaatgggattgcccaaagtgctctggtgggctggattaagtgatgggtggtttgtactgatcgtgttgtagaaggatcgagcctttcccctcccccttcagttgagctgtaatcttgttagatgatcttaaaatgttattgattaattcacagtgctgttagaggaataagcataaatactggatttaaaacctaagaagtaattcccttaagctctgaatgccttagccttgaggccaagagaggtaccttccaatttctccacccagtcttcactgaaaaggaaagttaagccttttaacttttccatttgcttctcccccttagtgtagtactgctgccagttgctatggcaacggactgggacagctgcgcagtggcgcccaggcagctgggtgggggcaggggagctgccagcccgccaagacccagacctgggaggggaggcccctcctgttagcccagagggaaagaaagaactggggcgatccggtaggtaaaggagggaacccccattcattttctacctttggggctcctcttctgcatgaaggtataaagggagattttccttgtctctccctcaaaatgaagaacacatgtaaatccttgtttttcctggtgaggcaggggaggccatagccacaatgcttaactgcatgcatc

SEQ ID NO: 9692 - DNA, 2300 bp, Homo sapien
gactctgatacagccaatgttatcaaaatttatttatttctccaaaagatcctggaataagcagagtgggcattaccaaaaggagatagactgcatgtaaaacacacttcgaaggaaatctaattaaaaggcaaggaataatccaggtgatggatgaatcttctgtccccagaaccctaaatattaccctctttgtttcttttttattccaaagtcagatatcctcaaaggaacagcaaaaagagggactttaggatatcttcaatggtgtaaagaaaagaaatatatgaaagttcccgggagaaagagactaaaataaaagcactgggcacatggattacataaaacagaaaaggggttgtaagtatgtgattatgactagaaacacaaaacaatcgacttcattttttatttaattttaatcacaaattattaaccttgcaaagttttaaacattaaagatctaatctgcctcgatcctactgtgtccctaggattgacactttggtgtgtagctttccaaaacttttctgtggacctacaaacatatttgtcagtagaaatatgcactatcaggaaggagatatttcttgaacgcctttccatgacagtacatagagatttctcccattcgttctaacattttaacagtcttcctaaagaagcgacttctgaaagtattatttaaaaacaaacaaacaaaaaaaaacaactcctgttccccaaacctcaagtggtgagggggcgggggaaaaatgctcaagtcgaggaatacaggagcaaacttacgctttcaaggaggtgtatgggactgaggcctaaaggcttcgttagagaagtcatcgtggataaaacatccaccctcacacgccattacaggcaccgactccccttcctcacaaccccaaatcgaagacctccctcttttggagagccgattggacgactggtcccagcgctttccttaggctgtccgtctactggttccagattcgttccatccgtttaaccgcccgatcccgcattccccattggagtcaaaccgctgcctcctggagaagcccaacctaccgcgcgcttcctgctcactggctcagtgagacgctgctcagaaggggaaaacccgtctcccacattccgatggcccaagggccgatcagtcggcagctcaaggcagacccaattggcctatacacaagccagtcaaagtcttcggctgcacagctccaaagaacctacggggattaaaacatcccgccccctgttcttctattggttggcccgacccaccgctgccccttcactatccccccaccccgccgtccattcatttcacacaataacgggcccaaatggagtcagttcaagacctactatgggtagataagactgtctgccacttacccgggattgagagtgatcactcacgctaacgtctgccctgttcctgtatggtgaggccgcaccacaagccaccaccgccgccgccttctgcgcaacgccaaccgcccgccaaaacggatccttccctgcgcctgcgcaaccaatcctgggaccggaccttttttctccgcccactacgcatgcgcaaagctaggacaaactcccgccaacacgcaggcgccgtaggttcactgcctactcctgcccgccatttcacgtgttctcagaggcaggtggaacttcttaatgcgcctgcgcaaaactcgccattttactacacgtgcggtcaacaagagttcattgcaaaaaaattgttacctcctggctgcttgtctaatacatagtgttaatcatgctttgccaagcgacttgactgtaatatttgcgcgtggaagattaaaaagatgttaaacacccaaggtagattcaaatgtgaatgattggtcggttggccaatcagactggttaacaataacattactcgggaaccaatggactccaaggggtggagacggcgtagaacgaccgaaggaatgacgttacacagcaatgtggcaccacaggccaatagcagggggaagcgatttcaagtatccaatcagagctgttccagggcggagtctaccaatgccgaaagcgaggaggcggggtaaaaaagagagggcgaaggtaggctggcagatacgttcgtcagcttgctcctttctgcccgtggacgccgccgaagaagcatcgttaaagtctctcttcaccctgccgtcatgtctaagtcagaggtgagttaggcgcgctttcccacttgaattttttcctctccctttcctgaatcggtaagatgctgctgggtttcgttcctt

SEQ ID NO: 9693 - DNA, 2300 bp, Homo sapien
agtggtgagggggcgggggaaaaatgctcaagtcgaggaatacaggagcaaacttacgctttcaaggaggtgtatgggactgaggcctaaaggcttcgttagagaagtcatcgtggataaaacatccaccctcacacgccattacaggcaccgactccccttcctcacaaccccaaatcgaagacctccctcttttggagagccgattggacgactggtcccagcgctttccttaggctgtccgtctactggttccagattcgttccatccgtttaaccgcccgatcccgcattccccattggagtcaaaccgctgcctcctggagaagcccaacctaccgcgcgcttcctgctcactggctcagtgagacgctgctcagaaggggaaaacccgtctcccacattccgatggcccaagggccgatcagtcggcagctcaaggcagacccaattggcctatacacaagccagtcaaagtcttcggctgcacagctccaaagaacctacggggattaaaacatcccgccccctgttcttctattggttggcccgacccaccgctgccccttcactatccccccaccccgccgtccattcatttcacacaataacgggcccaaatggagtcagttcaagacctactatgggtagataagactgtctgccacttacccgggattgagagtgatcactcacgctaacgtctgccctgttcctgtatggtgaggccgcaccacaagccaccaccgccgccgccttctgcgcaacgccaaccgcccgccaaaacggatccttccctgcgcctgcgcaaccaatcctgggaccggaccttttttctccgcccactacgcatgcgcaaagctaggacaaactcccgccaacacgcaggcgccgtaggttcactgcctactcctgcccgccatttcacgtgttctcagaggcaggtggaacttcttaatgcgcctgcgcaaaactcgccattttactacacgtgcggtcaacaagagttcattgcaaaaaaattgttacctcctggctgcttgtctaatacatagtgttaatcatgctttgccaagcgacttgactgtaatatttgcgcgtggaagattaaaaagatgttaaacacccaaggtagattcaaatgtgaatgattggtcggttggccaatcagactggttaacaataacattactcgggaaccaatggactccaaggggtggagacggcgtagaacgaccgaaggaatgacgttacacagcaatgtggcaccacaggccaatagcagggggaagcgatttcaagtatccaatcagagctgttccagggcggagtctaccaatgccgaaagcgaggaggcggggtaaaaaagagagggcgaaggtaggctggcagatacgttcgtcagcttgctcctttctgcccgtggacgccgccgaagaagcatcgttaaagtctctcttcaccctgccgtcatgtctaagtcagaggtgagttaggcgcgctttcccacttgaattttttcctctccctttcctgaatcggtaagatgctgctgggtttcgttccttgcaccagcccattctacagttccttcggtcgctgccacggcctacccctcccaaagttcaagtcgccattttgtcctcttgatcgccatgaggccgctctccgccaaccatgagttatcatgcgggactcgttactcgtagcaaaattcttaggcacacaggatctttgtctttttttaaaccttgccttggtgagcgagttttctaaagagcgattagtcccattgtggagatgcacccctaccgcccaagcctttgttgcgcgtgcgtcggaaggcgactagggacgcatgcgcttgcgatttcctagcactcccaactccagcatacggcctcccttgataggcagaagcacgtgtcttgttgcgacctgaacgaacaataagtgctaggtacacagttggtgtctagtttttcttttcctcgatggaaattgtttcgtgttgtagcccatttaacacttccccctccccccactctagtctcctaaagagcccgaacagctgaggaagctcttcattggagggttgagctttgaaacaactgatgagagcctgaggagccattttgagcaatggggaacgctcacggactgtgtggtaagatttggaagggacaaagcagtaaaacagccgatttccttggcttatcttggtgcagtcttctccgaatgcttatgaaagtagttaatagcattatagttagagctttgttggcaaaggaacgtcctgc

SEQ ID NO: 9694 - DNA, 2300 bp, Homo sapien
tcaaaggttacaaaggcaaagccccttttcttgccactgcctcggtcagtcatgatttcaatcacttcaatttttccatactgttcaaaataatctcttaggtgatgttcttcagtgtcttctttaatgccaccaacaaatatctttttcacagttaagtgggcacctggtctttgagaatcctaataggagaaaaaccataggtttagattagcaaagcctatactcgaataaaaaattttggtaagtttagaaaactcccgaatcttaagtccatagcagcacatatccaagtaagtttaagaagaagaagaaaaaaaacccactcacttctctggagacagctctctttggttccacaactcttccatccaccttgtgtggccttgcattcatagctgcatccacctcctccacagtggcatatgtgacaaacccaaagcccctggagcgcttggtgtttggatctctcattacctgagaacagtgttaatttatgtaacacaaagtctgaccgcaaaagcttttgtcattttaactttgaatagggcaataggaaactttacaccagccttttataaaaagtcgtccagtttcccactaccctagatttaagaggtagcttttaaaatcaaagcaggacgttcctttgccaacaaagctctaactataatgctattaactactttcataagcattcggagaagactgcaccaagataagccaaggaaatcggctgttttactgctttgtcccttccaaatcttaccacacagtccgtgagcgttccccattgctcaaaatggctcctcaggctctcatcagttgtttcaaagctcaaccctccaatgaagagcttcctcagctgttcgggctctttaggagactagagtggggggagggggaagtgttaaatgggctacaacacgaaacaatttccatcgaggaaaagaaaaactagacaccaactgtgtacctagcacttattgttcgttcaggtcgcaacaagacacgtgcttctgcctatcaagggaggccgtatgctggagttgggagtgctaggaaatcgcaagcgcatgcgtccctagtcgccttccgacgcacgcgcaacaaaggcttgggcggtaggggtgcatctccacaatgggactaatcgctctttagaaaactcgctcaccaaggcaaggtttaaaaaaagacaaagatcctgtgtgcctaagaattttgctacgagtaacgagtcccgcatgataactcatggttggcggagagcggcctcatggcgatcaagaggacaaaatggcgacttgaactttgggaggggtaggccgtggcagcgaccgaaggaactgtagaatgggctggtgcaaggaacgaaacccagcagcatcttaccgattcaggaaagggagaggaaaaaattcaagtgggaaagcgcgcctaactcacctctgacttagacatgacggcagggtgaagagagactttaacgatgcttcttcggcggcgtccacgggcagaaaggagcaagctgacgaacgtatctgccagcctaccttcgccctctcttttttaccccgcctcctcgctttcggcattggtagactccgccctggaacagctctgattggatacttgaaatcgcttccccctgctattggcctgtggtgccacattgctgtgtaacgtcattccttcggtcgttctacgccgtctccaccccttggagtccattggttcccgagtaatgttattgttaaccagtctgattggccaaccgaccaatcattcacatttgaatctaccttgggtgtttaacatctttttaatcttccacgcgcaaatattacagtcaagtcgcttggcaaagcatgattaacactatgtattagacaagcagccaggaggtaacaatttttttgcaatgaactcttgttgaccgcacgtgtagtaaaatggcgagttttgcgcaggcgcattaagaagttccacctgcctctgagaacacgtgaaatggcgggcaggagtaggcagtgaacctacggcgcctgcgtgttggcgggagtttgtcctagctttgcgcatgcgtagtgggcggagaaaaaaggtccggtcccaggattggttgcgcaggcgcagggaaggatccgttttggcgggcggttggcgttgcgcagaaggcggcggcggtggtggcttgtggtgcggcctcaccatacaggaacagggcagacgttagcgtgagtgatcactctcaatcccgggtaagtggcagacagtcttatctacccatagtaggt

SEQ ID NO: 9695 - DNA, 2300 bp, Homo sapien
tgcggtcaacaagagttcattgcaaaaaaattgttacctcctggctgcttgtctaatacatagtgttaatcatgctttgccaagcgacttgactgtaatatttgcgcgtggaagattaaaaagatgttaaacacccaaggtagattcaaatgtgaatgattggtcggttggccaatcagactggttaacaataacattactcgggaaccaatggactccaaggggtggagacggcgtagaacgaccgaaggaatgacgttacacagcaatgtggcaccacaggccaatagcagggggaagcgatttcaagtatccaatcagagctgttccagggcggagtctaccaatgccgaaagcgaggaggcggggtaaaaaagagagggcgaaggtaggctggcagatacgttcgtcagcttgctcctttctgcccgtggacgccgccgaagaagcatcgttaaagtctctcttcaccctgccgtcatgtctaagtcagaggtgagttaggcgcgctttcccacttgaattttttcctctccctttcctgaatcggtaagatgctgctgggtttcgttccttgcaccagcccattctacagttccttcggtcgctgccacggcctacccctcccaaagttcaagtcgccattttgtcctcttgatcgccatgaggccgctctccgccaaccatgagttatcatgcgggactcgttactcgtagcaaaattcttaggcacacaggatctttgtctttttttaaaccttgccttggtgagcgagttttctaaagagcgattagtcccattgtggagatgcacccctaccgcccaagcctttgttgcgcgtgcgtcggaaggcgactagggacgcatgcgcttgcgatttcctagcactcccaactccagcatacggcctcccttgataggcagaagcacgtgtcttgttgcgacctgaacgaacaataagtgctaggtacacagttggtgtctagtttttcttttcctcgatggaaattgtttcgtgttgtagcccatttaacacttccccctccccccactctagtctcctaaagagcccgaacagctgaggaagctcttcattggagggttgagctttgaaacaactgatgagagcctgaggagccattttgagcaatggggaacgctcacggactgtgtggtaagatttggaagggacaaagcagtaaaacagccgatttccttggcttatcttggtgcagtcttctccgaatgcttatgaaagtagttaatagcattatagttagagctttgttggcaaaggaacgtcctgctttgattttaaaagctacctcttaaatctagggtagtgggaaactggacgactttttataaaaggctggtgtaaagtttcctattgccctattcaaagttaaaatgacaaaagcttttgcggtcagactttgtgttacataaattaacactgttctcaggtaatgagagatccaaacaccaagcgctccaggggctttgggtttgtcacatatgccactgtggaggaggtggatgcagctatgaatgcaaggccacacaaggtggatggaagagttgtggaaccaaagagagctgtctccagagaagtgagtgggttttttttcttcttcttcttaaacttacttggatatgtgctgctatggacttaagattcgggagttttctaaacttaccaaaattttttattcgagtataggctttgctaatctaaacctatggtttttctcctattaggattctcaaagaccaggtgcccacttaactgtgaaaaagatatttgttggtggcattaaagaagacactgaagaacatcacctaagagattattttgaacagtatggaaaaattgaagtgattgaaatcatgactgaccgaggcagtggcaagaaaaggggctttgcctttgtaacctttgacgaccatgactccgtggataagattgtcagtaagtatcagatagtggcatttagtaagggttccacaatctgtatggcattctaaaccctgataccatgttgtatctatgttttttttttagttcagaaataccatactgtgaatggccacaactgtgaagttagaaaagccctgtcaaagcaagagatggctagtgcttcatccagccaaagaggtatgcttgttgcttaattaaaccttaaaggtaactttgagttactccagtatgaatgatttaatgcttaaacttcatgtcttaaggtcgaagtggttctggaaactttggtggtggtcgtggaggtggtttcggtgggaa

SEQ ID NO: 9696 - DNA, 2300 bp, Homo sapien
gaggcaagggctaggggagatactctttcaaaaggatcatttgtagttcctactaattttgtggtaagtcgaagagaagattccatattaaattgctgtgatgggccatccttgtggtgagtggtctaaggtcatgcaatttgaggtcatacaatcctatcctctgtccttctttttctttcttttctttttttttttttttttttttttttccgaaacagagtctcactctgtcgcccaggctggagtgcagtggtgcgatcttagctcactgcaacctccgcctcccgggttcaagcaattctccctgcctcagcctcctgagtagctgggattacaggcgcccaccaccaagcctggctattacttgtatttttagtagagatgggggtttcaccatgttggccaggctggtttcgaactcctgacctcaggtgatccacctgcctcagcctcccaaagtcctaggattacaggtgtgagccactgcacctggccgttttttttttttttttttttttttgagacagggtcttgctctgtcacccaggctctcgagtgcggtggcacaatcatggctcactgcagccgtgacctttcaggttcaagtgatcctcccacctcagcctcctgagtagctgggaccacagatgtgtgccattatgcctagctaatttctgcatttttagtggagatgggttttcaccgtgtttctcaggctgatctcaaactcctgggctcaagcaatccttccaccttggcctcccaaagtgcttcccctctcccatgtttccttcatcctagcctgcttccctatactgatatggcacggtatgtctgtgtgcgtgcacatagacacaatgtctgaccgtagagatcaggaagaccttgccaaatctacttggaatctcttgctgacggcagggaaaacagatgcaaggaaggtgggtgtcagggaatagggaggtagcatgaggagagggactgacagaagaagataaagacacgggtgagggtttgctgagaattctaagctatccaagcagaaagggacctccaaggtcaatttgtccaactccctggttttacaaatgaggaaacagaggcccagagaagtgagatggcttgcccaacatcacactgctgctttgtggcagagctgcaactagaacccaggtcaaaagaaaagggactggagggcagtgtatattcaaggctctaaagagacattgcccagaaggagaaagagagactgacactccacagaaagaactgatgaatgtagacttccagtagaggtttggagtatgaagatacaggggcaggaggggaaggtgcctagaagacattatagtcaggtagagtcaggttctggacctcatcctgctattatttatcagcttcagtctcagtttctgatgtacctttagaatctttgtgaaaaccagtcttttttttttttttttttttgagacatagtctaactctgtcagccaggctggagtgcagtggcgcgatctcggctctctgcagcctccacctcctgggttcaagtgattctcctgcctcagcttcccgagtagctgggactacagacatgtgccaccccaccacgcccagctaatttttgtatttttagtagagacggggtttccatgttggccaggctggtctcgaactcctgacctcaggtgatccacctgccttggcctcccaaagtgctgggattacaggcctgagccaccgcgcccgatgaaaaccaatcttataaactaagcttgcaataccagcacagttcttaacaagtgcttactaagtctttactaaggttatattacctcagaagaggaaagacttctgattgtatgggttaaggtatggcccaaatgaccctgtgaggacacaggacagaggtccagtgtctccagagcccattccttctgtgcctctgctgcctgcaactgataaacctcttatctggcccaggcaggggagcccagggccaggataggaggagagggcagagctgctatcaaccaccaggcctgggccatatcttggagaggaggaggggctgtctgcttgcctctttccacaacttgttcttggggatcctcaagcatatactgtcatcatcttggaaagaaaaggctgagaacgtaaaactgaggacagaggaggaaagcagggtgacccctgatgttgccctagaaaatggaaaacaaaacacagcaaaacagaaaaacagaagatctgactctgcctttagccaggaaaacagtttgggggagtaaaaagta

SEQ ID NO: 9697 - DNA, 2300 bp, Homo sapien
gttgggattacaggcatgagccaccgtgcctggcctattttattttattttattatatacaccttattaatgtaattccctgactagacttgactgaagatacagactgtcttgctcatctttgtgttcctgggatgtaaaacatagtagacactcaataaatatttgttgaatgaatgaatgatgagccttgtgttacccataattgtctatgcaacaccagtatcctgaactgataattcttattcaataaatgtttgttgactatctataacctgatatcattatatagtcagccacaagtgtgactgttaccattcttcatcccctctgagtggcccaaataaatatgcaaatgagagaattatatctgagagcctacatatgtgacccagattcatgcccaagtctgaagagattctgaacccacatgtaacatgtaatgaaggcattggattgcctcctgtcttaccttgatcatgcatgtgcagtcatgatctactggaaaagggatggaattcaaagcatttaaccataggtttggcatgggcattggccaattccagcagaagcaggcagcacaggaggctccttatggtaccagcattgcctctttacttccatggttgtgttgctgggttgttggggatcttagaggagaactaggctattggtggagtcgtgggggacacttagagggctcacagcagctgccttttatcaactaggactgaacattttcattattttaacagcaaatacaatcccatcagagcatgctggttgaatgccagtcctactccagagtggcacctatctgcttccccagtcttcagatgtttctaatttaacttgaacattgtaagaagaaaaaatgtaagctgcagatgtcaggattgaagctagacatatagagctgaaagccattacaaattaggaggaagaaaggctcttttctcacagtctgtggagaaagatgtttgacctggggctttggtggtgtagcttgcaggcaaaaagatgaataagtgggctgggtgaggtggctcatgcctgtaatcccagcactttgggaggccaagaggggaggattgcttgagcccaagaattcaataccagccaaggcaatatagtgagacaccacttctaccaaaaaaaaaaaaaaaaaaaaaaattagctgggcatggttgcactgacccatagaaccagctacttgggaggctgaggtgggaggattgcttaagcctgggagtttgagactgtagtgaaacatgttcacaccactgcactccagcctgggagacagagtgagcccctctctggaaaaaaaaaaaaaaaaagatgaataagggtacttactggcctaacagagttgggtgccatgtggctggggtgctttgcctgggagaaaggaggacaaaggacacctggggtcccctttacgggaggtgaataatctccctgctgggtggccccccacctaactcccttcacacactgacaaaaacctggccaagaaagaatcctttgtcctgggacttctgaggctgaggggggaggggagaaggctacaggtgaaaggacacatcaaagcagtcagttgcccctcctcctccaaatagttcccctgcccttgttcccagagcccaggttttctgtaaatgaaggctataccctaaacgtccaactgcctagacagctgggaagctagacacctggtccttaccttcagctgccttccaccttgatatgactcagtttccctgtccctaggagagccgtggggacacaaggcgacgacaacctgtataaagtttaaaggtcacattcgagtggaccatcaggttggaattcgtcaaatgcatgggagaaacgcagacctggctggactcctgggctgaaaaggagggctgggagaggcttggagccatgtgtgcccccgctggccaggagcaaggtgggggcggggtgtgggcagaaaccacatcgggctcaagtttcctctcttggccgaaaggggcaggaggagaggagagccacggggaaaggggagggttggaggaaggactgagaactcaggccgagggcttcagacgctggtgcgcctgcttggggctcctgtgctcagctcagcctgagcttccacactcagcgctcagcaatggcccgggggcggggcgcggtcctcgcagattctcaaaggtagccgggatcctcgtccagcagtgtcagctcaggctcagcctccccagagacaacaccgggagcctcatctctctcctcaccctgctgtgactcc

SEQ ID NO: 9698 - DNA, 2300 bp, Homo sapien
acagagagagactccgtcttaaaaaaaaaaaaaaaaaaaaaaaggccgggtgcagcagtggctcacgcctgtaatcccagcactctgggaggccgaggcgggcggatcacgaggtcaggagatggagaccatcctggctaacacggtgaaaccccgtctctactaaaaatacaaaaaatcagccaggcgtggtggtgggcgcctgtggtcccagctactctggaggctgaggcaggagaatggcgtgaacccgggaggcggagcttgcagtgagccgagattgagccactgcactccagcctgggggacagagcgagactccgtctcaaaaaagaaaaattcctgggtaagtttggaatctcttcttggagggctcctaaggatataattttcagagatgagggaaaaaatccctttaggataattaaggtaataggtgtccctgccctaagaggagtcagggatcaggaaaccaagggataggggaaagccaagcttcatcaaaatcattccctattgtgaaattcttgcattcagtaaacttctcttttctcattttgcaacgcctcatttctttcctctcctttctttccttctctttctttctttctttctttctttctttctttctttctttctttccttccttccttccttccttcctttctttctttcttttctttctttctccttttcttttctcttctcttctccttttcttttcttttcttttttttttgagatggaatttcgctcttgttgcccaggctggagtgcaatgacgagatctcgcctcacctcaacctccgcctcccaggttcaagtgagtctcctggttcagcctcccgagtagctgggattacaggcatgttccaccacgcccggctaattttgtatatatgtatattttttgagacggagtctcgctctgtcacccaggttggagtgcagtggcgcgatctcagctcactgcaaactccgcctcctgggttcacgccattgtcctgcctcagcctccagagtagcagggactacaggcgcccgccacccacgcccggctaattttttgtatttttagtagagacggggtttcactatgttagtcaggatggtcttgatctcctgatctcgtgatccgcccgcctcggcctcccaaagtactgggattacaggtgtgagccatcacgctcggcctgtattttttttttttagtagagacggggtttctccatgttggtcaggttggtttcaaactcccgacctcagatgatccgctcgcctcggcctcccaaagtgctgggattacaggcttgagccaccgcgcccaggcacaacggcttgtttctattggaaaaccccagaatttactccctataacccctctcttattctaatcccatccctttccccgtttgtcccgcaaaccccatctccaaagccgatttcacgttgagctcaagttggcctttacaaactgacttctcatgttcctcaggcccagcaaagcctggaactccaccttagggagattgttattgcgactatcaactcctggcagccttggtttatgtagttaacatgttgggcctttcttggctctactctatggttgtgcagactttctgtgaggatgctgaagtgacctgagcgagcatgagggaagggctagccacagagatcatggacctaatgcgggcgctgaaaatagggattagggcaggattccggttagaaagcgccagtgttaaaggctaaggagacacagcgccccctaaagagggtgcggtttaaaaatcgctaaatcagtccgacaatatcacgtgtcctcggccctaccaattgaaaattaacaatcgcttcttctgttccccatggaaacaaccccgccccactaaccctcccgccccaatgagtcgtgaggttttggcgttttattgagtattcaagctgacaatcaaacacctgagccttctggttggacactttgcttccggtaagcaagctagtacaataattggccaataaagcaagccttacccaatgatccttatcctaggcggggcctaatgggaacgtatggccaatcagcggcggcgtttcttttgcggctccacgtcggcaccagctgcggggcaagatggaggcgctgattttggtaggagctggaggggcagcagagatgctgtggtgtccacaggggccgggagtcagggttcagcccgagtgggagacggggaaagagagttccgggtaattcttggggactgagcgttctgctgacctttggaataagtgtgtgg

SEQ ID NO: 9699 - DNA, 2300 bp, Homo sapien
cctcagtctcccaagtagctggcattacaggtgcctgccaccacacccagctaattttttgtatttttagtagagacggggtttcatcatattggccaggctggtcttgaactcctgacctcaagtgatctgcccgccttggcctgccaaagtgctgggattacaggtgtgagccactgcacccagcgatgtattttttgtttgttttttgtttgtttgtttttgagacggagtctcacactgtcgcccgggctgaggtgcagtggcaccatctcgactcattgcaacctctacctcctaggttcaagcgattctcctgcctcagcctcccaagtacctgggattacaggcgcctgccaccacgcccagctaattttttgtatttttagtagagacggggtttcactatgttggccaggctagtctcgaacacctgacctcatgatccacctgcctcggcctcccaaagtgctggcattagaggcatgagccactgcgcccagcctgttagtttgtttttctaatttttcagagacaacgtcctgctgtgtcacccaggctggagtatagtggcacaatctttctcactgtagtcttgacctcccagactcaaatgatcctcccacctcagcctccccagtagctgggactacaggtgcacatcaccacagctggctatttttttttttattgtaaagacagggtctcactatgttgcccaggctggtcttaaactcctgacctgaagtcatcctcccagctcagcctcccaaagcattgggattacaggcatgagcctccaagccaggcctatatagtattttaaagcaagcctcagcaaactttttctcaaagggcctgattataaatattttaaactgtgttaatcaagagataaaactgaggatattacataggcacttatataacaatttaaaatataaccatttttattttacttacttatttatttattattttattttttgagacggagtcttgctctgtcatccaggctggagtgcagtggtgcaatgtgatcttggctaactgcaagcaacctccgcctcccgggttcaagcgattctcttgcctcagcctccctagtagctgggattacaggcgcacccatcacgcctggctaatttttgtatttttagtagagacggggttttaccatgttggccaggctggtctcgaactcctgacctcaagtgatctgccctccttggcctcccaaaatgttgggataatgggcgtgagccactgcacctggcctaaaatataaccatttttaaatggaaaaaaaacatgattgggtcacaggctatacaaaaacagcagactagatttggcccatagggtgaagtttactcacccttgctctggagaatcgattaagcatttgcatatttatgtatctgtctcccctagtagactatgcacaaggccatatatcagacgttcttgtatccccagtgtctagatcagagtctggtgtatagtaggcactcagtactaagttgttgggtaaatggataaatgaatgattgaacaggaccctgatcccttgaggagaatgaaaccagaattctggatgcctcattccccacttttcttcatctgacttggtttctcaaatgtgctagggtgtcacatgggtccctctgacttgaaccatgtctaagccgtggagacaagaaaggtagtgctcctctgaaacaaacccaaggcttctgggggtacctaaagttgctcctggaacttggtcttatcttttggccctttgaggagtggcccaaatgttctgatgctctgactccgtgccctagcaattcttggcaatgatcttacagatgagttctgccatgcaaagaggggaagaaaacagagtttgggtttcaggaaggagaaaggaagagtgaaaccactctgaggtaagtagcgggggactttcaacagagaagcctagatttcactagccgaagcaaaatgagtaggaccggaggtggtgaaggaagtggctgggattgggtaatgggggagtttcttattctttcagtggactataataggatacataagagcaggatgtctcctgcttgaagcctaactgtccaccagaaaggactgctctttgggtgagttgaacttcttccattatagaaagaattgaaggctgagaaactcaggtaagcacttttgttgtgggtatacttttaccttcttggtctcctcatctcccaggtggtaacaaacagaaatgactaaagcctatatgtgtgtgtagtggaaaggag

SEQ ID NO: 9700 - DNA, 2300 bp, Homo sapien
tttaaccattctgaacctcagttttactgactgtagaatgggatagtttttttttttctttttttctttttttctttttcttttttttttttttgagacagagtcttactctgtcccccaggctggagtgcagtggcccaatctccgctcactgcaacctcagcctcttgggttcaagtaattctccttcctcagcctccagagtagctgtggctacaggtgcacaccaccacgcccagctaatttttgtatttttagtagagacagggcttcaccatgttggccaggatggtctcaatctcttgaccttgtgatccgcccgactcagcctcccaaagtgctgggattacaagcatgagccactgcgcccggccaatttttgtatttttagtagagatggagtttcgccatgttgcccaggctgagaatgggatagtattaacaccagctcacaaggttgtgagatcatattacataatcataatgcctagcacaaactaagtgctcaatcagtgttagctgctatgattattatgctattgctattgtttttatttaaaagaggagtaaagagagaaacttaggatggtcaaggccttagccttcgggaacgtgcagaattaggcagtgggaacaggaagaggcttcagcaaaaggaatggaaaagccactggagcgggtggggagggaaatatgttcctgtagagttggagaagccaagggagagagtgtggcgggctgcatcaatactgtcaaattctgcaggggaatgaggactgcagaaaagctgcagacaggcctttggaagtactgtgcagcagttaagtacgtggctttggagtcagactgcccaggtttaaattcaaatcccagttcagtcacttactagcttatgaccttgggcaaattatttaacctctctaaacctcagttccctcctctataaaatgaagataataatagtacttacttcaaatagtggttgtgaagattaaattagataatccatgcaaagagctcagtacagaagctggcacattgcaagggctcaatcaacattagatggtggtggtgatattattattcatgacagagtctctctttcccagtggactggcacctccagtgctctctcctacttgggcagttcctactccttagacctcttctagaattactgtctcccctcgttctcctcccactcactccactgcttccctctgcccttggacgtccctcactgtttcccaaagccaccctctctctagatccagtcccctgcttcactaatgtctctgccttaggtgggatgggagaagatgagacctagagatgaaatactgggaatcccaggacctgtctagacagaacgaggtgtctgggggagtgggctgctaggccctacagcctctggtcccccagtgctgcccccactgaaccgccagagggcagcaggtgcacgaagcgtgggctttcagggagcctggttctccggcaggtggcgggcgcgggtaggaggtgggaagaagttaggaacgacatccccagtctgaggtcgcttttgccctgggtgccctcagctccatgatttggaggagtctctgagagagcagtgcctgacacctgggtacccgggttcagtttcccatccctagggagggaagtgacttgtaaaaaggtagcagcataggggccgccgtttgcagaggaagctggggaagggtcgtctggggactctgaagacagactgtcagcaggggatctagggaaggtggggcaaaaggggtgaaagaaaggagaaatgtctgagttggtggggaccctggacccaagaaggagccccagtggaggcaacgaggtcatctggtcaatgcccctgccgcggggccaagcggctccttctcttcagaacaagctctttcctaggagtgtctggataatggacatctccctctttccgccctagccccctttcattcctcttcagctccctgtccctgtccctgtccctgtccccgcccccgtcctcggccccgcctccggggcgggctccggcccgggccagcgccgcctccccttctccccgccggccgggccgcacagccccgagccgcccgggcaacgagcgccgcgtccctggcctgcccggcccggccaggcgcggccccccagcccgggtccgccaccccgggccatggagccgcggcccccagggtctcgcagggtaagccacccggcccctcctctctccctgactcccgcggctgccgcagcgcacccccaccccgtccccgcccgcc

SEQ ID NO: 9701 - DNA, 2300 bp, Homo sapien
ctggaactctgctgtctcctcttaagatggctttgaggagtgggagcctagagaaatctagaaccagggaaagggtcaagccaagcttcagcctctggtgctctggggcagggcaagtgccagcccaaaaccagctgctgggggtggatgctgggtgcaggggactctgggagcactcaggtttctctcaccattcctgatgccgcctggggctcattaaggctgccctggccttgggtaacaggcagtaagggagggtggggcacagagggcagatgccataaggggacagaccaggaaggggaggtggtcaagctgccccatccatctatctgtccctctctcttctcttttatctttctcgctgtctctgttctctgtctctcggtctgtctgccctagtctctagttctgtgtccagcttttcggcagtgtctctctgtttgtatgtctgatttcgctctctgacatctctccattgttctctatccttttctctctcagtgtcactgtccgattcctcagtcacctattcctgctgctaccactctcccatcctctcactcactttcatctgtccgtctctctgtgtgtgtgtgtgtgtgtgtgtgtgtgtgtgtgtgtcctctctccaccccatcccaaccttgaaggtgacagaggagggaatagacacaaagcatacagacccccagctacttaagggtcaaagccaaggatcttaccctctcctttagccctgagaattctgaagcccaaactcccagtagccttgaccccctgctctgtctcagtcaccctgaccacccatcctggcatggggtgaaagagacagacccctccagacctttctggaccagctcccagcccccagctgtgcctgagccctccccaccccctccctgtcgcctcagattcccctaatccctgctcccctgccctcccctctgccccacttttccaggattctgattggctgattctactgactgggctgagggggagggggctggcaagggagggggcagagggcagaaccaagggaaggggacgctgtcaggcccaggcccctggggggccagggccaggccactgcctgggggcagcaggcatcagaaactaaaggtatgaaagggggtggtgtctggagggaacaggaagggatcctggagaccttctgctctagtaaagtcaagggaggacgggccaagcacgcagcctcctcggtttgcctttgttcctgggaacccctgttgctgtcagggggttactggagcagtgaagggcggccagaactccccagctggtgcacagcagggtcgcagaagggagctgggccagtggaagcccagaagggctctgaggacctttgggctgcccctttggagtctggtggagttcctcccgtgactctgagaggaggaggagaaggtttcagagaagggtagttgaatggctggcctggactttcatttccccttggggtcagacccaggcattccccgcccataggccaggtcgaggttcctcctgcagaactggacctgtagctgagcattcctggtgagacaaaagggcatgggggaagactgaggaaggttgggagaaggggctctgagaatggcctaggtagttcacctcccagagcaaaagccacccaacccactacctacccccacagatgtcaatagttaataaagaattatagttagagcaaaatctaattctagggcatctgagagattcagcagcccccctccaaatctaagtctcaatatccccctctggtcagtaggatgaatcacccacttgactctcttcttcctggggcgataccaagctttaggatcccctgggggaaagcaaaaccagaagaagagggtggccaggggcttgaggctgggagtcctgctggttcagcaggcagcctgcagaaaaggtatgagctcttactgggtctgtaatgtgcctaaggagtttgggggagggaggctggaaaagggggaagtgaaaaccacccagaagggaaggactggtctacaccctcccccaggcccacagggcactgtgctccattgctctggagccagcaggggaagtgtgtacactatgtgcactgagggtgacacttctgagtgtgggggccctggctagggagtgggactggcaggcttgggtggggttcccaagctttaatcttcctaccccacagaatgttttctctgcccttcaggcagcctgagccgggcagggcccctgcctctgctacggcagcccccgatcatgcagcccccactgga

SEQ ID NO: 9702 - DNA, 2300 bp, Homo sapien
aagccctgtctctggaaccagacagacaggttcacgtcactcactaactgtgtgaccttggccaaataactctccttctgagccaattgtcatcatctataagatgagattcatttattcagcaaatatttattgagttctcactgtgacatgccagcatcttacatggatttgttcaatcctgtcaacaacttggtgaggcaagtagtgttgttttcatttgacagatgagaaatgagactgagagtcagagaacctagctgctcacccagctagtgagtggtgggaccacctactgggagattgtgtatgtaaagtgcctggcctatagtaaagcctcaaaaagcggcaactattgttagcctcagaaaaagagagggagaggcctaaggcctgggctacctgaaaccaagagtcctgtttctgcccacccggcccaaaagctgccatctgcctctctcgccacctcagaatggagtggacccaggaatctgggaagtagatagtttgtctccagttgcctgcctgcttccttccctcactgtaccctcatttgacccctctctcccactccactcccctcccctcccccgctcacccagggctcatgtctgtggaaaagatgagttgttagccatagataactgagtggctgctacctgttttcctctatccctcctctggaggaaaaatgaggactccaacctgaggaagtgcatggaacctgctctccccttcctctccttgaacaagatggaagcctgtgctcagatctctgcttcagttaaattcaagccctttgggagtaaggtagcagagaaagaatttgctgtagagtccagcagatcttgatctatatctcagctctgatatttacaggctgtgtgacatcagccaagtttgttaactactctgagtctccatttcctcataagtcaagtagaaaaatattatcagctacttcattgaatcatggctacttcattgagctacttcagaggttaaatatgataatacttggaattcattacctggcacatagtagcctcaaatttttttctgtggctttttctggaactctgctgtctcctcttaagatggctttgaggagtgggagcctagagaaatctagaaccagggaaagggtcaagccaagcttcagcctctggtgctctggggcagggcaagtgccagcccaaaaccagctgctgggggtggatgctgggtgcaggggactctgggagcactcaggtttctctcaccattcctgatgccgcctggggctcattaaggctgccctggccttgggtaacaggcagtaagggagggtggggcacagagggcagatgccataaggggacagaccaggaaggggaggtggtcaagctgccccatccatctatctgtccctctctcttctcttttatctttctcgctgtctctgttctctgtctctcggtctgtctgccctagtctctagttctgtgtccagcttttcggcagtgtctctctgtttgtatgtctgatttcgctctctgacatctctccattgttctctatccttttctctctcagtgtcactgtccgattcctcagtcacctattcctgctgctaccactctcccatcctctcactcactttcatctgtccgtctctctgtgtgtgtgtgtgtgtgtgtgtgtgtgtgtgtgtgtcctctctccaccccatcccaaccttgaaggtgacagaggagggaatagacacaaagcatacagacccccagctacttaagggtcaaagccaaggatcttaccctctcctttagccctgagaattctgaagcccaaactcccagtagccttgaccccctgctctgtctcagtcaccctgaccacccatcctggcatggggtgaaagagacagacccctccagacctttctggaccagctcccagcccccagctgtgcctgagccctccccaccccctccctgtcgcctcagattcccctaatccctgctcccctgccctcccctctgccccacttttccaggattctgattggctgattctactgactgggctgagggggagggggctggcaagggagggggcagagggcagaaccaagggaaggggacgctgtcaggcccaggcccctggggggccagggccaggccactgcctgggggcagcaggcatcagaaactaaaggtatgaaagggggtggtgtctggagggaacaggaagggatcctggagaccttctgctctagtaaagtcaagggaggacgggccaagcacgcagcctcctcggtt

SEQ ID NO: 9703 - DNA, 2300 bp, Homo sapien
tgcttccccttggtaagcttaagcaacccctcttctgagatcttcctaacccagagtccctggggcagtgtggcagggtggacaacagctgagcgcaaaggggtctctaaaaccaatcgaccatgcctgatgatggctcttgtttagtctctgagtccacccaggaggagaaagaatgggaagaggaaaggaggtgcagggtctaaggagaagcaagggtttttcatactggagttgaccagcatggtggtaggtcagacccagagcaggaggacctcctctgatggacccagaaaccccatatcctctcccaaggccaatcccctgagatctctgccccactgaatcagaatgagactaaggcattggcactcccagcattctctcccttgagctggagtgtcttggcaggtacagaaacaggtcttttcttcaaaccagattactggcgtgagggcaagagattgctgggacccagaaacagaaactcaaacttcctgcaccttaattgaccatccagtcccaatttccctccagaacccaggaatgtcagtctctttccccttcctaaaccattccgaaacttcagtcccaccaccctttcaccaacttcttcccctcagcttctacctccctaaacctcaaacgttccagttcccacccacttttcctctgattggggttggcctgaagctggctgtgtggcattctgggaaatctggctgccaccctccctcttgagacaagtacagacagatccagcctccatctcccccagacatctgcattctccaagactcctaccttgtactggggtcccttaagaatacctctgagtgggctgcgtgcggtggcttacgccagtaatcccagcactttgagagagcgaggcaggcggatcacctgaggtcaggcgttcgagaccagcctggccaacatagtgaaatcctgtctctactaaaactacaaaaattagccaggcgtggtggcgggcacctgtaatcccagctactcgggaggctgaggcaggagaatgcttgaacccgggaggcagaggttgcagtgagctgagatcgtgccactgcactccagcctggcgacagagcaagacttgggtctcaaaaaagaagaaaaaagaaaaaagaagaaaagaatacctccaagtggcctgtacttcctctccctcctgacattctcccctgctcatacattttgtcctaccctccatcttcccctccacctcacgaaatgcccccccaccagtcctcctcgaccgaagctcgccttagtggggaatgccgctgatttagccctggatagatgctccctgatgccaccccaccctaatccaggtcatctctacaaggtgcctcagttctgaattttctgtcatcttccagttgccctaatgatctcggttacaagcttctatttccatctcctcaggtccattgattgcaatctcctcgctgagaccttccctaaggacccaggcattcagaccccagccagaactcaacctgggatccatcttcaacatcccatttcacctcagaggcccagcccccaggcatcctgctccaaagccagaacaacaaactaggacccatacaatttctgctgcacttcccctgccccctgctcagtccattactctggagggaacctaggtatcctacccaacccaaggcccatcgcctcccagagtacttaggcacccccgcccccctcccccccccactcccctgcccaccccatatcagcccagcaccagacttcccgccctcagactcagcccttcccgggaacccaggcatcctagtttccagcttcgtccatcacctcacaccgtcttctagacgtcctgttcccccagccctggccgcagtgacaccgtaaacccaggaggccagcaggcagcaagaagaagggcgggaggaagcgggaggggccaggacgccccctcgcggagccctgagtgcccgggtcccctcctcccgtcttcacctgctgagggccccgcccccgctccgcctcggccggcctctgctcctccccggctcctccccccgtacccccagcccggccagaacggcccccgggacagagcgacgcggaaccccgggcgcctgggtccccagcatgatcctcggtgagtggtctctgcgactccaggctcccggctcctgggttcctctctgtgggtcacccaccgcccccctccaccatctcccggcaccgcggtgactgcggccgcccgtcagcgaccggttccccctcccccttcatctggctccaca

SEQ ID NO: 9704 - DNA, 2300 bp, Homo sapien
tgtttgagttggccaaggctaggggtggagtggggaggaggactggggcaggacgctatgtcccctgtcccccaccaaggctcctgggaggagctgagtcacacacctccttccctgcacccctccccacccccacccctaatctcccaaatcctgggaaaatctaaagagtttgcctagactgagaaaggagagtgtttggttcacacacgtgttttgctgggctaaaaagcaatcaggcctcagcccttctcctcccaaagggggttcccagcccatggcttgagtagctctcacctaaaggttgcctttttggcaatgctgggcttaaagatcctgacccagagattccctgggttcctcacctaagaaagggtcaggacttgcagatgtgagaatgggatacgggccagcattgccccacagtctggccagccagcctctcccttgggctgcagctggctctggaggggggcttttaaaaaagcagatgggtgatttgggacaggaagtggagtagcagagtgagggggagagtcatggcaggaaaaaaacattgactctgggcactcttattctgagcctttcagcccgaagtggggcaggggactggagaacagaagggacagggttgacaggatattattgacagggtattattctggaaagtgaggagtcctggaggaaagagactgaaaggacttgtagtcccctcccccagactaagataaaggctagaatcctgaaaagtgatctcatcacacagagcctgagcttggggaagaggtgggcagggggtcactgccttccctttctagagtcccttcctctacttccacaggggaatctgggaagaatggggtcctggctttccgctcccattgtttttttggtttttggtttttggattttttttttttttttttttttggatacagtcttgctctgtcacccaggctagagtgcagtggtgcaatcgcggctcattgcagtctctgcctcctgggttcaagtaattatcctgcctcagcttcccgagtagctgggattacaggtgcggaccaccacatctggataatttttgtatttttagtggagatgggttttgccatgttggccaggctggtcttgaactcctggcctcaggtgatctgctcacctcggcatcccaaagtgctgggattacaggtgtgagccaccgtgcctggccagagctcccagcgtttacagccattaggagctgaaggttgggtccctttgcaagactttccaccaccaccaccacctctcacaattctccaggtttgtaggaacccggccagtttaatcaagcaggtactgaggggccagccactcgcaggcttttggtcaactgtcagatccaaggaaggggctcagcagaggtttacataccctaggaccaagaagggggcaaactggagcagaatcctcctgatgaatgaccccaaactcctgggttttcaatactagcaagcttggaggaggaagcagcggaacttgaggagcccgtgtaggtcctctagcaagctgactgcgaacgctgtctctgtacctcaactgttgtgtcccaaatccagctggccagaacccaggcacccggcggccccggaaggcaagggggaatcccagttggccggacgccagaggagtctcctgtctctttagaccccaaagtctcctccctaaagcactgagggagaccccacacacatatacaggcttcctccgcccaccagaggtgattcctttcctcattaggaaattctccgctcccttttccgactcgttttccgagcgtttacgttgtacatctggaaaggaatggggaggaaggagggggaagcagagaggagggggaagaacccaaacccgcccagtctaacccagtccagacaaccggcttccagctggggctggggaaagggggttggaggggtgcgccccccccccacgccccttaggggtgggggacgcgggctcagagttccagggacccaggaatgcccccccgccagccccctcggcaggcggggggagggctcagccgggagtttggcaaactcctccccgcgttgagtcattcgcctctgggaggtttaggaagcggctccgggtcggtggccccaggacagggaagagcgggcgctatggggagccggacgccagagtcccctctccacgccgtgcagctgcgctggggcccccggcgccgacccccgctgctgccgctgctgttgctgctgctgccgccgccacccagggtcgggggcttcaactta

SEQ ID NO: 9705 - DNA, 2300 bp, Homo sapien
cttcccaggtcatttcaggccccattaatttttttccttacaggaatttacagtctctaccactttttttggcattttttgtactgctattaaacctttcatccactttgggagtcgtttttctaagcactctggggacaagaactgcagcttacactttttttccccagaacaaagcctcacactacgtttggttttcccttaacaagttgtaaccttccggccttcttgtcctctccaactcttcattgagctctctccccaactctaaaactcgctttcatcaggcagcaacaaccatcatcctaccaagcattctcagatagttagtgccttttgaattttgggattttacaacacattctaaacaagaacagccagacacaaaattcctgtccttggtgattgttttgtggctgcactgcgtatctcctttataattcctcttctcttccctcaaaatctaaattacctttctatctagacaacttccacaaacaaggcttctttctaggcagctccccacctctaaccagttccatcagtcccattccctcaggcgccatttttttttttttttttttttttttcctgagacggagtctcactctgccgcccaggctggagtgcagtggtgcaatctcggctcactgcagcctccgcctcccgggttcaagcaattctcctgcctcagcctcccaagtagctgggattacaggcgcccgccaccacacccagctaatttttgtatttttagtagagacgaggtttcaccatgttggccaggctggtcttgaactcctgaggtaatcgcaggtgcccatttctaagtgctcatctgccttttctaagatggccgccacaaaacccagggaaagaaatgcgagttctaccctctcaaggccactgttgttctgggggccaggggaggatggccccaaagatggggtgcccaaggaggagatcctcgtgggaaagggtcatcagggagctgaccctaggggctcacaggtgaactccacagctgatccaccctgccccacactcagccagaaccgagactcccagtcacaggaagtgccggcccctcgccccacctcccaacgttaggcgccggaagtggccgttgctggggcttgcgtgggaggaaggtgactgtgaggaaggtgtgtgtccaccgaggtaaggaaaggcaccccggggcgcctctaagcaattcctattttgcgtaccgggataccttcaccttctaatatcctcatttcgcttttctgctggtagccttcagccttgtgggctctcaatgcagctattttggctaccaacctgtttcgctgcattgcccactcgagggcctccttggcgccttttctatgttttttttaagttaaccacctcccccactttctcttatttagtctcattgattaagtctactgtgattttgttgttgttgttgttgtttaaaggaagaaaaatgattcttttactaaggccggaattctgttaagcgtttaaccagtagccgccgactacatccataccctaaacttgattgcttccggcgtagcttgtctatttcaccgtgatctagtagtagggaaaaggtaaagaatcccgttaacagtttgatgcggaagatacttaaaacagacacggctaagtgatggtactgtgaattccagtgcccctagtgtactgtaattcgtccttttgtccgggaagaataggttggcttcctacaagctgctgaatctggtgctcatcacttaaaatcaagaaacatacttggttcttccttccaaaactcttatttttaatgaaaaagtatgaagtaactatgtataagtgaaatatatacaaaaagacggtggggatttcttgatccaaacataaatatgaaaaatatttttaagacaaattcactaatgattgtcattaacaaatgggctcagtagcaaaaaaactagagttctagctgatcacttgtatttcctatcataggttctaacgctgcttatgtcacagaatggggggaggggtggtgaggagtgtagaattgtgtgaggggccaaaggagagcatgctctagagacagacaattttcagaagtttcgtatggggatggttttatataaattcaggtttttcccacaataataaatgtatttagtctcagtgctcaatagaagagatttctaatagaaaaggattcaaactgtgaaaccatttctcttttaatgtttcacattcctgttacagatttgttctcttgtgactctgttatccataatatggac

SEQ ID NO: 9706 - DNA, 2300 bp, Homo sapien
cttttttgatttcaaaacaatgcctaggtcagttgttctcagccctggctacacattaaattcatctgggtagatttttaaaaataactatgcctggctctttcacattaattggtgtgggatgggaagttggcatggtatgtcttaaaagctcccctgatgattctaaggtgtagacaagattaagaaccactagcctacaatggcttgagcctggcttccatcaacacttggttctttttagtgtcttaatctgaactgatggctgtggagcaaactctcttctagtaggaaaaaaaggtcggggggagggggtgcggagggagtaacaacaataaacgctcacaaattaatcatgtaaaacgaaaacatcccttgcccggcgcagtggatcacacctgtaatctcagcactttgggaggccgaggcaggcagatcacctgaggtcaggagtttgagaccagcctggccaacatggtgaaacccccgtctctacttaaaaaaaaaaaaaaaaaagctgggtgtggtagtgcctgcctgtagttccagcttctcaggaggctgaggcaggagaatcacttgaacccaggaggcggaggttgcagtgagccgagatcatgccactgctctcctgcatgggcgacagagcgagactccatctcaaaaaaaaaaaagaagaaaaagaaaatgccccactgatcctttttactaaagctacattcagtttttgtcagggtagtcctctcaagtcctatttgggctctacaccactgaaatgctgtagaaatcccaatatttcactgcccagactaatcacccagactgcctcctacatcttgaacagcacagaatgttttgtcatatcttttacttcttggttttgaaaaatattaccaccagatctacttgtagtgtcaacaccttcctttttttgtctaaccttcaaaggctacaagtcccttttctctataatgccttcccaggtcatttcaggccccattaatttttttccttacaggaatttacagtctctaccactttttttggcattttttgtactgctattaaacctttcatccactttgggagtcgtttttctaagcactctggggacaagaactgcagcttacactttttttccccagaacaaagcctcacactacgtttggttttcccttaacaagttgtaaccttccggccttcttgtcctctccaactcttcattgagctctctccccaactctaaaactcgctttcatcaggcagcaacaaccatcatcctaccaagcattctcagatagttagtgccttttgaattttgggattttacaacacattctaaacaagaacagccagacacaaaattcctgtccttggtgattgttttgtggctgcactgcgtatctcctttataattcctcttctcttccctcaaaatctaaattacctttctatctagacaacttccacaaacaaggcttctttctaggcagctccccacctctaaccagttccatcagtcccattccctcaggcgccatttttttttttttttttttttttttcctgagacggagtctcactctgccgcccaggctggagtgcagtggtgcaatctcggctcactgcagcctccgcctcccgggttcaagcaattctcctgcctcagcctcccaagtagctgggattacaggcgcccgccaccacacccagctaatttttgtatttttagtagagacgaggtttcaccatgttggccaggctggtcttgaactcctgaggtaatcgcaggtgcccatttctaagtgctcatctgccttttctaagatggccgccacaaaacccagggaaagaaatgcgagttctaccctctcaaggccactgttgttctgggggccaggggaggatggccccaaagatggggtgcccaaggaggagatcctcgtgggaaagggtcatcagggagctgaccctaggggctcacaggtgaactccacagctgatccaccctgccccacactcagccagaaccgagactcccagtcacaggaagtgccggcccctcgccccacctcccaacgttaggcgccggaagtggccgttgctggggcttgcgtgggaggaaggtgactgtgaggaaggtgtgtgtccaccgaggtaaggaaaggcaccccggggcgcctctaagcaattcctattttgcgtaccgggataccttcaccttctaatatcctcatttcgcttttctgctggtagccttcagccttgtgggctctcaatgcagctattttggctaccaa

SEQ ID NO: 9707 - DNA, 2300 bp, Homo sapien
tgaggagctgggcctacagccatgtaccaccacaccaggctaatttattttattttatctgtagaggggtgggggaaggtctcacaatgttgcctaggctggtcttgaactcctggcttcaagcaatccttctacctttgcctcccaaagtgctgggattataagcatgagccacttcacctggccccaacttcttaagtaataatgctgatcagccttgtctctcttctcccactccctagaatttattgggacaatgggaactctggatacggaaaatgggaatgattaaaaacctgagaaaaggaattggcaaggtggtggaaatgaagagaactctttttgatttataatttttcctaggaccttttgctttgtgtcttgaaagaaagttgaaatagagttgaaaattttcttgagttacggagttaaggcctcattggaatggcaagaatattttaatgctaaaattcattcaagtctctaagatttaagggtgattactaatttcctctttttaatcttgattaatttggttcttcttcatggggcctatttcctaatttagtcttaataattcaacaaataaaccagcatatttattgagtgactactgtgtccaagaggtattgttctagatcagtgtttttcagaatggaatatttgtaccaaaacctcctacaacagtgcttatataagtacagacttctaggccccacaacagactcgcctacctaccaatgctaatctcagaggacagggattgatctgtttctcaagcatccataaataccatggtactagagcactggttctcaaacttgagtgtgcattggaatcacctggagggtttgttaaaacacagagtgcctggacccaccccagaattttggattcagtggtctggggcgggtcctaagaatttgcatctctaacaagtttccaggtgatgctgatgctgctggatcacattttgagaattactatgtacttcttgagaactactttgagaattattatgtactgtagaagtacaatgcactgtagtagagcattgtgagaaatataaaaaagtattagaggccgggtgtggtggctcatgcctgtaattccagtactttgggaggctgtggcgggtaaatcacctgaggtcaggagttcgagagcagcctggccaacacggtgaaaccccatgtctactaaaaatacaaaaattagcaaggcgtggtggtgggcacctgtaaccacagctactccagaggctgaggctggagaattgcttgagcccaggaggtggaggttgtagtgagcagagatcatgccattgcactccagcctgggcaacaagagtggaactctgtttcaaaaaaaaaaaaaaaaagaaaaaaaagtattaggtacaattcctgtcattaaggagcttatgctgtagttgggggagatacaacgtacactataaacatataacaaggaatatatgtatttgacaatataaaatataatacaatataatatttgacattgatggggtctttaggagaagatgggatttgatctgggtactaaaacatgatgaggccaaaggttcataggcattcttggatataaaagaaggaaaatatagaggtgtacaggggtggggtggtagatacttgtttatctagcttacagcttttaatttttattttttatagagatggggtcttgctatgttgcccaggctggtctggaactcctgagctcaatggatcttcccaccttttcctcccaaagtgctgggattacaggtgtgagccaccacgcccagctttgtctaggacacttatgggggcataagaccaaaaaggttggtgcagtctgtgaagagccttgaaagcctgtccttctcctcagctccacccacttcatagccttaccaaaagtgctgcacagccagaaagaggaagtctcccctgctgagtgtgcaagaggaagcacaagaaggctctgagggcctgtgagccataatgactgatttcacccatgagccaattgcagaggcaacagaagaccagtgcaccaaccaggctgggtccctccgccagagggtgtcaccatctaagctgaaagtgtttggggagatcagacattgctgtctggtgctcctctctcagtggccatcatgtctttgacatctgcttaccagcataaattagcagagaagctcactatcctgaatgatcgcggtcagggggttctcatccgtatgtataacatcaagaaggtaagcatgaacaatgggactagtactgattattcca

SEQ ID NO: 9708 - DNA, 2300 bp, Homo sapien
gaagaagctgacagaagagtttgggcctcacacaaaggcaagttccctgacaatggagaattcctcaggcaaaagtatattgtcctcatgattgccgctaaggtttcatttgcttttccccacaggctgtgagtggagccctcctctctttgcatttcctctttgtccgaagaaaccagggggctgagcagtggcgcagtgcccaacttctaagcctcatcagcaaccccccagccatgattaaccctgctaattcagatacagtgagtgcccttttccttttgttagtggaagcattctctttgccaaggccatcatctctgtagagggtgcttctttcaggaaatatcagtactaaagaatgctttagtcttcttctagggtatgtctctaagttgagcacttcttgtagctaaaaaatcatggttggtttggggcttttgtttggatcagggttagtggtttaacaaaagtgatctataagcagttagcctgtccatagaaggaatttagtaaatattcatagaatgaatgaatggatgaaacagagtcattaggcacctattaagcctagcagcaacttgattttaggaatcaattaacttatttttatttttttgagacagtgtcttactctgtcacccaggctggagtacactggcatgatcactgcttactgcagcctccacctcctgggctcaagtgatcctcccacttcagcctcccgagtagctgggactacaggtgtgtgtgccaccatggttgactaattttgtttattttatttaattttaatttttatttttgagacagagtctcactctgtcgcccaggctggagggcagtggcgtgatcttggctcactgcaacctccccatcttggttcaagcaattcttctgcctcagcctcccaggtagctgcgactacaggcatgtgccgccacacctgggtaatttttttttttttttttgtatctttagtagagacagggtttcaccatgttggccaggctggtcttgaactcctgacctcaagtgatctgtgtgccttggcctcccaaagtgctgggattacaggcgtgagccaccgcgcccagcctgtttatttttttgtagagacgaggtatcactatgttgcccaggctggtcttgaactcctgggctcaagtgatcctcctgtcttggcctcccaaagtgctgggattacatgtgtgagccactgtgcctggccaggaatcaattaattaataaatgtttttgtttgatgactgtgggctcaaagtccttccctcaaagaacttatagtctggtagggaacatatgccatgtagtcacaaaaatacaactgatggtacatgattagtgataagtgccaaatgagtgatttacattttaagcagtaaaataatccaaaggattaaccatcacagggagaaatcatgagaagatttctgagtcttgctctcttcattttattgttattaaaaatatctgaactgttgaagagaagttatgtgaaaccttttgcttgttctgacttctagtccaagttcctctttattttctcaactgtattgtttttcccttactccacttccagtgcctcatcacctccattattggcaggcttccctgctgttggtttatcaatgtgccctaaactagtctggtaaaataaaagttagttttttaaaaaaatttagagacagggttttgctctgttgcctaggctggagtgcagtggtacaatcacagctcactgcagccttgacctcttgggttcaaaagatcctcctatctcctcctcctgagtacctaggactacaggtgcacaccgccatgtctggctaatttttaaattttttgtagagacaaggtcacactgtgttgcccaggctggtcttgaactcctggcctcaagctatcctcctgcccctgcctcctaaagtgttgggattaaaggcgttagccaccaccccttgccaaaagttagttttgatactcagatcctagtttgtcctttctcctttagaggaaggccaagttaaataactgatcatctttgcttctcttctcacagatggcctgtgagtatctgtctgtggaagtaatggagcgctggattatcagtaagtttagtgggattagatgggagtggatgaagcagtatgttatatgaagaacaagttctaaaagtcttcctctgcactgttttcccacctacagttgggtttcttctttgtcatgggtgcctcaactccaatagccagtgccagaagctgtggaagctgtgtctgcag

SEQ ID NO: 9709 - DNA, 2300 bp, Homo sapien
gattaaagtattaaatagataactgatacagtgaaattctaaaaggaagttggtgggaatgggacccaaggtagagattgagtaactacttttacttgagagcagggcctgtgttgtatttatacactgctccctttaaccccctcaaacctggaagagtaccttgatttgaaggagtcaaggcaggagcacaggaagagaagtctagccccacctttgccattaaagccctatgtgaccttgacaagtcatttcccttccctaggtattattttctgtatctgtaaaattatgaggtagagttgaatgatctctaagctgtgagtcttttattaataggctagggtgagaagtagggtttggaaagatcctgcctgtgagggctgcccatgctcccaccagggtataggctggactctctgaggactgggaaggtgaggcaagggccctaatgggtagcatggtcaaccccattgtgcttgtgtcaatcctcaggtatggcaagagagtggcagacataaaggagagcaaggaacatgtaattgcaaacaggtaaagggtggtgaatgcactctctgagaggggatggaataggaatctcttctcacttttgttctcacctaagccatccttagtttctgtacagctttattgcctcaacccaagaacttgctgctaccccataaattcttttttcttttcttttcttttttttttttttgagacagagtctcgctctgttgcccacgctgggtgcaatggcatgatctcggctcactgcaacctccatctcctgggttcaagtgattctcctgcctcagccttctgagtagctgggattacaggcacccaccaccacgcccagctaatttttgtatttttagtagagacagggttttgccatgttggccatgctggtcttgaactcctgacctcaggtgatctgcccacctcggcctcccaacgtgctggaattacaggcaagagccaccactcctggcccttttttcttttttaaaccaagtctaacttgagcattgaaccttccttctgcctgatatcccttcctaaatatagctttcttctgtgctgcctgtggagggtttttaagggtgggagaggtgatagtcatgttccccttttcttccttagtggccagtttcattgtcaacggcggcaatttctgcggatggcagtgaaggagctggagactgtgttggctgatgaaccgggactactgggtcctaaggcaagaggaagaaatgttgggaggggaatgatggccagtgataagagactgtgtagctacgtggcactcacgagattttgcctttctgagtcttttgtcattcatttgtatgtatatatgcgattcccttgaacattcttggagtatcccaaaaccttttgtatctctttttttggcactatacgtagtatgtggtgtattaagattacttttatacatgtcttatcctctatttgagtgtgaatgaattggagacagagcttgtttttttgtttcaaaccacataaatgcccagtaaatatttctaaaactttatttgatagggagagaagggtactaattgtgagccagtgtcaacatgtgtacctgcctgattgtgtgttctgtagttgaggttttttggtgagtctgaatgtttattattcacactgttgtggctacacaattacatccatacctatattatcatggtagtttactctgtgctttgaaatccatttttaaagttgaaaattctaatagtctctaccccctccataggctctttttgctttcatggccctgtccttcattcgtgatgaggtcacctggctggttcgccacacagagaatgtcaccaagacaaagacacctgaggactatgctgactcgttagtacttgacatggctaagaaccttgtccttagatggactggggacagggaggcatcagatgaccttaggaggtctcaatttctgccctgatatcactgtgtttgtctcagttcatatttctagtcttattcatctctgttctcatcctaaactttataggagcattgcagagctacttttcttgttggaggggattaggtctctggtccgaagacacatcaaagtgatacagcaataccaccttcagtacttggcaagatttgatgctcttgtgctcagtgacatcattcaggtatgatatttaattgattatactttggaaatttcaggatgatccctagtgattttcctattgaaaccactctggctgaatctcatgctctgtaagttgggtgtc

SEQ ID NO: 9710 - DNA, 2300 bp, Homo sapien
gtgtgtgtgtgtgtgaattagccttaaaatgaatcaggagcagggggtcttgggagagcaggatgtgacactgtgttaacaagaaatgttgagagagccctctggatgtatgtcttgcctctttcccacctattctagtttaaagacctgcctaaatttggaaactccttagctctaatcctaatttactaattagagctctttagcaccatcctaatttgcaattcttttgtagtttccagcccatttcattttcagttgataaggaggagattgctcccaaattttcagaaatggactgtgtaggagtgtgactagggtctcagatgcagccatttcttggctgggtctggggaaaagccaagggatgtgtgctaaaggtagatggacagagggtgggaagtcccttattatttccacttttttctccatctctgactctgccatctctttctgcctctgtactttctgggagctggttctgctgatacttctgctgaatctaaatgctgacctaacttggcaattcttttatgttaggagtcttagctgtgacagttcatccgcttcttcgcccttccatttcacttcttttctccttctctgactgggagaggaggagcctccactcagtatttagaacagagtaaataccttctcctgatcactcctccttccaacctccagaattttttgaaattaaaattcacattctgggatcctggattagtggcctgttttggattcagtagttagtgaatatatctccactttctgttgacataggagtttccccaatgccaaagcaggtggtcattaagggagagaacaatatggagcaagagaggtggttcctgcaagagtcctaggtaggactcggttggatggaggaggctttgcccttttacaaggtcttgagttcaaattccagttcactccttccacaaatgtttattaaccagctaggctgttttgtgctgggcctttagctcctagatttctttctctgaagacagaacagaaaaaatgagctggaagtgcttcaggaggggttttgatatcaggaatgctttcctggctgtgtagagttattacctagtcaaagaagaagatgttaagctgggtgcggtggctcacacctgtaatcccaccactttgggaggccgacgtgggcggatcacgaggtcaggagttggagaccagcctggccaatatagtgaaaccccatctctactaaaaaatacaaaaattagccggcgtggtggcccgcgcctgtagtcccagctactccaggaggctgaggcaggagaatcgctggaactggggaggcagaggttgcagtgagccgagatcgcgccactgcactgcagcctgggcgacacagactccttctcaaaaaaaaaaaaaaaaaaaaaaaaaaaaaaaaagatgcctgctctggagagctttgaacttggaagaaattcctatctgctaggcgggcaggcagaagtaccatggagaaggccacagtcttggagacaggtggggaagatcaagctgagggacccgaggccaagtgtgggatgccatcacagctcagggcacaccctgaacttttccaagacaggagcacaggtggggtctggtccgactgggttccgagtccagatctagcagggaaagatgtgtgctcatcccctaccccgcactcagacatgggacacgcaggcagctaggcacacgtggatacatggaaccacaaccacatacacagaaactcaaaacacacggagagaacccacacaaccacccacaccgaagtccagcccgccgcctccgctgcactctgtaaacacgcactcacatccgccagtacagggcacacgcagccactcgtccccggcgcctgtgtgcgtgcgctcgcccttgggcgcttctgtctgtgtgtgcccccggcttccaatcgttcctttgggagggggaggagtggctgtgaggagtgagagactggcgggcaggctgaggagaagggagggagagcagagggaggggggaacccggccgggggaggaggagagaggcgaggaggcggctctggcagcgcgcggcggcggcggcggtagcggcagcagcagcggcggtgcggagagcttggactgggagcccaaagctcggctgggcagcgggagaggaggagccgcaggagctgcagctctgccagcttgggccgagcctagagacaccggcctggctggtccacgccagccgcaggtgggaagggcctgggatggggggtgagggtctctcggctggggctg

SEQ ID NO: 9711 - DNA, 2300 bp, Homo sapien
ggcattagagttgggttcctttctatttttaaactacatttaagggctaaaggaaaatccatactggaccctttgttgaggtcatcacatttatgtcctgcctgccagccaggtgacagtctccttagaggtagagtgtggggtgtgtgtatatgtgtgtgtaagtgtctatgtgtgaaatttttcctcaggaagggatgatggttgatcattatccctccttattaggaagagtaaataataataacaggctagggcaaagtatgcagcatgcatacctgggctgaagtggtgagcagccattcgtccaaccagctttggttctaatgggtaagagaggagaggaatggacaagatatcctcttcgaggcttttctagtctaagaaatctttacttttcattaggagagttgaggttagcacttacttggctagagtggcagggtctggagtgagggtacaagacgaggcagggaagttggcctgggttggaggttattagtgtttcaggctgtgtgctgccatctgcccccactctcagccccatcctgcaacgcaagcatgtccacagaacatgccaaatgacctgtcctcatctcctgggtggcattcagggtctctgacactgggtctagtcctttctctctaaaaacactcatcagcttgtggtcattgtggggagggtggtggtgggacacagaaagagatggatacagagagagtgggtttcttccctcccaagatctgcagcagccctgcttcacggctaccaggtgttcactagagaacagccttaagatatttgacttccactcctcttgttgagatcgaagcccacttccacttgtcccagtactcagtggaactgagaaacagcaggttcccaaacttcatttatttctgattcttcaaggctttggcataatgacaaggtattttcatttcttcctgcttttgacgggttggggtaaagggaaaacttcctgttataaaatcctagctcttggcctgtgtcttctcttttccctttctgctgacatactcaaccccattagttccttttcctctttaccacatcacccgcagccatagacctacatctaagagattgcagatccctgaactcttttccccaatgcgttgggcttcacccgccagctcttctccttagccccgcccaactcctcagctggccaatcacggccccagcgtacatgtattggtggcgacatctcccagccaatcaggaggcgggctgggactgtgtgcgcacgtccacttggagctgcagaggctgggttcttccctccccaaccttggcgaaagcaaagtctgaaggcgggagaggggttcctggtcctcagaccccttctgggtgcctcttttggcccctcctgggccatctcatcgcttctccttacctctgagccgattgacctctctctggttaattcatggttattccccaatttccattttacaaatgagaaaactggggctgggggtgttaatttgcccaatcccttggtttctatgagcgagttctcttgactttccttctctgcttgcgggtggagggcccttccctccctgttgagcccggtctctggataaggatcccctgacacctagcttcaggaagcccctccctacagttttttatcctctgtgggaagttcatccccctgtcttgcttccattctgtgaggtgggttaaagctcgttttgaagaatggccccagaaaaagaccctgaaagggagctgaatctgcttagctccttttgggggttcttgcagggccccttcccctcccgctacagacctcctctctgtgacagattcaggatggttccctgtccctgcactcttaagcctcttgctaaccccctttttcccaaaagaggagccccacctcctcagagcaaggggctggcctgtgctatttctgtcctttctgggcttcttctgagaacagattcttgttttccgtctgattcagatgtgaaacttttcccgcagcctcccctctcacccagttccggtaggctgggtctctgcctccccactctcttcttcctgcagccaggcccctccccaaagttctctctggtcagttgctcagttctactgggacctggaggaggaaggcaggggccaaagaggaagttgtcccctcttgggggccctggggctcctggggtcaggattttgatactctgaagcaggaaactttgattcccatggcaaaccctgttcctgttcagaggagccacctccagggccccattctcaggtaggt

SEQ ID NO: 9712 - DNA, 2300 bp, Homo sapien
gtgggtgagagacttggggaggaatttccatgaccagaccaaagtttgagggagagcacggaatacgaaagaggactaggcagcctggatgtctggggtgggggtggagaggtaaccactctgagaggtgaccacccctcaactctgccgtcctgccaggaaataacaataaaaccagcagctacaattaaccgtgaccttctatgcaccaggtactctacccaagatgatactcaaccctaggaggtgggatcctctgtctgttttacaaatgagatggaggctcatgagagaagcctgagtccccagacatagggatgtgggaatcctggcttcacatcccatggtcctggtagaatgggatggggaatagacaagtcacctatttagaggatatttgggatcctgctctgtggatgtgtggttaggaggtggggtgagtaggaaggaggccagagcaagcaactgggccctaatgagccaggtatctccctagcccccaaccgttatcctctctgcttcagggccttcacgatctctttctccactgtcacttcttgtggggggatctgcgcaaaggttgggaatggagacggggaagcccaaccagctgttttccacctggccctgccacaccagagagcaaaggggccctgcaagtgcaggctgggtgtcaggagtcaatcctggagtccaggtgacagcaaaacaggggccagttaacctgcagacagaggtccagctggcccactgggtccccataaccccagccttaccctgagaaaactgagcccgacatgtgtaaaaagatatggctggggggaaggcaggacaagttattttgtgaggttagaggggaaggggccttgtgaaatcaaggtctggaaagggctgcccaggagaggaggcaactgagagttgaggctgacaccttagaggagaagatgaccatatggttctccaagaaccaggcatgaatctgtatggcacttgccagttgcttggtttaaggctaaagagacagaccccttcccctcttccaggactccctgtgccctcctccccatccccagttcttctctccaccttctcctcccgaaaagatgcatccagccctacccctccccagtgcccagcacatcccctcccccatctagtgatccccagtccttagaccgagcacaccagctcctgtgaatatcctgtctccctcactggctcgtattgactggcatcttagtcttccaccaaactagtcagttcttcccatagtctaacctccattccttcagttacagcagctcgttttcagtatcctgccaatagtgaaattagaaaccaaccctatctgtaaacaagccaccccaccaaaggagtttctctctccctccccaggcattttccccttgcaggcctttcacctactttaccatcccctaatttagcaagcagaaagagaactcgatttcacaagcaggattggctccccaccatcgttattccttttgtcgagtcccagatggtcctctctccccaagccctccacccactcccacaggcacttcgagagaaacgcgccctccggagaccctctgaagtcttcagtttcctctccctggcactgagggaacacaggacgggtgtgcagacttcgtatttccctccaagtttttacctccgcctagtgttttccttgcaaaggaaagtccctctcgaagtctaaccttaatccctcctgctgcatgcctaaatcccctttccatcttttctctataatacaaccccctttaaaatcataaatgcaatcttcctctcgcgtttagtctcctctcctgcagcgcccctctactttcctagccccaacaacctgctccggctaggagaagttcttcctagccactccccaccccaacgccctgcccaaaactccgaggacactgaggtatctgcctgagctgtccactacgacggctcccgggccacgcccggactcggcggcccgcggggcggtgacccccgcagccgccggtgcagccacgacggggttaaggttccgggctgggggagggggagggggccgggaggggcgggtgcggagccaatcggcggcggcagagtccccggagccgcgagctgggagcgctgtgccgggagccgggagccgagcgcgccgggctggggccggggccggagcggagcggagagggagcgcgcccgccccagccccgagtcccgccgccttccctcccgccgcagcgcgggcccaccggccgccgccccagccatggagcaagacaaca

SEQ ID NO: 9713 - DNA, 2300 bp, Homo sapien
atgaaaagataaagatatcaacaatgcatcatggaaccacagaggtgagtgactaaccaagggaggagggatggtgagaaggttgtgttcactccagggaggagatgacatctgatctggatcatgctgtgggaacatagcagacagatggagaggaaagagattcctgacagagcaacggcatgaacccaagtataacactccaggagtagggaataattcacaggggtaggaaatgaggctgtgaaggtggaagaccaaggagtttggactttgatcacatggtgatggatagtggttaaagacttttgagtacagaagtggcatgaactttgtgggatccctccagcattagcatgaagaatggactgtagtggagacagactggaagccagaagagcagtgaaaaactaaaatagcctagtctggagatgatgagagcctcaacatgtgaattatgtatattaggaaataagcttgcagtgctgaaaccctaccctcatagacttgctgtgaatgccctcatctgcccccgtcctgttcccaagtgccctgggctatgggaggagaggttgctggtgagagggggagtcagggaggaaggggtgcttggaggcagcccaagacaaacttccttcactgcaccaccttgcctaaggagagagctttgctggaacaattggaggacaactgccagccccttagggctctcccgggcaaaggcctcacactggctagcacagccaactgtggtctctaggcgttaccttacctactcacatgcccagcaagccatgccccctgctgaggataagagactcagtgttagggtacagcagccttctccttcttggagaggtttcagagagaatatcaaacttccagctggaggaggaaacaagatcaactagatcagttcctaggcccacgaccaagacccaggccctacgcacaaccctcatctgctctccagatgcctctctgggcatcccgctgctccatcttgtccaattttagagccactagaccccagatgtagagttagactgacctgggttcaaatccacccatatatgtggccttatgcaagtaatctcacctctatgaacatcagtttttttttccttggtaaataacacatacctcccaaaccatcacgaattaaatgagatatcccataggaacaaactcaggacactacctggcatatagtcagaatttctgtaactgcctcactccttcattcctgaactgatggggagttttatctgcaccctagagcaggggttcccaacccccaggtcacggactggtactagtctgtggcctcttaggaaccgggccacacagcaggaggtgagcaacagccaagtgagcattaccaccatgatgtgcctcctgtcagctcagtagcagcattagattctcacaggagtgcgaaccctattgtgaactgcacatgcaagggatctaggttgcacgctaatctaactagtgcctgatgatctgaggtgaaacagtttcatcctgaaactatccccatcctccccctggctgtggaaaaattgtcttccatgaaactggtccctggtgctaaaaaggatggggaccgctgccctagaggacagcctgaccgttccttgattcattcactccactaatatttcctagaactctactatgtgccacatacctgctaggtactggaaaaacaatggcaagcaaaacagatataatcccagccattttggaagtttcattcttctggaggagatagatgttaattaaatgatcatactaatgaaagtaaaattacacagtaatgagtaccatgaaagagggaaactcacacccatgtccttattccatggacttctgggggtaaaagctggagccgacacaccttcagcatggtccgagccagggggaaggctgggggccttactttccagttaaccggtttcccagaaactccagttcccaaaaacaaacctattcagaatgggaaactcaggaggggaaacctagtatgttcccaggtccagtttccccagagtccatccctaccccaaaataaataaagcccctgccaggctgcctcttcagcaactctaagcagcctcccccaggaaaaactgatcctgctacagctccaccatgaagttcttcatggtcctgctgccagccagcctagccgccacctctctcgccatccttgatgttgaatctggcctccttccacaactctcagtcccctaagggttattgagctgtcagctggagagacctcagcactagaa

SEQ ID NO: 9714 - DNA, 2300 bp, Homo sapien
taaacctgaggcagaggggagagaggtacaacgagcagcccatgagacaagacacagatcagcgaactgacagtcatcatggaggtcagataacctagaaaacaagacatcacacagagcagcccctcacccatatccatgaggtccgtcaagacattgcacagagcagcctctcacccatatccatgaggtctgcctctttaatctatgcacccaattctttcccaggctctataatttggggtaacatttctctgggccctgttatagaataatgaaaattttctataaaacaaatgtccttactttcacctcatccctatttatgtaaatgcttgcctctttaattactgaggccaggaggaagatttgggagaggaaagggctatgcggtgacatttggaaagaccctgctctgtgacagttctagtgttgacgccaaagttctcatttcctcttagaaaagtcttgtgcaaatagcataatttgctcctgttgacttttttaatgtgctcatggagactgctcgggatctagatctgtttgggatctgcaggacttctccttctgcagtgtacacacacgtgcacacacgtatgtgcacatacccagggcactggtgccatcaaaactttctcttgttcttcagccttccccattccaggtaaggccaccaccaccttcaaggctcccaggcccagaccctcaggcaggtagcaattgccaaggctttaatgtcccaccccattaattttatcttcctttatctcctgaaaagattaatgttctaaaccctggcacccaaaacaccctcatgttgaaaactcttcaatacccccttctcacactcatcttcagagctaccatgaggcagagaagcctccggaatcagcccacatggggctgggtgaatgccaacaccaagcaaggggaaagtcacaaattgacatccagcaccttattctccacccttcagcccctcaactgactcctgctccacggcccgttctattaatatctagcatttagcaccagcctggacaaaaacctacttggaaagatggtacaagaaccccacacaactccatagaacttcgctgtctaaaaaaatgctttgccgtatattatcccacttaatctccaccactatgctgtacataggagccacaactcctagacaacaaataaaaatcctatcacttttcaaatcctaacattttcatatgacaaagccagaactcaaaatccagacctctagagtcccagatcaggaaaggaagaaacgccaagtcaaagagaagcttctttagaataatctgcttttctggattattcacaccatgggtcagctccccacttgaagtcagaaccaagctccaatttcagtgaaccaccatcatgctttgaccaggagattctctcagaaatgtggggtcccattgagtaggcctgaagacagagattgacaggcctatgtgagcctggaggagttctttttaggggctggataatgtcaagaacagagaacaactccagagaaggcacacacgccttcaaacccatcccctcatggggagaaagcagccaggaactcaggcctcaagtgttctaggtgtggtctcccaaggaaacgggctcacttagtttggggaaaccttcaaaccctgcactgagtcctatgtagactgggacagaaggtggacaatgtaatcccctgagccctcaacctcctcctggagagatgacaagattaagatttctctaccagaaccctcaacagacacatcccagaatctccccaagtgaaatgtgctctacctaccgtccctgagagcccaggggtgtgaacccagagggcaggtgtggtggggaagggaggagggagaaagaaaagggatggctgggagttagagaaaggctcctatccaggacctgcctgcaaggatcccaggtatcagccagcccaacctagcccttgttgacttagcaggtgacagtttggggaagaaggggaggaggatgcggaagtcacacctctccaggcttggttcccattggcccttgatatccttaaaagggcccagcaatttcagcatccttattccccagaccttctgcagattctgtggttatactcactcctcatcccaaagaatgaaatttaccactctcctcttcttggcagctgtagcaggggccctggtctatgctggtgagtatggcctttcctctgcgccccacaagagtcctcccagtccaaggagcccctcactcctgccttcacccctctcctcctctct

SEQ ID NO: 9715 - DNA, 2300 bp, Homo sapien
gtcagagcccaccgagatcagataagataaaggctgaaaagtggcgactgtatccgagtaccttggcaaggatgtatctcggttccagggatggtggtgcaaacattacagggtgataagaacataaagcaaaacacggatgttgaggccaaaaaaaaaatggagttgttttcaaaaagcttggttgcagaaggattggaaagaagctagatagggagagtataaagggaacattttgcttatttttaagatgtctgtatgttgaaggaaaaaagccaagaaagtctcacaatgaaccacacaacaggagagatggtgagagctcagatggactgagttcccatggaggtgagaggtagacatccagagaacagggaagagccccagaaagttgacccagaaagtggatctgagctattcctgttcgaatttcacaagtaccctgggtcacactgtggagatgagagtcagagagattatgtgacatgccaaaatcattcagcctctaagtggtggagcacaactttgcttcaatcccataggctaggaagagcatgctttgtctaccaggacagagtcccctgctaccatcaattgtcccttcatctgtctgagatccttgcctactgtgtatcccctcaaggcaagaccacagtctactcatctttatctgtctgggtccaacacggtgtctggcacagacagagcacctcaggaaacaaatctcagtccattttcaccaaggtcccaggaacagggcaagggcaggctccactccgtggagagaagacatctcaaggaagtaactggctttgtgaggagcagaaactaaggttccaagttatcctcagctccccagcttgggtctggaatagatggaggagggagctgaccagttttgacacatgtattcctcacacgaaacctgtaggattaaaatgatcatttctcaccatcaaatgcaaaacagctgaagtggaacacaagagctggagtcaataatactgtattgaatttgggatttttgctggaagagcagattttgggtgctcttacacatacacacacacacacacacacacatacagagagacacacacacaaaaggctaattatgtaaaatcatggatgtgttcatttgcttgattatagtaaccatttcactaaatacatgtatatcaaaacttcatgttacaccttaaatattaccataaaataaaagaagaaagaaaaacaattgaagtggggcaggtaaattgcctctctgaaggccacacagctagtaaacaacaaaatcgagtcataaacccacatctccaggactttctgccatttcgaagaaaacacaagtccgcaggaagggattctgaggcagagagaagcacctttggattctccacttctctggattatccacaccactggcctccctcccctatatgaagggcaaactgggaactgacttcatattctggttaacttaccaggagaattttctggggtagaggatcattagctgggactgaagacaccctggtcagggcctactgaggctgggaagctctggttaccacatggagacccctagagaggacatcagcctctctggaccttagtcaggtgggatccccaaatgctgtgagggcagccccctagggtgggcttaacccactcaagggaagcctcagccacccccactctctcctaaggaggctggatctgacatcttgggccccccttctgtttccaggtggaaggagagccttctgggcacagccctcctgccagggccctctccagaaacctctcacagtcttccccaggaccccagatgcaatcagagatgggagcccagggacaagcgagatgggaaggggagaggcaggaaaaggatgccagtcaggacagtgccaactccagagctgctgtccaggacctacctgcagggaaggcgggcaccagccagccccagccagcctttgttgacttaacaggtggctctgaggtgggagaagaggaggaggagaacacaccactggaagactggttcccattggtccctgtcatgcttaaaaaaaggcccagagaggcagtcttgacaccctagatcccaagatctccaaggatttggtggcatacccactccagcacacagaagcatgaggttcatgactctcctcttcctgacagctctggcaggagccctggtctgtgcctgtgagtatggctcttccccgacacccaaccatatagtcccctgaagactgggccctgccttcatttccccttcccctcctcgc

SEQ ID NO: 9716 - DNA, 2300 bp, Homo sapien
gaaatctggctagccatatgtagaaagctgaaactggatcccttccttacaccttatacaaaaattcattcaagatgaaaaactactcatatatcaaactttagaaattctttgtatcacacttttcctgtttaatccactgtgcagttttgatctcttaaggggaccctaactgatacatatgtttaatctttttttcttagcaagccagtcattgtcttaagtctgtgtggtgggtctctgcctctgtggagggacacagtgggctctcaataagtaaccgtctcctagaagacccttcaatttgtgtcagtgttgttgggaggccttacaaaggtgactgtagggcttattccctacggggtataatcagatagtatctgtcttttaagtcttccttccttctttatctcttttaaatatttctctttcacttttccttcagaatatgtgtttttttcttagcgttatttatgctaatctctcaccatattatgacaactctgtgcctcatggaagatatgagtttacccaggacaaggacactgacttgtctttccgaggttgaagaccactccctcaagaatttcctctgcctttcttcattcacctgatggggacctcttagcatgttttggggagtagactggttgctgttatcagacagactctccaataaaaggagaaatagatgttcagtgctcttccagattacagagatccttccaatgagggtatgacccaaaaaggcatactttgtatgaagaagaagaactttaaagcaagggaaatctttaaaatgtagagaattccctatgattctgggtattccaaatgttcatcacccctctttgaggcctcagttgggtccagcacttgattgtgctgtaaatgtggattgttttcctcccttgctgtctttacttagcagcttggctccattatgacaaagggcaagtagattgatggaacttggggcagtgctgggccctactcaacaactgcagagaagtctggatgaccatattctacatgcactcaccattgctttccttcagactgaccatttcctttccgttgcattatccaaatataccacgttgttgattcctcagctccttaagagtctgttcaaatatcacctattcagtaatgccttttttggtcaccttatataaaattgctccccattttccatctctaaactctcctttcttctttcctgccttctttttttattaggccttatcacctcacacataatacattgtgttttctctttctttacttttttagtgtatgaattcctgcaaaaccatgtattaaataaaatttttgtgtgctttgttcgctgttatttttctaacatctagcattgtgtctggcatacaataatgctcaatgaatgttttttgaatgaaaaaattgattaaatggatgcatgaattaacaaatgttagtttattctgtatacttactccttgattttgaatttttatacaatggttgctaaatccagtaaggtcatagttcgttctttagatcattcagtgttggactcactctgcaccagtgtcagatgacctaattacatgttcaggagggaggccatgactcgaagaatgcacagcctgagttacaccggatggtctttggatcaggctgctctaccctgattattcccctagggggagacagaggtctaagcactctgtaagtgtatgactcctagaatctatgaaaagagcactgcagatttcaggaaggctggttatggggcatctccaacctgtcataggagctggtaattatggagacactataccctacatgtaagaggatgcctggaagagaagttgcctggagcatatttaacatgagagactcgaattgaaacctgtttagccagaaccaatgatttgaattcacaacctttccaaagggcccctggctgtgttgttgattctccagtggtttgtgtcccaacgtttcctggcattacctaacctggattctggttgacagctcctgattggtgccctctgcatatatattgtcaggatgtggaatcctgaagtcagcgccttgccttctcttaggctttgaagcatttttgtctgtgctccctgatcttcaggtcaccaccatgaagttcttagcagtcctggtactcttgggagtttccatctttctggtctctgcccgtaagtaaagattcttacctgaacataagttttgtgggaatatacataaaatatctcctctaaagatgtgggcttatggttgcttagaatgtgctt

SEQ ID NO: 9717 - DNA, 2300 bp, Homo sapien
cttaagatgatgttgtttatggcagctcgaggaaatagggggataagacctggagagtttcagccccactcctatttgctcagtgtggtgggatgcaagtgtggccagctggggagaggcagcaggacagagtatgagccaatgaatattacattagcttcaagcttttttaagctctatttggacaattgaatgattcttcccctctgttcctctttgaatgtgtatctagtgccatcattgtgtctcttggaaaaatacatcaatatttggtaatgttacatgaaatatgaatcgacaggattagtaattgcattgatgagctgaggaataaattcatagttaggtagaagcacaagttgacaaattagaaagtcattatcctgaaggtgctggctgctaattgcttaaggcagtgtctctctgcttttaatcacagggtatttttttttttctgagagaaatcatatgtggactcctaatatataaaacaggaacataaaaaatcaagacaaaaactaaacaaacaaaacccagaattcctatagttggagtgacatcctggttgtgggaccttagaaaatctgttttacctttgagaccctaaattttttcatatgtcttgatgaggattaaaaaatgaagtgaattttataagttgtaaacttaaagatgttttagtcataatggaagattctggtagacaacattcttaaggattaaagaaaaaatgttttctaatacagcatttcgattaccctgagaaatagagattctttaagtcagaagagttttcttaatgtccattaaatcatgatgtttgaagctttcaaactttctggcttgaaagacttatcccggtatttagagttttcagagcattccttttttgcaggagagacagaaaatgagctaggcatgtcctccctgcttttgaatggtcagagagaccaagctcctttgggcagacacaggaaaattcagggggcaaccctgagcatcatgatggtttctgagcatatgatgagggagtatcactgtttttcaactcttaggacggcattactgttacgggaggccctgaagtctgagccagggccatggaggcctctgtgctgagccccacatcctgggagaaacggcgggcctggctccgtcagagccgtaactggcagacccaggtcctagaagaggaggctgccgccgccctgcaggatgtcccagatcctgagccttccagcctggatgacgttttccaagaaggtaagagacgaacatcagacaggcgtctatgttgtctggcggcaaaaggtgacagcaggcccaggtctgcagagtgtgaacaggttccttgtttagccaggccctcagggaggactgttttgactggtttaaatatgtttaggagaaaagctaaagtaatacgaaatatgaattatgtgagaaagagacaggcataagattaggaaaaagggaagggcacatttttgcatcatcctgagaagcttctgtaagaacctgaggctgggggctctctatgaatgctttggggtgtttctattttgtctgtgtaacaagaccacacccaagctggatgcctggactctggccacaatgctgtcactaacaagctgtgtggcctttgggaagtcactcacctctctaagacttatttgtccaattgaagtagtagtacctttcctacacttctcagagcttctttgaggttcagatgagaccacagtcataagagtaaaacaaaaattctgatggaaataaatgcttatttggtaggaagcaaaaagcacaaaaacaagattgtctttctttttctttttctttttaaatgagaaggatccacccttgtgggaaaggaactctcaaaagacagcagtgggcctgacatcttgggcactttccaggttcttgggaggaagggagaaaagaagcagagagagagaagaaatatctactatttttatatacggtgtattcctctcatatcttaaagaaaagctttatgtagaaaaaaagattcatgacgcagcttatgtaagaataaacttgtggaatggaattagttgcagggaggaggtctgatttcgttcagttctcacagtgatctagtgtctgacttttctagggaatccaatcaataaaattgaagactggctgcaggattgcgggtaagtgctggacaggcaatggggtggtatgtggctgatggttgaatttgctaacagacacaactcctggaaactcagagacgggaagatggatttgatttgggcctaaagatt

SEQ ID NO: 9718 - DNA, 2300 bp, Homo sapien
catggacacatagagggaaacaacacacactggggcctatgggagggtagagggtggaaggagggagaggatcaaaacaaatacctattgggtactaggcttaatacctgggtgatgaaataatctgtacaacaaacccctatgacaggagtttacctatgtaacaaacttgcacatgtaccactgaacttaaaataaaagttaaaagaaactattatatttcaagagtcttaaaaatagctgcaatttcttgagcatttgctgtaaggtaggcgctggactgaatactctgtattcctttattcttatagctctacaaccactcctgtaaggttatccccatttagcagctaacaaactgagacctagagatgttaacgtatccaagactacagagctacttgatgccagagcttcactctaaagcctgctctcctaaccatcaaactatcaatgttaacaaaatgttgacatttgggccaggacaattattccttatactgaagagtcccatcccttcaaaagcacttatcatcattggccctcaggtactaaataccagtatcagcttcccatttctttgaaaattaaatctctctcacatatttccaaactccctaccgaagttatattctccatttcccaaacatattggaaaacaactgttaaggaaaacattgaattctagaaacttaggatttaaaagagttgttaagtttccattagttcagcttttatagttaatttgtacggaaaagaatagtaaataaagagaattagggcgtgttggatttagcattttacttgttgactgtgaagctaattctcagagaagcacatatttagcatctactatgtcctgagaaaatatgttagatattttcatgcctacgtaaaaggaatagcgtgggagaagggttgagtgagaaacagagagaattgttattttcctcacattatacttgaagaaaataatgttttgagaacttaatttgccaagcaagaattttatttaggattatttctaccatattatagctatactatggatactcaatggagttgtcccattgatgattggaaatggaatttagaaacatggtaaaaaaaaaatctaactatacctatagccaaaaaatcagaaagaaggtaatgaacatgtgaaaatcagtcacaattaacacattagaggagtgccttgtagaataaatattgtgatatacattcataaataaatgatttaaagaaggaaacagtagaatcaggagagagacagaaagaagatatccaaaatgcagcagcatcctacggagaagagtgttcagagatactggagaagcgaggagggatagttagcagtgctggatgctcccggtgggtgaaagtgattgaggcctgggagaaaccttttagagttcaacaagccttttccaaactgaaaaccaataaactgaagacatcttcagggtgtaaccgattttaaaagttcagctttgaaaacgttggggaaagcagtcatttactacaaaaacaaaaactttgaagtggtttgaacataaaacaaagttaagaaactaacagaaaaaaaaagtagtcagtattcaaaaacaagcttcgggggaatttaccagagtatgaaagttatcaacacagagcgactggctcagagccctctcaagtgtgtgatacgactggaaacttcttctctgagataaacgccagatcatttatgagagagagctttcccattttcagacagctctcctgaggacagaaggatttatctgcagcagtggaattctagttatatggtaggaagactcctgcacacacctctttaaatggactgtacctttgccttaataggaaaagatctcctgtttttctggaaagacagaggcagctctggggcaggaaggtcttcctagttgtgagcaccgtgtctacggatggtttgtccttcgctcagtctcctgagccggagcaaaggatgtggctgggccaggaggcggggactgcatctacatgtgtggatgtgtgtgtgtgtggtgtgttctcatttccgcttccccttttgagcaggcaacagcagttgaatgagttcagggagaaaggcataatctacaacatgatactttctcacttgcttcacctctgtgcccacacctgtgaaggcctcggcccagcttcgacaactgctttgcctcaaactcagctttctaccagcagacaggtaagcacagcctttatctcagtttcaaggctgtactgatttagggtgatgctaggagaaagaagga

SEQ ID NO: 9719 - DNA, 2300 bp, Homo sapien
gggaggagaatgcatgcaaatgccttgtattctcctttcctagggcagtcaccaccccttttcctttgctgacagcacacacccctcctgccccttcctgccctctcaaagttgaacagccaactgtacaactgtcaatgagttgtgacgagggtgaccctgatgaaatagattcaacccatccctctgcaaaaagcagctcttaaagaaaatttggcattcacaactccctccccattcttcaggggtgtgcacgttcatgtacgcttgtgtatgtgtgtgtgtgcactcacatacacacacacacacgaatgtattttgaaggctaatcctattgtgtccagtcccttacatctgtcagagaaagcaaggaatcctgcagaatgttttatccccaccctcatctttgtctcaatatgttcacctttctgctaatctgctattactccctgcccctgaaaatttcacaggcatcagtgccatcaacttctaaatatccatggacagggctttgaagacacaaagcaggagatcaattcattcagtaagcgctcattgaacaatgattaagcacctctatcctagacataaattacctcatagataaatttcctgtggccgaggagtgaattctgatttgttttttagagatctgctattcccatcatgtgttgtttaattattctgaaaatgaagtttattttcctgagcagatatttttctggatagggatacaaataaagataagtaagagattaaagagctgctgaaaataaataacttcccatgaaaactgaaaaaagtgttaatttttattttcttgttttctgtgaaaaacaagagtcatatgacacatatcagaattaaaaataactattttcaaacttaagatactcttttcaactttatgagcagtgaaactatcttttgtttcagccctctacagttttccttgcacacaggcatattaatagtttttcatttctgtttgacgcatgtgctagttatgttgttagaccacgcgattctcaaaaagctggggatactctggtttcttttcagattgtataaatgttttgccttttgccaaaacgcctgaggaattatccttcaagtcaatttctaaaagaagttgaacttggattcgtaactctatcaggctactgatggaaaaactcattttacagatatgaaaactgatgcccagagtgaagttgacttattcaagatcattcagccaattgcttaatctgagcacctttctttttccttcttggaaacacaagatgattagaaaatctttggtatcttaagttcacaatcatttatttttccttggtgtagttttaaataagatagtatgaatatctatatacttaaattattccagatgtagttttctttctgtcttctagcaatttaattcaacctcctaataccaaaggagttttaggaattattatgagccttctcttcttctaagcttattactactcaggtggactttttctacgtgaatgcttaatgatgtatttttgaaaaacaatagtagatctcagtttgtaactcaaggaactaactgcccttaaaatgaaggattttattaatttcctttttgtttttataaatttaaagtgatcagaaagttgaaagaatagcacaacaaatatagcttcacctaaattcacaaattaaaagttttaatgagagtagctttgacgtgctgaaaaggtgggagagacatacttcttccttctacttttagaacgctgaagtttataagccaaagaccccagtccacatgtgtaaggaagcagccactgatgctgtgtccttgacacgcatctttctcaccttttgattcttttcagacgtgggtcagcagcgtcatctgccctttttagctctctctccaagtctatccccaattttctttctccattctgtccacactactccgctcccatttcttatctttttaatcacaaaggtttccagtcctctttttctttactccttaacttcagcaactctcctcccctgctccccttccaccaacccccatctctatttaaacaaacaaacgggcggcaaaactggacctggccggaggagcctttcaagtgggcgtgtctttcggctggggaaaagggaggagttagactctgggcaacatcactcctccctggtcagctgggagagcaatcaaaactgcagcaagtcagaggctccggccagagagcaggagctgcccagaggcttgtggtcctgaaagctcctctccggggagctaaccaggg

SEQ ID NO: 9720 - DNA, 2300 bp, Homo sapien
gctactcaggaggctgaggcaggagaatcacttgaacctgggaggtggaggttgcaatgagccaagatcaaacaactgcactccagcctgggccacagagtgagactctgcctgagaagagaagagaagagaaattaatctatactgacagagagcagatcagcggttacctgaagatggggatgaaagaggggcgaatggattacaaagaaacacaaggaaactgatatagtttggatgtttgtcccctccaaatctcatgttgaaatgtaatcctcaatgtcagaggtggggcctggtgggatgtgtttggctcctgaggtcccaacccctcatcagtggctcagtgccaaccccttggtgatgagtgagttctcgctctggcagttcacgcaaggtctctcttgctccctctcttgccatgtgatacactgctccccttcgtcttccaccatgattgtaagctccctgagaccctcaccagaggccaagcagatactggtgccatgcttcctgtgcagtctgcagaactatgaaccaattaaactttttttctttataaatcaaccagccttaggtatttcttaacagcaatgcaaaagcctaacacatagacatgttcattatctcgactgtggtaatggtttcccaggtatatactgtgtcaaaaataatctatatactgtaaatatgtaaaccttcttatatatattatacctcaaagaaactgtaaataaataaatagggtattaggttacaaatcagtgaataaaataggaatctatgcatcaataataatatgaacacataaaagacacataaaaccaaatattgctggtggacgtgtaaatgggtacaatcactttggaaacccatttgctattatctactaaatccaatacattgttaagaagggggggaagcaaggtatacaagagtgtgtacaatatactactatttgtaaaagaaaagggaatatgtatatgtatatatgtacatggatctaaacacgtggtgtgtgtgttccctgctcgttcacaggtcatctctggaaggattcacaagaaattggcaatatggcatttagtgcctccagagaggagatctgagtggttgggtcacaggagtagaagagagaattttccctgtaatctctttagtatctttttaattttgtactaagtgaatgtactgcctcttccaaaaaaagttgtttaataatgttttgtaaaaagaattcttctcagccaggcgcagtggctcccaactgtaatcccagcactttgggaagtcgaggtgggtggatcacctgagcccaggagttcaagaccaacctgggcaacagggtgaaaccctgtctctacaaattacagaaaaaaaaaaattgctgggcatggtggtatgcacttgtagtcccagaaaatcaggaggctggtgtaagaggatcacttgagcctagggacattgaggttgcagtgagcccagactgctgccactgcaccccagcctgggcagcagagaccctgtctcaaaaaaaggaaagaaggaaagaagggaggaagggagggagggagggaaggatctctaaaaagtggctattctctgacctcacttccccctatttgtccaacttaccccattccccacagaactaaacttctcaccctttccaggagagggcatgctgtctctgtcctgtacacctactttttcctctgccaagagcacccttcccttcctatggcccctctgaagtgcctgacctgaggacgaaatgaggccaggatatgtcccatgagtcaactctgtccccagcattcaccactaccaacccacccccaacgccctgccagcccccgacactcccccgccatgagtctgtcatctgaaacatatccccttaccccttcccactccctctgagatgactcagcagcccctgccccccttcagctgggcacagtgccccagaactcaggaacatgggtaccacctgtccctccgcccacataaaagtcattgaagagcttgtggggctgtgggacctgcgccctctggaggaattccatacacccactcaactctggcaaataggaaattgtcaagtaggagacaaggagcaaagtcctatcacagcgggaggggacgccagcgcctgcagaggctgagcagggaaaaagccagtgccccagcggaagcacagctcagagctggtctgccatggacatcctggtcccactcctgcagctgctggtgctgcttcttaccctgcccctgcacctcatggctctgctgggctg

SEQ ID NO: 9721 - DNA, 2300 bp, Homo sapien
gagctggggggtgctgtgtatgtgtacttgaaccaggggggtcactgggctgggatctcccctctccggctctgcggctcccctgactccatgttcgggatcagcctggctgtcctgggggacctcaaccaagatggctttccaggtgtgacggggaactggaaaggctcagggagggaggggccacaggagggatggggaagcccctcagaggtcagggtgtggtcttctgaggactcagggagagagggtccctgagcttatgtctgagctgtaccatttaccagctttctgaccttggcaagttcctaacctttttgcgttagtaatatctgcagggagtggccaagaggattaaagatgatgtatgtagagtgcctgggattttgtagcctctcaataaaatagaaaacatacctgagtgactggggggagttgaggcctggatcttgtctgcaaggcccccagccagcgtgactgccttttccctgtgccctgcagatattgcagtgggtgccccctttgatggtgatgggaaagtcttcatctaccatgggagcagcctgggggttgtcgccaaaccttcacaggtgaggggagtcgctgggatgagggaatgggtgtgggtggaatcagcagaggcatcaggggaggcagaggcctgcgggaggtgggattgagggaggctgacagctggttctctaggtgctggagggcgaggctgtgggcatcaagagcttcggctactccctgtcaggcagcttggatatggatgggaaccaataccctgacctgctggtgggctccctggctgacaccgcagtgctcttcaggtgagcccctctcaaccttttccctccctgaggccgtcagcccctccctgtgactctgaccccgacctcagtgccaaatctaatgctgaagagtgtttcccagcctcatgttctcatgtttcttgtgctcttgactccccaatcccagggccagacccatcctccatgtctcccatgaggtctctattgctccacgaagcatcgacctggagcagcccaactgtgctggcggccactcggtctggtgaggtgggatcgggtggcacctggaccctggcagcttcccctgccctccctttgatcctttatctccccagtttggggctggggctgtgacaggatgtgacagatggggtgggggtaggggccttggcccatcagcctcgtttggctcaggagccacctttgcccccgcagtgtggacctaagggtctgtttcagctacattgcagtccccagcagctatagccctactgtgggtgagtgcggtcccccctctgtggctcgcccttttgggtttcccagggaggggggtcacttcgaggtggtagaagagcacccttggaatggggtgagctggagcagctctgcagctcagcagctcctcctttcccaacatgccacagccctggactatgtgttagatgcggacacagaccggaggctccggggccaggttccccgtgtgacgttcctgagccgtaacctggaagaacccaagcaccaggcctcgggcaccgtgtggctgaagcaccagcatgaccgagtctgtggagacgccatgttccagctccaggtggacactgaccccttggcttctgagggtcattttcatggctccatctcttttccctgattcctcttagctgctttttcccgagcacactcgtgcctccttctaagacctagacacgtgggaaacctgtcttctgagctcacttcctcctcatctgctgccctctcctgtcatttctgcactccctggaggaggaggaggtgcaaggggcttcatgtcccctcttccagctgaatggaggaggtggcagcttttatcatcacatctggtcctcaaagccctaaaggtttcccctgtcccctaccccagtctttctccctcctccttgctcagttctccacctctctcattcatctccctaatattctttccaagttttagaattggtcctaggtctggctggggcactgagcagggctgaggcctggggattgttccagtgaggaatagaccttcctcttcctaggaaaatgtcaaagacaagcttcgggccattgtagtgaccttgtcctacagtctccagacccctcggctccggcgacaggctcctggccaggggctgcctccagtggcccccatcctcaatgcccaccagcccagcacccagcgggcagaggtgagcatgggttctggtttagcccagggggaggagctgggagggcaaagatcat

SEQ ID NO: 9722 - DNA, 2300 bp, Homo sapien
acacattctgacactccctatggggcaagcacaaagatgaaaagacagccccgacactcagagagatggccacttctatgtttggaggctgggggtactgctgacttgcctgaaggttgccatttatttatgcagggctgtatcaccccgtttccttttctgcccagggtaccctcatctccccactctctccttccctttctggggtggtctcagtgttctagagacaggtcagtcactgggtggagtgacaaagtgttggagttaggcccatgtggatttgaattccagcatcactgcttaatgtctttgagtgagttttctcatctgaaagacaagaaaagaatccttatctcataggattgttctgatgattaaatgacataatgcatgtgacttgcctatcctggtgcttggcacatatgtggacagtgatgaatgttagtttcttatatccctggtgtctagcctcggatctgacgtcatagtaggtgctgaataaatatgatttccttgtctcaccagcgcctgacacagggcttggcatacaatagactctcaataagtagttgaatgccaaatgtgtcttctcttctctactactccctataccccttctctgtcttgacactggctctgacaagggatggcagctgctaagagatgaggaggagttgtgggaaggaagaatggctctctgccctccccctccaccccatcagagctggcacagtgccccacagatgcctgtctgtaatactgcctaacatggttttgggccttgccccccaggaagggagatggaggagaagagtgtgggagagaggcgttgaggtttgtcccactgccacttctgagtctctccttctgcaaagagaggacccatggagccagctgggtgtcagtcatcttacctcacccccgccttcactctggcttgggggttcagccccaggggacccaggcagcctccattcccagcactgtgctcccctggggaagacggcttggctgtgatcatggaaaattgtcctgccaagaaagttgtagctgggaaagaggctgagggggaggcaggagagaagactgggtgggggtggaagggaaggagaaatcatggacatggggagaaggaaggatggggaaggggattcaggatgtcgggaagagaatggggtagcattggaggcagaaggagaaacttgtccctacctccatgccagccagagtgactgatggaatcctgggctggcacagcttctgggaggtggggtctttgctgggtccctgatgagggggcagtgggtccgtatctagcctcttgcctggcctctgaagctggtccctgagccacactctgatgccagtctggggccctgttacttttgctcccagcattcttggcatttctggctgggtttcaactggactgggttggggagcagggcagagcttggggatggggccaaggaggggatagggaaggcctactcaggaacaggtgctgggaacaggcagttctttcaaaccagcactgttggcctggctgcttgggttggcgtgtatgtgtgtgtgtgtgtgtgtgtgtgtatctactgtgtatgttgatcccttatccagatagtatgtacatgcaacgtgatgactgcatgaccaagcatattaatttgtccttgccagggtttgagaaaactgacatttgccccttctctttagtccttgaacactctctttagtactgaggggttgggcctgggcagctctaatgagattgggtcattctgacctctaactcctgtccctgtccctgcccctgccccatcttgcaggctgctggtgggtgctccccaggccctggctcttcctgggcagcaggcgaatcgcactggaggcctcttcgcttgcccgttgagcctggaggagactgactgctacagagtggacatcgaccagggaggtgtggccctgcatgaacagagtgggggaagcgtgtgagcggggaggagaggacttgggctcctcttccctcccctaattcccagtgtcctgcctctagctgatatgcaaaaggaaagcaaggagaaccagtggttgggagtcagtgttcggagccaggggcctgggggcaagattgttgtgagtattgcttctcatgactgaatgcacggatggggtgtgtgtgtgtgtgtgtttatggtgtgtgcatacgcataggtgtgcttagagaacacaagttaggaatatggtatgattccaagtacatcagggagatataaaaaggtgtgagacatggtccttgt

SEQ ID NO: 9723 - DNA, 2300 bp, Homo sapien
aaatctacatgtctaaatttactaggctggtctagcacgctcttgtgtgttcccctccctcctttgcccctctatttatagccaggctaattttgggtggcctctctctctcttctttcctgatctttcctcctgtggtggtgaggtgacttctcaaatatttggagagaggaggtcagaagcagattcttggcatctgatttcagccctggatcacagaagccagtggagtgggaatggagacaggcagaagctgcaggtgcagataggaggcagcttgggctctaaaggcattttgagctgggtcgggggcggggggacctgggcagggagtcagtagtcccagttctgtcctaattttgcaattctgcattcccatgtcagctcttctctactgtctggggctctgagatattaaaaaggatggggagggcatggtgaaagtagaatcctggtgccagccctgctgacagcatatgtatttccttatagtacctgtttagagatgtgttagtgctctggaggggatagccacaggtgtagtattggaaaacagagggccagacttccaaatgtctgttaacttatccaaggcaaagactgtcccagggcagcagagtaagaacccactttttttttgttttcaaagaagtataatcctgaacaatgaagtaggaaagacagaacacaggaagaggaaggaggtaggacacttattggaacttttaagaaagggaaagagaagaaagaatcgtaagaatatgatagtgtttgaagggcagagacaacactagaaacattgagaaatactctgagaaagattccaagtgtggcagagacaagaatgatgacaaaatagaatttgggatgagacaaaatcagatagtgagagagagaagggaagatggacagatgtatattcacaagaccaacaccagtaagcaaggggagtaggaaggggaagtgggagcattcgaggttcccattatgccaaattatttcctgtctctccttctggccccatttctgtatcggagttataaatagcagagagttggaaagtgtccccccacccccttgcctctgtcccagcctgagggaaagggagaggaagagggacaggccaatgggtccctgtggagatcccatctcagccccacccaggtcctgctgagccagtccaggactctgccccctcccatcccctttcatggataggaaatgtgcagtcctgggacgggtctggtagctggggacaccctttacatccctctgcctcttgggtccagtctctttcatctttgccttctttgacacccactcccctccccactgcttaatttcctcttcctgtaatcatccccagtcgttttcttttctcccttcattccatcccttgtcaattaatctcttgcccttctttcttcctctctattcctttcctttttccatttctccatttgctccccgtatctcccgagtttctctctctcttcttgcctctttttctctgttcccttgaatcctgacgatgtggctagcactgctgtggtcattgccgggctgggggcgggggatgggataggatgggggagggcagcggtctgatcccaacagcagaaagagtgctctatgtgaccatgggggaacagggagcactaagatgccacgctgcacccaggcccaggacggctcccctttcatttcctctctatctgcacatctctcttcccaggttgtcttttagcgtcttcccaacttctcatctcttaccctccttcctctgtttcagcccctctctttctatctgtacttctctccctccgcattccaaggcgccgcctccaccactcccggggtggggatggggttgggggagaaggggaggagagcgccgcgcaggggcggagccggagacggtgctgggcttggggggcgtggtggtggggggtcagcaaggctagtttccatcccagccaccagcctgggcatccccttggagacgggcttgggtctccacctgccgcgggagcgaggggcggggccggaggcggggcctgagtggcgtccccgggagaggaggcgggagccggagtgggcgccggagctgcggctgctgtagttgtcctagccggtgctggggcggcggggtggcggagcggcgggcgggcgggagggctggcggggcgaacgtctgggagacgtctgaaagaccaacgagactttggagaccagagacgcgcctggggggacctggggcttggggcgtgcgagatttcccttgcattcgctgggagctc

SEQ ID NO: 9724 - DNA, 2300 bp, Homo sapien
caagtaaatataatgacgtcaacttcaactatgccaatgaatcacaaaatgagagaatgccaaagctggaaatagttttagatatggtttagcccagtgagtttcaaccctggatacacattagaatcaccagaacagcttttaaaatatactgataaggccaggcacggtggctcacacctgtaatcccagcactttgggaggccgaggcgggcagattacctgaggtcaggagttcaagaccagtctaaccaacacggtgaaatgccatctctactaaaaatacaaaaattaggccgggcgcggtggctcacgcctgtaatcccagcactttgggaggccgaggcgggcggatcacgaggtcaggagatcgagaccatcccggctaaaacggtgaaaccccgtctctactaaaaatacaaaaaaaaaaaattagccgggcgtagtggcgggcgcctgtagtcccagctacttgggaggctgaggcaggagaatggcgtgaacccgggaggcggagcttgcagtgagccgagatcccgccactgcactccagcctgggcgacagagcgagactccgtctcaaaaaaaaaaatacaaaaattagtcaggtgtggtggcacatgcctgtaatcccagctactcaggaggctgaggcaggagaatcgcttgaacctgggaggtggaggttgcagtcagctgagatcatgccactgcactccagcctaggcgacagagcgagactctgtctcaaaaataataataattttatatatacatatatacatatacatacatatatacacatatatacgtatacatacatatatacacatatatacgtatacatacatatatacatacatatatatagtgatgtttggtcttcactccttagattctatttaattagtctggaatcaaggcttttttttttttttttttgagacagagtcccactctgtcgcccaggctggagttcagtggcgtgatctcggctcactgcaacctctgcctcccaggttcaagcgattctcctgcctcaggctcctgagtagctgggattacaggcttgtgccactacgcctggctaaattttgtatttttagtagatacaaggtttcaccatgttggtcagcctggtctcgaactcctgacctcgtgatccgcccgcctcggcctcccaaagtgctgggattacgggcgtgagccaccgcacccggctaatcacggcatttttataagccttgtgatttctgtgattctaatgtttagattctaatgcttagccagggttgagaaccaccgatttaatccaatcccttctcctagttttactaaagagaaaactataacctagaatggtgagcaacttgcccaaagtcacccaacatgttagtgcaaggtgcaccgagagagattgtaccagtagcaagaatatgctcatgatgtttataattgttctcgctggagttaatcccggaagcatttctttttagttcacagaggccttatataaattactttttactttggcacagcacttacgcttctgctaacactgaaatgggttcgcattcctgaccacaaaaggacagagatgaaattctacattcacacagcccgccaagttagccaagctccctaggaggctgtctgaagtgcctaaaatgcttctctacaatgatcacccagagctgagagacttcagtggggtagtgagaagaaagagggttgggagagacaggaaagcatcctctccttgagggaaggaactgggaatcaactgagaaccagctagcactgccaggaggtgaggagagggaaggagaataatttaaatgaggccagggagcttctgctccctcaattaaacggtgatagacggcctgacaccaccagccctcgaagcctgagatccacaggaaatgttaaaaactggcttggcaatataagtattagaaaatacttcttccaacactcaccaaaaactaagctcccaataaagaacacttcacctgccctccgcaaccctctacctctcttccccgccaagatcttcacccaaggtctcaagagggcggttcccaacctcacgtgacacagcggtcacgtgacatggccccggggagccgaggtgagcgttccagcttccggagccggagggggcccggcgtacccagcccccagcccgacgtgaccatgctgtcccgcctcctaaaagaacaccaggccaagcagaatgaacgcaaggagctgcagggtgagccaaatatcctgtcggccgttttctcttcggccgc

SEQ ID NO: 9725 - DNA, 2300 bp, Homo sapien
ggggtgggaagtgaaaaattcaacagccaataaaggagaacaattattgcaggggttggggagggcaaaaaacactggcagaaggttggggacaccaaccccatggtagtaatggtaaccacagcccataccttgattgaaaagaaaaactagtgcctaaggcagaagggagggagagcatgtgtgtgtgtgtgtgtgtgtgtgtttgtgtgtgttccttgatctgtgtgggcaaaagcgaaggcttgggagagcaactgagagccgagaagaaacccctgggataccctcttttgacccagggttcctggggagggggtttgtactcccatcctaacccggcttcagggaggggcccaatttccctctccaacttcttgcatagatccctaggcttccaatcactgccagatgtgttcctcctgctggattttcccagtttttccatgcccctttttccctcccagctttttcctcagggatatcaccccaggttttccctcccttcccccactcagctgcaggaactcctttttggggtttggagctggtatgtttctagtcagctccgagcttggctctcctgggaatcctgggagtgaaaggaaggagctgggtttatttgcatgtactggtagtcatttgcatcacatccaaaaatggccaaaattatgagccctgattcttggctgaactcccactgctgcaatggaatattagtcccggagaccacccccaactagctggagctgatctcctccctcctccaaccccccagtgtggcccaggcctacatgaaccagagaaagctggaccatgaggtgaagaccctacaggtccaggctgcccaatttgccaagcagacaggccagtggatcggaatggtggagaacttcaaccaggcactcaaggtgggccatactccctacctcaccaccccaatcctgggcccccattggctgcctccagtcaggttacctcaggtttaggttaaggaggaagtagggtggtcccagaaaccccatctatagccccagtgtcagaaaaggtagagaaagaaagaaaagcagttggtgggtccaagtaaagccttttccaggagatgaataaaacgtattccccagactggaagccatactctacccattctgattcctgggctcccacctcctctcccccttcccaggaaattggggatgtggagaactgggctcggagcatcgagctggacatgcgcaccattgccactgcactggaatatgtctacaaagggcagctgcagtctgccccttcctagcccctgttccctcccccaaccctatccctcctacctcacccgcagggggaaggagggaggctgacaagccttgaataaaacacaagcctccgtttctctgtggtgtgtttcagagagctactagctccagtgtcgggggtgggagtggaaggttcaaaggtggtttccctgagggacaggtaccttttggggagagggtggaactagcttcctcttactatcccaactctcttctcctccatggcccttgtgcaggtgtctgttaggcaagcagagggtgggagttcccatccctcctgagagaaggtcctagtagccctgccccaagcttcctaattcaggacttgtttcctacagaagagaaacaaggcaaggtacaggcctggtccccagctctggctttctgcctctccacgtgctcatggcctctcccaggctaactctaagcagtgtcatgagtctgagccaggtgggagattaattcctgggggcacttcagggctgagaagggggaggaatgacaggtccagtaaccgttaccaacagagcagtgcagctgccatccttgacagctccctcctccttggagaccatgacatagatggtcaggaacccaggctgagaaagacagccaaggggtggggggagcctaggcaaatctggcctctgccaagtcctggcttcagccaggcaagctccagcctccctggctcctcctcctcctcagtcctatccccaccctgtcacacatacacttaatacgcctggcatccaagtccacccactccggactttggccttagcagtagttagtgtgggaggctgggaagactgggagcagtctcttaaacaaaagcaaaagaataagcttcgggcgctgtagtacctgccagctttcgccacaggaggtaagtggatactgggagctgggggaactgagaagactagccagatattacatgtattgccaactcaaaactttcagcttttaacatgcttcctc

SEQ ID NO: 9726 - DNA, 2300 bp, Homo sapien
acgatctctgctcactgcaacctctgcctcctgggttcaagtgattctcctgcctcagcctcctgagtagctgggactacaggcacacatcattgtgcccagctactttttgtatttttagtagagacggggtttcaccgtgttggccaggctggtctcgaactcctgacctcaggtgatccacctgcctaggcctcccaaaatgctgggattacaggtgtggtgagccactgcgcctagcccctcctcttactttggggaacatcctactctgtctatggagcagctgttgtttcaccactttactttcttaataaacttgcttatactttgcactgcgactcgccctgaatctttcttgcatgagatccaagaaccctctcttgtggtctggattgggacccctttcctgtaacaaatgcattggctgataggagaataaagaaaaaaaaagaggaaaaactagagtaacttctctacataatcatattatatgaccgttttgttaaccatgataacagttaacaaaataattttcttatgtctaattctcagtccatgtctgtatgtcccaaaatgtctttcacagctggtttgttcaaccattcaatgaaggaccaaacattgcagttggttgttatgtatctagtctctcaatcttgatcttcagaccaccttcagcccatctcaccacatccgtcccaagccctttgagccagccaaccccaacctgccatgtactttacaaaatgctccttttttttccacagtcgactgcttctctgtccctggagctctcccctttattctccaaggtcaccttgagcacatccttctgctccgtgaaatccattctcctctccctttccctccctctgagcttaaccagctgccaccgcaggcttctgcctttcttcacagtgtggccagaactcggttctgcctgctagcagagggcagggccgctgtcttcctctccttgcagcccccaagcctagcacatgcctggcatctagtggcagcacaataaggaacctgatgaatactcctttcttctgctctccgctcctcctccacagcctgccagccatggtcaggaagagcaagatccggaatgggcttggtgtgtcccgcgggaaggccgtgatcctggaagatgcttctcagcccagcccggatctccttcctttagctctagagacttctttcattctttgtgtacacacatacactaagactcaggaagtggttcttgaggcaggaccttaagagcccaaggagtggggccgaggctggaggtgtgggggtgtgacggccggtcctactctccggcctgttcagatcagctccttctggggaccacccctggcacacaagggagggaggcagcttgatccccctagcccgcttccagccctcacctggctttgtcttctgggataagacggggaaatccagaggatgtaagcctctcctgccttcgtgtcttcccccaagccctcgctatcacagacggatgcaggagctgtctgggaggctggaagcacagaccttgtcaatcctcccccagagggcgggacccgacgcggacgtgtcttgattgactgggtagcgtggcttcggggaagggcttcctccccttttctcagactaggatccctggaaaatggagaagctgtgctaatagaggggggccagaaatccccactctagaatgctgtagaatgttgggagacacccaggatgtgagccagggactttctggaagtgtttgttctggccccacccgaccccaggcagtccccagctgtctgcacagtcggatggggagggggcttgcacagagttggagccagaggagagagctggctcatcccctacggtaggatggggaaacctcacagaccacattgtcacccggcctcagctctccgccccggcgctcagagggtaactctcacccacctcgtccgcttctctgaaccagagtgacccaggctgcgctccgccccgctctcctaccccgagttggcacggaggtatagcgccagaggggggccccaggcgccccgaggtcttgcccttgcggctttccctttgcgggggtgggcgccttcttccgggtaggggccacgtggccctggccgggcggggggctcggcccaccccgcgccgggcccagtgactcaggccgcagctgttaccgcgtcacatgagggaggccggcggccactcggcgggggaggggaccgtggctggagcccggggcggggccgcgcggcaggcggggcgggagccgg

SEQ ID NO: 9727 - DNA, 2300 bp, Homo sapien
aacttttgtagcagagcacatctctccatatatacaagcattataccgagggtgaatgtgttcctcctcttactttttttttttgagacagagttttgccgggcacagtggctcacgcctgtaatcccagcactttggaaggctgagggggcggatcacgaggtcaatagatggagaccatcctggccaatatggtgaaaccccatctctactaaaaacacaaaaattagctgggcgtagtggtgcgtgcctgtagtcccagctacttgggaggctgaggcaggagaatcacttgaacacgggaggcggaggttgcagtgagccaagatggcaccactgcactccaccctggtgacagagcgagactccgtctcaaaaaaaaaaaaaaaaaaaagagagacggagtttcactcttgttgcccaggatggcatgcagcaacacgatctctgctcactgcaacctctgcctcctgggttcaagtgattctcctgcctcagcctcctgagtagctgggactacaggcacacatcattgtgcccagctactttttgtatttttagtagagacggggtttcaccgtgttggccaggctggtctcgaactcctgacctcaggtgatccacctgcctaggcctcccaaaatgctgggattacaggtgtggtgagccactgcgcctagcccctcctcttactttggggaacatcctactctgtctatggagcagctgttgtttcaccactttactttcttaataaacttgcttatactttgcactgcgactcgccctgaatctttcttgcatgagatccaagaaccctctcttgtggtctggattgggacccctttcctgtaacaaatgcattggctgataggagaataaagaaaaaaaaagaggaaaaactagagtaacttctctacataatcatattatatgaccgttttgttaaccatgataacagttaacaaaataattttcttatgtctaattctcagtccatgtctgtatgtcccaaaatgtctttcacagctggtttgttcaaccattcaatgaaggaccaaacattgcagttggttgttatgtatctagtctctcaatcttgatcttcagaccaccttcagcccatctcaccacatccgtcccaagccctttgagccagccaaccccaacctgccatgtactttacaaaatgctccttttttttccacagtcgactgcttctctgtccctggagctctcccctttattctccaaggtcaccttgagcacatccttctgctccgtgaaatccattctcctctccctttccctccctctgagcttaaccagctgccaccgcaggcttctgcctttcttcacagtgtggccagaactcggttctgcctgctagcagagggcagggccgctgtcttcctctccttgcagcccccaagcctagcacatgcctggcatctagtggcagcacaataaggaacctgatgaatactcctttcttctgctctccgctcctcctccacagcctgccagccatggtcaggaagagcaagatccggaatgggcttggtgtgtcccgcgggaaggccgtgatcctggaagatgcttctcagcccagcccggatctccttcctttagctctagagacttctttcattctttgtgtacacacatacactaagactcaggaagtggttcttgaggcaggaccttaagagcccaaggagtggggccgaggctggaggtgtgggggtgtgacggccggtcctactctccggcctgttcagatcagctccttctggggaccacccctggcacacaagggagggaggcagcttgatccccctagcccgcttccagccctcacctggctttgtcttctgggataagacggggaaatccagaggatgtaagcctctcctgccttcgtgtcttcccccaagccctcgctatcacagacggatgcaggagctgtctgggaggctggaagcacagaccttgtcaatcctcccccagagggcgggacccgacgcggacgtgtcttgattgactgggtagcgtggcttcggggaagggcttcctccccttttctcagactaggatccctggaaaatggagaagctgtgctaatagaggggggccagaaatccccactctagaatgctgtagaatgttgggagacacccaggatgtgagccagggactttctggaagtgtttgttctggccccacccgaccccaggcagtccccagctgtctgcacagtcggatggggagggggcttgcacagagttggagccagagga

SEQ ID NO: 9728 - DNA, 2300 bp, Homo sapien
tattttactccagttcctcaacccaactctatccttatgtctggtgctcctgatgcctatgccaagccaactttaagatatgttattgggctttaattccagagaggaaaccaatgcccctctattctgagaagcccaataataaagttcatccatttattaaataaacattgtgaatgccaggaaattagcaagacctgattccttcaaacattttcttttcttttcttttttttttttttttgagacggagtctcactctgtcgcccaggctggggtgcaatggcgcgatctcggctcactgcaagctccgcctcccaggttcacgccattctcctgcctcagcctccccagcagctaggactacaggcacccgccaccacgcccggctaattttttgtatttttagtagagacagggtttcaccgtgttagccaggatggtctcgatctcctgacctcgtgatccgcccacctcggcctcccaaagtgctgggattacaggcgtgagccaccgcgcctggcctggcacaaacattttccatttgactattgctccagggctttcagatccagaaataagcctggaaaacctgaagtcagaagttaagcacattcaaaacattttttcaccttagtactgttttactctgctctctgactgcccaggatcacacctgaagactagggctggtcccacatctgtatttcatctcgtgcatctgagcgcagacttctttcccatgctcacccttgcaacctccagccccttctcagacttctaagaccctgcagatccaaagatatagctagaaatccagagatctagatttctccccaagtataacagcctccagccatctcctctcacccttcccccagtggcctctagctcctgccttttccagccggctgactacattagccctgttaagccccagtttcaagctcacagtcttcccagctctatgtcttccctctgtttcagttcttcccatcacctctccaccttcttaggttgtccctgacctcttcctctcctagtccccttaatccctctgatgagcctagcctggtgcttccttccatggcttccttgagcatcttctttgggctacctctggtggctagagctcctctggtctcaagttctccacctctgtcccctgggctctctgtgctcccaccaaggctgactcttgtggctccttctctcaggagtttctgcctttcctctcccccacccccaatcccctgcacctgcctcctcaggggctcccttgttgtctccctgtctgtgcccctctctctcctcccccatcctgatttctctcccccccacccccccccccacccctttcccagggcactcttctgtcctctgttcctctgccgctgttcccatctccatgacccccgatctcttctggtctggctctgtagacctctgtctccccctatctagtggtacccctcttctccccatttttgtctccactctaactctcccactagttgtcccagtcttcctccttcttggttctgtgtctcccacagacacacaatttccctctctagctaagtctctcacctctgcgtcttccccctgactcttcttttcctcctttgtctctccctctctcctcctccttttcctatctctgtctcttcccccttatctctctgattctccttggtctctctggctctgactttccctctatatccgcccccccgccccctcatatctctgtctcttcatctctctctggcccttgctccctcattccctccctctctctattcctcggctctctccggctccctctctcgcctcggatgacagcgctgcctcttttgttggctccgcagccaatcgcggccgctgacgacacgggggccggggctataaagggcctggcccgggctcgggcccccccagccgcccgccccggccgcccgcccgccccgcccgcgcgcccgccgcccccggccccccgggtcccccctcggccgggcagcccccaatcccgcgccgcccggaccccctcctcctccctccctcctccctccgccccctccccgcgggactccggcgtccccgccccccagtcctccctcccctcccctccagcatggtgctcgcggccccgctgctgctgggcttcctgctcctcgccctggagctgcggccccggggggaggcggccgagggccccgcggcggcggcggcggcggcggcggcggcggcagcggcgggggtcgggggggagcgctccagccggccagccccgtccgtgg

SEQ ID NO: 9729 - DNA, 2300 bp, Homo sapien
cttatatgctgggaaaagttggacagtaaggatggtggtggatgaataattttgcaggttatctggtagacaggaacctatatattagggcaaatggattaggaaatggacacagatcagtaaggccttatagggccatcatcctaaagaggaagtgctgttttaggtaccggagacatggtataagataggcatgggagaagggtaaagaagaactggaaaatcaggctgagaagtccaaaattgccagtgccacccaggactactgatcccctacacaaacaccctttgctgatgctgtgcccttctctcttatcagcggacccagcagtacagacagatggcagccctctctgctgccattttcacttcagccccaaggtgatgttcacaaaggtactgaaggcccagctgtgggtgtacctacggcctgtaccccgcccagccacagtctacctgcagatcttgcgactaaaacccctaactggggaagggaccgcagggggagggggcggaggccggcgtcacatccgtatccgctcactgaagattgagctgcactcacgctcaggccattggcagagcatcgacttcaagcaagtgctacacagctggttccgccagccacagagcaactggggcatcgagatcaacgcctttgatcccagtggcacagacctggctgtcacctccctggggccgggagccgaggggctggtgagcagggggcctgaggtggtggatatgtgtaacctggccctgaggagatagggttacattggaaaaggtagacaaggaatgtgaaggaggttggggaccagcattacttctctggggtcagcagctgattctagaggaggaggtgaggagtggggtggcaactattacttctcaaggatccaaatcagacaacagctgaaaactggatttgaaggtaaaggtgtcagttaatggaagagctgtgagaacaaaaaaactggctgttgaggcgttgggccaaggggctgacagggatcaggttgccagaagagtaagaattagagatggtgagttgaaggagagctagctagctggcaagaaaagtgggcaaaagataaattctgggggtgggagcaatggaaaagctgagaagtcagcagtctctattctgatgcccctggcaggtgggaaaggaacagggaagaggaactgttcaggaccatatcacatttctttcccctctccctgaccctcagcatccattcatggagcttcgagtcctagagaacacaaaacgttcccggcggaacctgggtctggactgcgacgagcactcaagcgagtcccgctgctgccgatatcccctcacagtggactttgaggctttcggctgggactggatcatcgcacctaagcgctacaaggccaactactgctccggccagtgcgagtacatgttcatgcaaaaatatccgcatacccatttggtgcagcaggccaatccaagaggctctgctgggccctgttgtacccccaccaagatgtccccaatcaacatgctctacttcaatgacaagcagcagattatctacggcaagatccctggcatggtggtggatcgctgtggctgctcttaaggtgggggatagaggatgcctcccccacagaccctaccccaagacccctagccctgcccccatccccccaagccctagagctccctccactcttcccgcgaacatcacaccgttccccgaccaagccgtgtgcaatacaacagagggaggcaggtgggaattgagggtgaggggtttgggggaaaggggaagcaggggcatagtcagggtggggagtgtttgaagtttgcagatgagaaggtttgacaaaaagacagagagatgtagagacagtgatagagacagaggaacaaaaagagcagcagtgagaaggcaaagagagaggcagaagagacagacgaggcagagacaaaacactgagaaagagactgaaatggagtaataaatgaaagccccacaccaagcctcctttcttccactggcaaggtgaggggcttggtatagtttggggagatcccctgactattcagtaggagaagaaatcaaaaatccattcttttctccttctctccctccaacagtggccaggggaaggggaagtgagggcaggggcaaaaagatttgggaatttttatttatttatttattgtgacttttcatttttttggtatttggctttactggaataggagggcccctgcccactgtgccccgtttatcccttattccccaaaccctgctctc

SEQ ID NO: 9730 - DNA, 2300 bp, Homo sapien
aactgcatgcaaaatatgtgtacatgcctttttctggggagagggtccatacctttcatcagagtttcaaagatatctgtgacctccaaaaggttaagaagtgctctagagaaaaagcaaagacaagcaaatgtgattaaagagcaagtcctttttaggctgtcaggagtgcctaatgttctcttagactgtaacactgaaatcaggtcagaggactttacgtaaaagttacttatccaatcaaatacaaattttatatagacctgacaaatacagatttgatggaaggaggaactccataaaccaacacaatctataaatgcaagtaagtcatcgggcagctggtgacttactccagggatttcaaaaataggacaaataggaagaaaatattagctcttctatatatagttcctttttatctcattcaaaaattccttttctgtgttatattttataacagtccagaagtatacaatttctataagtacagtatatataaacaaagtggagatgattgctcaattttttttaactcatcacaataaagatcaagagaccgctgatatagtctatgcatttcagtatcatcaagttaacaataactccagaataacacaaaaacccactaacagagtttagaatccaagagtaagaaaaacatcagtttcacagaaagactaattggggtcaactaataagtgactaaagaagggtcctctccctacccttactacccttaagctttcttaacagcaacaaaaacaaaaaaaaacttttcgagctttaaaggatcacttttcagtttcagctatatcagcctggtttgtccaaaacatctaatgggaaaactacttgtgaaaccacaaacagacaattactcaagatatcttaatttaccctaaaagaaaatactttttaaaatgttcttctttttaatatatttttttaacttttttatatatctaagtgtgaaaaaactaccaagagtctcataagacaatttaaaatagcttctgtgattcagtgtcagccaatggtaacaccaggagatgcagggcccacccgagatatgaaatggaacagagataatcttaaccttggaattgtttttcccaaatattgcaggtgtgagttctctctggtggttggagatggtgtgtgaggaaggctggcgggccgagagccgcgtgacagaactcgaaaacttttaaatctgaggtgtctgtacttctactattctcaagacctcctcaaccccaggcttctaaggcgagaccgatcttctgagaggcctctccctgtttcaaaattcggcttggggcgtaatcccacctagaaaaggggagtggaagtattttctgagtgtctggtacctatttagacagaaatacacaaaaatgccaccatttgctaacagggaaatctcagcttcggacgacagactggaaacatcatcccagggaagaaaaacggatcctggctccgacatggggcaaaaaggagggaccaactgacgtaatgcagccctgaaaagcaacgaagagtataacaggtagaaggcacttacacaacccagtggggaagggtgacggacgatacaatgatgaaggaagcagaaataacaaataaatatagcagtaaagccgtgaggagaaatgggaaattagggaaggcgtagtgtggaagggtggcacaaaagagctacggcgggagccgagaaacgaagtggaaaaggctgcacggagaagacgtaggagaaggcgcaagctaccctgtagaattcagttcctagaaaagtccaactcagcccttccccgattcacggtacctttagcttatggagctccaccgtctcggtcgccatcttgttacccctcactccactaggcccccacccgcggcctccgcctccaggagctcccgccttaggcgtagagatgcaaggctgaccaatcgttgtcactcttgctcccacgccataccatcagctcttcccattggtcaatagctgacgtcgctctcacttctctaggcagcttgccccacctctttcaaaaggtggaactgggagaggggcgggcactgtatcttgcgaacgacagaaatggcaaccaactgtgcttctgcattacagaccaccaaccaatgggtggtggcagcgctgattctgttcctccaataggaaaggggcagaaggagaggcgttacttcctggagacttcaggtgtggtagccggcgccgcgcccatagccggacggggatctgagctggcaggtaggagctgcaaagactgtaa

SEQ ID NO: 9731 - DNA, 2300 bp, Homo sapien
acccgagatatgaaatggaacagagataatcttaaccttggaattgtttttcccaaatattgcaggtgtgagttctctctggtggttggagatggtgtgtgaggaaggctggcgggccgagagccgcgtgacagaactcgaaaacttttaaatctgaggtgtctgtacttctactattctcaagacctcctcaaccccaggcttctaaggcgagaccgatcttctgagaggcctctccctgtttcaaaattcggcttggggcgtaatcccacctagaaaaggggagtggaagtattttctgagtgtctggtacctatttagacagaaatacacaaaaatgccaccatttgctaacagggaaatctcagcttcggacgacagactggaaacatcatcccagggaagaaaaacggatcctggctccgacatggggcaaaaaggagggaccaactgacgtaatgcagccctgaaaagcaacgaagagtataacaggtagaaggcacttacacaacccagtggggaagggtgacggacgatacaatgatgaaggaagcagaaataacaaataaatatagcagtaaagccgtgaggagaaatgggaaattagggaaggcgtagtgtggaagggtggcacaaaagagctacggcgggagccgagaaacgaagtggaaaaggctgcacggagaagacgtaggagaaggcgcaagctaccctgtagaattcagttcctagaaaagtccaactcagcccttccccgattcacggtacctttagcttatggagctccaccgtctcggtcgccatcttgttacccctcactccactaggcccccacccgcggcctccgcctccaggagctcccgccttaggcgtagagatgcaaggctgaccaatcgttgtcactcttgctcccacgccataccatcagctcttcccattggtcaatagctgacgtcgctctcacttctctaggcagcttgccccacctctttcaaaaggtggaactgggagaggggcgggcactgtatcttgcgaacgacagaaatggcaaccaactgtgcttctgcattacagaccaccaaccaatgggtggtggcagcgctgattctgttcctccaataggaaaggggcagaaggagaggcgttacttcctggagacttcaggtgtggtagccggcgccgcgcccatagccggacggggatctgagctggcaggtaggagctgcaaagactgtaagggttgctgaggaaaaatggtgggaggcgaaaggggcgccgagggagtggtgacctaaatactgagaggggagcgctgaagggagccctgaaaaaaccgatgaacatgaggaggaagctgggaggggcatggggcgggcttaaggaactggcggtggggctggggcgggcaagagccgcttcctaaccagacatcatcagctttagagctaccacaattttaaagatccgagttcagataatcactgctgcccctggagtcagagccaaggctccacctttcgaggtattgagctcaggtcccttcctaacccagtccagaagccgtgggcaagttgttgtcgtgccccacgcttgagagaagtaatggggatgcagactgtttacatgccacggaggtgagagagagggtggacaagccccagagaacaaagtggggaccagagtgagctttactctgtcatcccttcttagtggttctttgatgattccatgactttcgcctggaattctgggtgtacgtgacctcttcatggttattaacttcttcagcaaagtcagatactcctatttcccttgctccctgaagtgagtgccccaagcctacacatacaccttcatgttacagttgacgtgtaaagatcagagcaataatgactatgtctctgaaatgtagtgaggactcttcttgtcttttaaagttttccccaagtcttcagtttttattttctgcgtgatgggtaagttcttcattcccaatagagttcaggggattggggctatctgagagacaactgggagatagctcaagaggggttgagaaaaaactgagctggactcctgcctgatcccccattacggctaggatgaatgtgggggtggcacacagcgaagtaaaccccaacacccgagtgatgaatagccgaggcatctggctggcctacatcatcttggtaggattgctgcatatggttctactcagcatccccttcttcagcattcctgttgtctggaccctgaccaacgtcatccataacctggtgagcactaaaccacgcccttgt

SEQ ID NO: 9732 - DNA, 2300 bp, Homo sapien
actccctacagtgtttttgaagattaatatcagttctgcctttatttacttcttttggcagtgtaaaatcatttggttttatttggcacttatcttttctcagtcccttcatttccttactaccaaggaggcagcaaggaatgcttgattacagtattgactgtaatctacattttactgctctctgtaggcttagaactagtataccataatatcttcaaagggttttagatgagaagtctgctttttaacagcttccctatgggcctttctacctggctcttggagctctttctaacccagcatatctcatttcccccatagactcacagcacaataggagagatgctgaggaacttgcgggaagaggtaaactggagcccatagtccatttgctcccagtgtgtcagtagccgagcctttccttggtcaggagtctcaaagggtgtccctttcaccgtatgaaggaagacatacgtagcctgggaacagggaaggtggcagtgtgaggggcagaaagtagtttttcagtcaaagaattatgttaagatcccaaaaggaacacataaatccccaaacaattggtgattttattttgcttttggttgggaaaccctggggtgggtacaagggcgtggtttagtgctcaccaggttatggatgacgttggtcagggtccagacaacaggaatgctgaagaaggggatgctgagtagaaccatatgcagcaatcctaccaagatgatgtaggccagccagatgcctcggctattcatcactcgggtgttggggtttacttcgctgtgtgccacccccacattcatcctagccgtaatgggggatcaggcaggagtccagctcagttttttctcaacccctcttgagctatctcccagttgtctctcagatagccccaatcccctgaactctattgggaatgaagaacttacccatcacgcagaaaataaaaactgaagacttggggaaaactttaaaagacaagaagagtcctcactacatttcagagacatagtcattattgctctgatctttacacgtcaactgtaacatgaaggtgtatgtgtaggcttggggcactcacttcagggagcaagggaaataggagtatctgactttgctgaagaagttaataaccatgaagaggtcacgtacacccagaattccaggcgaaagtcatggaatcatcaaagaaccactaagaagggatgacagagtaaagctcactctggtccccactttgttctctggggcttgtccaccctctctctcacctccgtggcatgtaaacagtctgcatccccattacttctctcaagcgtggggcacgacaacaacttgcccacggcttctggactgggttaggaagggacctgagctcaatacctcgaaaggtggagccttggctctgactccaggggcagcagtgattatctgaactcggatctttaaaattgtggtagctctaaagctgatgatgtctggttaggaagcggctcttgcccgccccagccccaccgccagttccttaagcccgccccatgcccctcccagcttcctcctcatgttcatcggttttttcagggctcccttcagcgctcccctctcagtatttaggtcaccactccctcggcgcccctttcgcctcccaccatttttcctcagcaacccttacagtctttgcagctcctacctgccagctcagatccccgtccggctatgggcgcggcgccggctaccacacctgaagtctccaggaagtaacgcctctccttctgcccctttcctattggaggaacagaatcagcgctgccaccacccattggttggtggtctgtaatgcagaagcacagttggttgccatttctgtcgttcgcaagatacagtgcccgcccctctcccagttccaccttttgaaagaggtggggcaagctgcctagagaagtgagagcgacgtcagctattgaccaatgggaagagctgatggtatggcgtgggagcaagagtgacaacgattggtcagccttgcatctctacgcctaaggcgggagctcctggaggcggaggccgcgggtgggggcctagtggagtgaggggtaacaagatggcgaccgagacggtggagctccataagctaaaggtaccgtgaatcggggaagggctgagttggacttttctaggaactgaattctacagggtagcttgcgccttctcctacgtcttctccgtgcagccttttccacttcgtttctcggctcccgccgtagctcttttgtgccacc

SEQ ID NO: 9733 - DNA, 2300 bp, Homo sapien
aaagagggccagagccaggagcagcaaagcacccagcagcttaagaaaacgagtaaacagtcctactccacagtaaaacccctggcttagaaactgaaacatgacctgggcccagccccctaaccgccctgtccacactcccatccaaactcgaaaaaggtccaaatcactgcttttcagttgcctgcaggcatagatgagatggccacaagtttctacgtactctcccaccaataccagcagttcaatcagccaccaaaagcctgcctgtccaagttgacatagttcctcggctccccacaatcccaggcctttgcgcttatctgcctgacttcgtttccgacccagccgatgtcgaccaggggacctgggatccctacgtccaccctcccgagtatcctccttcgttggaaagcggtgccgctgtctccgggatgggggtttctttccgctggacacacgtgaaaaatcactggggaacttgagagattcttcatcatcatattcctcttccaactcatcttcccccaaagctggagaggtacagtggtggcaaaagttgctagaagaaccatttcctccctcagagtaaggcccttctggaattccaggtgttccctggcagttgcaagcagatggaatggaaagaaaagagttcccatccttctggttcccagtctcgttttcttttgagagttcctggtccactcctgattcttcttctgaagacgtctcactctgatcagggtcctctgcatctctaggtggtcctggaccccctggggggccatggcttgggtccaaccaatgggctgggtttgggtgctgtgtgtgcttaggaccagagtgctctgtgaggcagcgggtaccattaggagcagtccctgctgagtccctgagtcctgagaatgaaggtatttcagggtccacggagggtcctaaagtcctgagggaggcaccaccactgtggtgggctccatacaaccctctttctccggggtgcttctgggccatgaccccggggcttcctgagggtcttaggtcacagccatcatggtgtgttctgatgcctgtaacagatatcaaggtggagacagtcaaggatgagaccaagagaggaattaaacaatctcaaatagtggacacatttaattcatccacctcccttgttttcccaagttcttttggggcattcgctattcctagcaataagccaaaactagactcaccacaaccctgcttgctccctcccctctcctccaaatcacttaagtttttcttctttccccagaaaactataaccttcaatcagggaaacagggaggtaccgtaaagggtgtggtcgggggagggtgggtcactcttaggaaaatgggaaagaccgccggaaagggggccacagacttccagtaatgggtgggggccatgcggccctggaggaaaatctgggggcggagcttagggctgcccctaagaaagactaacagggaacccaccggctgtgtagaagggacgaaggtggccgggcaccgtggctcacgcctgtaatcccagcactttgggaggccgaggccggcggatcacgaggtcaggagttcgagaccagcctggccaacatggtgaaactccgtctctactaaaaatacagaaattcgccaggcgtggtggcgcgcacctgtagtcccagctactcgggaggctgaggcagaagaatcgcttgaacccgggaggtggaggttgcagtgaaccgagatcgtgccactgtactccagtctgggtgacagagcgagactccatctcaaaaaaacaaaaaaaaacgaaaaaaaaaaaaaagacggacgtaccgaagaacggcggtaactcctccccctcgagccgcccggcctggggccagggtgagctacgagagccgctctcccggctccgcctcccgctcacgctctgcttccgccttccgtccccgcggccgccggcgacctgggcctacttccacttccggggtcaccagggaagagacgggaaggaaaagaaatagcggttggctgagaggcaagccaatccagctagggctgcgtcgactccaaggaggcggtcctaaggaagtactggccccgccatttaaaggcccctccctccgcgtgtgggaatgggattcccgcaggttgcaccgcaggaagcaaggcaggtggactctgcaccaatgcctgcagactaagggcagactctcaggattgctctgggtgtattcctaggctttgtattcctgggagatggagggcagccaccgagccacatatagt

SEQ ID NO: 9734 - DNA, 2300 bp, Homo sapien
agggatcagggcagtgactcttctgagctccctggttttgtctgcaagggaaaaagactatatgtggctcggtggctgccctccatctcccaggaatacaaagcctaggaatacacccagagcaatcctgagagtctgcccttagtctgcaggcattggtgcagagtccacctgccttgcttcctgcggtgcaacctgcgggaatcccattcccacacgcggagggaggggcctttaaatggcggggccagtacttccttaggaccgcctccttggagtcgacgcagccctagctggattggcttgcctctcagccaaccgctatttcttttccttcccgtctcttccctggtgaccccggaagtggaagtaggcccaggtcgccggcggccgcggggacggaaggcggaagcagagcgtgagcgggaggcggagccgggagagcggctctcgtagctcaccctggccccaggccgggcggctcgagggggaggagttaccgccgttcttcggtacgtccgtcttttttttttttttcgtttttttttgtttttttgagatggagtctcgctctgtcacccagactggagtacagtggcacgatctcggttcactgcaacctccacctcccgggttcaagcgattcttctgcctcagcctcccgagtagctgggactacaggtgcgcgccaccacgcctggcgaatttctgtatttttagtagagacggagtttcaccatgttggccaggctggtctcgaactcctgacctcgtgatccgccggcctcggcctcccaaagtgctgggattacaggcgtgagccacggtgcccggccaccttcgtcccttctacacagccggtgggttccctgttagtctttcttaggggcagccctaagctccgcccccagattttcctccagggccgcatggcccccacccattactggaagtctgtggccccctttccggcggtctttcccattttcctaagagtgacccaccctcccccgaccacaccctttacggtacctccctgtttccctgattgaaggttatagttttctggggaaagaagaaaaacttaagtgatttggaggagaggggagggagcaagcagggttgtggtgagtctagttttggcttattgctaggaatagcgaatgccccaaaagaacttgggaaaacaagggaggtggatgaattaaatgtgtccactatttgagattgtttaattcctctcttggtctcatccttgactgtctccaccttgatatctgttacaggcatcagaacacaccatgatggctgtgacctaagaccctcaggaagccccggggtcatggcccagaagcaccccggagaaagagggttgtatggagcccaccacagtggtggtgcctccctcaggactttaggaccctccgtggaccctgaaataccttcattctcaggactcagggactcagcagggactgctcctaatggtacccgctgcctcacagagcactctggtcctaagcacacacagcacccaaacccagcccattggttggacccaagccatggccccccagggggtccaggaccacctagagatgcagaggaccctgatcagagtgagacgtcttcagaagaagaatcaggagtggaccaggaactctcaaaagaaaacgagactgggaaccagaaggatgggaactcttttctttccattccatctgcttgcaactgccagggaacacctggaattccagaagggccttactctgagggaggaaatggttcttctagcaacttttgccaccactgtacctctccagctttgggggaagatgagttggaagaggaatatgatgatgaagaatctctcaagttccccagtgatttttcacgtgtgtccagcggaaagaaacccccatcccggagacagcggcaccgctttccaacgaaggaggatactcgggagggtggacgtagggatcccaggtcccctggtcgacatcggctgggtcggaaacgaagtcaggcagataagcgcaaaggcctgggattgtggggagccgaggaactatgtcaacttggacaggcaggcttttggtggctgattgaactgctggtattggtgggagagtacgtagaaacttgtggccatctcatctatgcctgcaggcaactgaaaagcagtgatttggacctttttcgagtttggatgggagtgtggacagggcggttagggggctgggcccaggtcatgtttcagtttctaagccaggggttttactgtggagtaggactgt

SEQ ID NO: 9735 - DNA, 2300 bp, Homo sapien
gtctcctggagaaccgggtggtcgggatcgtggaccagggaaggggcttttgctggtcggggagcgccaactgggggttcatgggtggaaaaactttcggatcaagacggggtataaggctagaggcgtgtgcagaggaggggaccgacggaacggggacccaactgggtctacgtgggggcgggggcgcttgtggacgtccaccaaatagcttggtatgcagatgagatgtcaagcagcaggtagatgagttcagtgttctttggctcacgggcaaagttctgagccgagccaagttacgctcccagttcctaggcaccgctcggtgatcgggcctggggagctgcgacccgaggggcggatccaggtataaggggcagctcgccagctgggtcaagcgcgggggaggccgtgggttgctgtgaaaggaggggcagtgctgcggggcgagggagggggccagccggggcaccctctcctctgctccacctccgcaccgcaggatacaaaggggcctgtgtcctcgcagctgccggcacggaagggatcagggcagtgactcttctgagctccctggttttgtctgcaagggaaaaagactatatgtggctcggtggctgccctccatctcccaggaatacaaagcctaggaatacacccagagcaatcctgagagtctgcccttagtctgcaggcattggtgcagagtccacctgccttgcttcctgcggtgcaacctgcgggaatcccattcccacacgcggagggaggggcctttaaatggcggggccagtacttccttaggaccgcctccttggagtcgacgcagccctagctggattggcttgcctctcagccaaccgctatttcttttccttcccgtctcttccctggtgaccccggaagtggaagtaggcccaggtcgccggcggccgcggggacggaaggcggaagcagagcgtgagcgggaggcggagccgggagagcggctctcgtagctcaccctggccccaggccgggcggctcgagggggaggagttaccgccgttcttcggtacgtccgtcttttttttttttttcgtttttttttgtttttttgagatggagtctcgctctgtcacccagactggagtacagtggcacgatctcggttcactgcaacctccacctcccgggttcaagcgattcttctgcctcagcctcccgagtagctgggactacaggtgcgcgccaccacgcctggcgaatttctgtatttttagtagagacggagtttcaccatgttggccaggctggtctcgaactcctgacctcgtgatccgccggcctcggcctcccaaagtgctgggattacaggcgtgagccacggtgcccggccaccttcgtcccttctacacagccggtgggttccctgttagtctttcttaggggcagccctaagctccgcccccagattttcctccagggccgcatggcccccacccattactggaagtctgtggccccctttccggcggtctttcccattttcctaagagtgacccaccctcccccgaccacaccctttacggtacctccctgtttccctgattgaaggttatagttttctggggaaagaagaaaaacttaagtgatttggaggagaggggagggagcaagcagggttgtggtgagtctagttttggcttattgctaggaatagcgaatgccccaaaagaacttgggaaaacaagggaggtggatgaattaaatgtgtccactatttgagattgtttaattcctctcttggtctcatccttgactgtctccaccttgatatctgttacaggcatcagaacacaccatgatggctgtgacctaagaccctcaggaagccccggggtcatggcccagaagcaccccggagaaagagggttgtatggagcccaccacagtggtggtgcctccctcaggactttaggaccctccgtggaccctgaaataccttcattctcaggactcagggactcagcagggactgctcctaatggtacccgctgcctcacagagcactctggtcctaagcacacacagcacccaaacccagcccattggttggacccaagccatggccccccagggggtccaggaccacctagagatgcagaggaccctgatcagagtgagacgtcttcagaagaagaatcaggagtggaccaggaactctcaaaagaaaacgagactgggaaccagaaggatgggaactcttttctttccattccatctgcttgcaactgccagggaacacctggaattccaga

SEQ ID NO: 9736 - DNA, 2300 bp, Homo sapien
ccaagagaggaattaaacaatctcaaatagtggacacatttaattcatccacctcccttgttttcccaagttcttttggggcattcgctattcctagcaataagccaaaactagactcaccacaaccctgcttgctccctcccctctcctccaaatcacttaagtttttcttctttccccagaaaactataaccttcaatcagggaaacagggaggtaccgtaaagggtgtggtcgggggagggtgggtcactcttaggaaaatgggaaagaccgccggaaagggggccacagacttccagtaatgggtgggggccatgcggccctggaggaaaatctgggggcggagcttagggctgcccctaagaaagactaacagggaacccaccggctgtgtagaagggacgaaggtggccgggcaccgtggctcacgcctgtaatcccagcactttgggaggccgaggccggcggatcacgaggtcaggagttcgagaccagcctggccaacatggtgaaactccgtctctactaaaaatacagaaattcgccaggcgtggtggcgcgcacctgtagtcccagctactcgggaggctgaggcagaagaatcgcttgaacccgggaggtggaggttgcagtgaaccgagatcgtgccactgtactccagtctgggtgacagagcgagactccatctcaaaaaaacaaaaaaaaacgaaaaaaaaaaaaaagacggacgtaccgaagaacggcggtaactcctccccctcgagccgcccggcctggggccagggtgagctacgagagccgctctcccggctccgcctcccgctcacgctctgcttccgccttccgtccccgcggccgccggcgacctgggcctacttccacttccggggtcaccagggaagagacgggaaggaaaagaaatagcggttggctgagaggcaagccaatccagctagggctgcgtcgactccaaggaggcggtcctaaggaagtactggccccgccatttaaaggcccctccctccgcgtgtgggaatgggattcccgcaggttgcaccgcaggaagcaaggcaggtggactctgcaccaatgcctgcagactaagggcagactctcaggattgctctgggtgtattcctaggctttgtattcctgggagatggagggcagccaccgagccacatatagtctttttcccttgcagacaaaaccagggagctcagaagagtcactgccctgatcccttccgtgccggcagctgcgaggacacaggcccctttgtatcctgcggtgcggaggtggagcagaggagagggtgccccggctggccccctccctcgccccgcagcactgcccctcctttcacagcaacccacggcctcccccgcgcttgacccagctggcgagctgccccttatacctggatccgcccctcgggtcgcagctccccaggcccgatcaccgagcggtgcctaggaactgggagcgtaacttggctcggctcagaactttgcccgtgagccaaagaacactgaactcatctacctgctgcttgacatctcatctgcataccaagctatttggtggacgtccacaagcgcccccgcccccacgtagacccagttgggtccccgttccgtcggtcccctcctctgcacacgcctctagccttataccccgtcttgatccgaaagtttttccacccatgaacccccagttggcgctccccgaccagcaaaagccccttccctggtccacgatcccgaccacccggttctccaggagacaatactccaattctctggaaagtggaagaaaccaagctgaagctaggggggcgctgggacccctattggggctttgagagcttccggttgtcatctcctaagtattcggagacccttctccaaaactcttggggtgaccctcaagactcttacctgctatatagttgggggtctctggtcctggactagagcagtaggcaacctgggtccccccacacacacgggaaagaattggaggggcctgccttgtgatgtcacccctcctccccccaccgcgcgcacgcgcgcgcgcacacacacaaacacaaacacacaccccaacacacacgccctgtcccctttctccaccctgcaagctagttgcatttagctcacagagcctgggctgcgacttgaaagagtttaggcagcaacagagtgaccctgggggtgctcttgaccgacagccgcacccccggcgtctaggacctccgagcagggatgcatctggaggtctagggaagcacttcca

SEQ ID NO: 9737 - DNA, 2300 bp, Homo sapien
tttaaagcctcagcttcatgctgagatggagttgttggaggaagaggcatccagccacagtcctaatcccacagcccctcatggaataagcagggactttgcccacagacatctcacatcctggtagccactcgcacctccccttaggatattggtgggacttttcctacctcacccttcccccagcggtatcagggctgccaatgggatttgaattcaaatcctgaaaggagaacaccaaggaggagctggcatttcgggcactgtgggaatgaagtggcaaaaatgcaggcacattactttcttcagctgtcctttggatatcaaggtccttacaggctggagggttgactctcggagctcctctcctcaatctgcttggaagtctggggaccctggacaagcgggggttggggaggggatgttaactactcaccatcctgccaggattgaggagaggagggggtggaagtgcttccctagacctccagatgcatccctgctcggaggtcctagacgccgggggtgcggctgtcggtcaagagcacccccagggtcactctgttgctgcctaaactctttcaagtcgcagcccaggctctgtgagctaaatgcaactagcttgcagggtggagaaaggggacagggcgtgtgtgttggggtgtgtgtttgtgtttgtgtgtgtgcgcgcgcgcgtgcgcgcggtggggggaggaggggtgacatcacaaggcaggcccctccaattctttcccgtgtgtgtggggggacccaggttgcctactgctctagtccaggaccagagacccccaactatatagcaggtaagagtcttgagggtcaccccaagagttttggagaagggtctccgaatacttaggagatgacaaccggaagctctcaaagccccaataggggtcccagcgcccccctagcttcagcttggtttcttccactttccagagaattggagtattgtctcctggagaaccgggtggtcgggatcgtggaccagggaaggggcttttgctggtcggggagcgccaactgggggttcatgggtggaaaaactttcggatcaagacggggtataaggctagaggcgtgtgcagaggaggggaccgacggaacggggacccaactgggtctacgtgggggcgggggcgcttgtggacgtccaccaaatagcttggtatgcagatgagatgtcaagcagcaggtagatgagttcagtgttctttggctcacgggcaaagttctgagccgagccaagttacgctcccagttcctaggcaccgctcggtgatcgggcctggggagctgcgacccgaggggcggatccaggtataaggggcagctcgccagctgggtcaagcgcgggggaggccgtgggttgctgtgaaaggaggggcagtgctgcggggcgagggagggggccagccggggcaccctctcctctgctccacctccgcaccgcaggatacaaaggggcctgtgtcctcgcagctgccggcacggaagggatcagggcagtgactcttctgagctccctggttttgtctgcaagggaaaaagactatatgtggctcggtggctgccctccatctcccaggaatacaaagcctaggaatacacccagagcaatcctgagagtctgcccttagtctgcaggcattggtgcagagtccacctgccttgcttcctgcggtgcaacctgcgggaatcccattcccacacgcggagggaggggcctttaaatggcggggccagtacttccttaggaccgcctccttggagtcgacgcagccctagctggattggcttgcctctcagccaaccgctatttcttttccttcccgtctcttccctggtgaccccggaagtggaagtaggcccaggtcgccggcggccgcggggacggaaggcggaagcagagcgtgagcgggaggcggagccgggagagcggctctcgtagctcaccctggccccaggccgggcggctcgagggggaggagttaccgccgttcttcggtacgtccgtcttttttttttttttcgtttttttttgtttttttgagatggagtctcgctctgtcacccagactggagtacagtggcacgatctcggttcactgcaacctccacctcccgggttcaagcgattcttctgcctcagcctcccgagtagctgggactacaggtgcgcgccaccacgcctggcgaatttctgtatttttagtagagacggagtttcaccatgttggccaggctggtctcgaactcctgacctcgtgatccgc

SEQ ID NO: 9738 - DNA, 2300 bp, Homo sapien
aggagagtatgagtcatggtgggggtctctggacagctgctccaggcccagggcagaaagagggaaaaaaccagacaccaagagtttgggaggaggaattaagtagagacagtcacccacagtttgtcagggttttaaagcctcagcttcatgctgagatggagttgttggaggaagaggcatccagccacagtcctaatcccacagcccctcatggaataagcagggactttgcccacagacatctcacatcctggtagccactcgcacctccccttaggatattggtgggacttttcctacctcacccttcccccagcggtatcagggctgccaatgggatttgaattcaaatcctgaaaggagaacaccaaggaggagctggcatttcgggcactgtgggaatgaagtggcaaaaatgcaggcacattactttcttcagctgtcctttggatatcaaggtccttacaggctggagggttgactctcggagctcctctcctcaatctgcttggaagtctggggaccctggacaagcgggggttggggaggggatgttaactactcaccatcctgccaggattgaggagaggagggggtggaagtgcttccctagacctccagatgcatccctgctcggaggtcctagacgccgggggtgcggctgtcggtcaagagcacccccagggtcactctgttgctgcctaaactctttcaagtcgcagcccaggctctgtgagctaaatgcaactagcttgcagggtggagaaaggggacagggcgtgtgtgttggggtgtgtgtttgtgtttgtgtgtgtgcgcgcgcgcgtgcgcgcggtggggggaggaggggtgacatcacaaggcaggcccctccaattctttcccgtgtgtgtggggggacccaggttgcctactgctctagtccaggaccagagacccccaactatatagcaggtaagagtcttgagggtcaccccaagagttttggagaagggtctccgaatacttaggagatgacaaccggaagctctcaaagccccaataggggtcccagcgcccccctagcttcagcttggtttcttccactttccagagaattggagtattgtctcctggagaaccgggtggtcgggatcgtggaccagggaaggggcttttgctggtcggggagcgccaactgggggttcatgggtggaaaaactttcggatcaagacggggtataaggctagaggcgtgtgcagaggaggggaccgacggaacggggacccaactgggtctacgtgggggcgggggcgcttgtggacgtccaccaaatagcttggtatgcagatgagatgtcaagcagcaggtagatgagttcagtgttctttggctcacgggcaaagttctgagccgagccaagttacgctcccagttcctaggcaccgctcggtgatcgggcctggggagctgcgacccgaggggcggatccaggtataaggggcagctcgccagctgggtcaagcgcgggggaggccgtgggttgctgtgaaaggaggggcagtgctgcggggcgagggagggggccagccggggcaccctctcctctgctccacctccgcaccgcaggatacaaaggggcctgtgtcctcgcagctgccggcacggaagggatcagggcagtgactcttctgagctccctggttttgtctgcaagggaaaaagactatatgtggctcggtggctgccctccatctcccaggaatacaaagcctaggaatacacccagagcaatcctgagagtctgcccttagtctgcaggcattggtgcagagtccacctgccttgcttcctgcggtgcaacctgcgggaatcccattcccacacgcggagggaggggcctttaaatggcggggccagtacttccttaggaccgcctccttggagtcgacgcagccctagctggattggcttgcctctcagccaaccgctatttcttttccttcccgtctcttccctggtgaccccggaagtggaagtaggcccaggtcgccggcggccgcggggacggaaggcggaagcagagcgtgagcgggaggcggagccgggagagcggctctcgtagctcaccctggccccaggccgggcggctcgagggggaggagttaccgccgttcttcggtacgtccgtcttttttttttttttcgtttttttttgtttttttgagatggagtctcgctctgtcacccagactggagtacagtggcacgatctcggttcactgcaacctccacctcccgggttcaagcgattctt

SEQ ID NO: 9739 - DNA, 2300 bp, Homo sapien
agtttctgccccgtgccccgctgcaggtttcccaatcccctaaagacattcatggatgggtgagaggagctgacacctcccgctctgtgaccactttctctttggccatggaggaagtcttgctgcccctggctgtgacatctgaccccaggccctttaatcaacaactcccagagcctccagacccaagatgtgttttggaaccccaggacaatcctgaactggcacttgccctggtgtgtgccctttgctgctgctttggaatcatctactgctgcttcagtgagggcagggccaaggacctggggggccattgcccaagactgtcatcctcaaggatgatgccagctttcctccttgctcctgggccatctcacctcctctgccaggggttcctacctctagtgtggcccatgttgctctggctgtattcctaggcccatgttgctcttgccagcttcttgtccatcctccatgcccatgccttccagctttcacctctggcatctatcatttgctcttctcttaactcctacctgaaaaccccattcctaaattattcactatatttcagacttcttcactcttctccaaaaacctgaatcagcttgtgctgattttttcctatctgctatccctaaaaggactagaccttctttctatccttactcccctcaatgtatccatcttacctcttgattttccctcccattccctcacagttcctgaaacagtgcccccccccgaccctaagcgacccctttctgcccctggccttgaggtcccttgacgtgctgctcctgtcttctgctcctctagtgagccattcctctcccttggaattcatcagagtcatccctgtagagcccccttcctgcctctcaattcctcctgcctcacttcccaggctactgctgcttcaagacagtgacgtttctctccggtcagctgtcaggagcgctggtgagcttcctactgtgccacaaggtgcgggtgctggagacacagctgagcctggaaatgagagtgggcatcgccgtggtcatcatgactcctctgcggcgtggtcaccatgttggttcactgtgttgggctcttattgacgggtctcctgctaggcctgaccttgggtgccggagccctgctggcttctgagcctatctaccaaccaccttcagcctgggtgccagctggggggctggtggggctggcgctgctgggagccctgctcacacttcggtggccacgtccattcacagttctgggcacaaccctgctgggttctgcagtgcttgtggcctgtgttgactacttcctggaggggctggcactggggagttggctgggccaacgcctgcagacacttccagccttgccttctctctgctgatatagctgggtcttactggggatctggccagccttgggggcccttggagccctggcccagtggaagctcgtgcctgaggaacatggaggccacgctaatggtgagttagtgctgtggtacagaagcagccaacctgtgcctactcatgtccccagttcctagacttaaggagggaaggggagaaatacacttgaggaaggagagtgggggaggatgtccaaggtgaatggggcagggcactgaaaaaaaaagttgaaggagtcaggggaagcaggaaagagttacagaaggaaaggaggatctcagggaagtctaggaggaaaaatagaatttcgaagaatttcttttagaatgaattgtcgggggggtgctgggcacggtggctcacgcctataatcccagcactttgggaggccaaggcgggcggatcacgagatcaggagatcgagaccattctgactaacacggtgaaaccctatctctactaaaaatacaaaaaaaaaaaaaaactagctgggcctgttggcaggcgcctgtagtcccagctactggggaggctgaggcaggagaatggcttgaacccgggaggtggagcttgcagtgagccaagatcgcgccactgcactccagtctgggcgacagagcgagactccatctcaaaaaaaaaaaaagaggaataaatggggggggaagatgaggcttgagagaaacaacaggaaggtcaaatgggtttctttagaatgtgagtgtgtatagggtaggattcagggcctaaagaggccttcttgagtctgtattgccccctccgaagcagtggtctttttttttttttttttttttgagatggagtctcactctgtcacccatgctggagtacagtggcatgatcttggctcactgtaacctccgc

SEQ ID NO: 9740 - DNA, 2300 bp, Homo sapien
ctttggagtctctacccacatcatatctcaaatactaatatttagttatagtccacataaagtgtaatgatatgtaaaactgagttgagttgttgacatgctattaccttttgtgggccttcaatttggtacttatttatttctattttatagttttatatgttgatgtaatggattatttttctttctgctctcagatatgttcaggtcccttgaaaagcccctaggccctatgacagtccatagatggatgaaattgctccagggcaagctgggctgggacgggtatccattcaggaagggagaaggctgaaggaggacaggctgtcaggtgggagcactagtggaaagctctccagagcaggggagccagacacctccacagagtaggagaaggttagaaattgcagtagaggggctgggcatggtggctcacgcctgtaatcccagcactttgggagatccaggcagggggattgcttgagcccagaagtttgacagcaacctgggcaacataatgagaccccatctctaccaaaaaagaaagaaaggaagaaagaaagagagaagaaaaagaaaggaaggaaggaaggaaggaaggaaggaaggaaggaaggaaggaagattgcagtagaggaggaaggctacacctgagggcaaacttactcaaataaaagacactgaaaatggggagatgaagctggagtatctccatttctgcagaacagaagagaaagtcccagttatgaggactggaggctggagtaaccctgtcagcttcagggattctgtgctattcttggccatgaacttgggcagcaggaagtcaaagagcaatcatctcccagtcatttcagattttcctgtcctggtagacccatccctctccctccttcagagcttttcaggaagcatctgaacttccagtctcaggtcagctggatgatgccacaagggcccgcatgaggcagcctcgttgtggcctagaggatcccttcaaccagaagacccttaaatacctgttgctgggtgagaacagagcctggaaaagagagggagaggagggggtgatgtggttctggcgtgtgggtggcattaggacagtctggaccagctcagtgttgaatagataatcacctggtgattacctggttgtcacctgtcttgggggttgagtgcctaaacccagaggagctctctggggttggcagaaggatctgtatttctaatctgttttctggtcattaactaggccgctggagaaagaagcacctgactttccgcatcttgaacctgccctccacccttccaccccacacagcccgggcagccctgcgtcaagccttccaggactggagcaatgtggctcccttgaccttccaagaggtgcaggctggtgcggctgacatccgcctctccttccatggccgccaaagctcgtactgttccaatacttttgatgggcctggtaggcaacagttctcagttcccacctcatagacctctgagattacctctgtctccttgaaccagtgactctagaaccttgatgtttgggctgctctttatcccacctgcaccatacgctctctaattacctcctaacgggagcacgggcgcagttggtcatctacatggagcctcctgtttgaaacttcctccctccctcccttccttctctccttctctctccttccctccctcccttccttctctccctccctcccttccttctctccttctctctctccctccctccctcccttccttccttctctccctccctccctccctcccttctttccttcctctctcttgcttgcttgacagtctcactctgttgcccagactggagtacagtgacacaatcatggctcactgcagcctcaacctcccaggctcaagtgatcctcccgcctcagcctcccaggtagagactacaggcaaacactaccacacctggctaatttttgtagagatgaagttttgctatgttgcccaggctggtcttaaactcctgtactcaagcaatcctcctgccttggcctctgaaagtgttgggattacaggtgtgagccatcacccctggctgcctatgcttctttttctcccttaagttcccctgttcaaggcataccttagaggtatgggccagagaggactgggtcagagagcagggagtggctgggaaggtaagggacagtgatgggcattcctgagagaactgggtgatgacaggggaatctgaaaggggagaaagaagcatccaagagacagtgaacatagctgggggaatttta

SEQ ID NO: 9741 - DNA, 2300 bp, Homo sapien
aaagcatgtaatacatagtagctttttatttatttatttatttattttttttttgtggggggacagagtctcgctctgtcgcccaggatggagtgcagtggtgcgatctcagctcactgcaacctctgtctcccggattcaagcgattctcctgcctcagcctcctgagtagctgggattacaggcgcgtgccaccacgcctggctaatttttgtatttttagtagagacggggtttcaccatgttggtcaggctggtctcaaactcttgacctcaggtgatccacccacctcggcctccgaaagtgctgggattacaagtgtgagtcaccatgcccggactttaattcctttaattttttatttccataggtttttggggaacaggtggtatttggttacataaattctttagtgtttagtggtgatttgtgagattttggttcacccatcacccaataataggtatttttattttaattaattaactaattaactaattttgagacagagtctcattctgtcaccaggctggagtacagtggcgcgatctcagctcactgcaatctccgcctccccagttcaagcaattctcctgcctcagtctcccgagtagctgggattacaggcgcatgccatcacgcctggctaatttttgtatttttagtagagacaagattttgctatgttggccaggctagtctcaaactcctgacctcatggtccgcccacctcagcctccgaaagtgctgggattacagacgtgagccactgctcccgtccggtatttttaaatgtaagtttttcttcttttccttgcatagcatttaaggccctctccaaattctgtctcccaaccactttcccaccctggtcattctttgacagtgatttattaagcacagcctcgaaagcatggaggtggcctggggtaggcactcgggcttcagtggtgaatgaagcagtcgtgacccttctgacttactgagtacagcagtctctcagctctgcacttttactcaagacctgcactgtctgtctctcagtatccttttaccctatcaattctttttttttttgagatggagtttttgctctgttgcccaggctggagtgcaatggtgtgatctcagctcactgcaacctctgcctcctgggttcacgtgattctcctgcctcagcctgccgagtagctgggattacaggcgcccgccaccatacctggctaatttttgtatttttagtagaaacaaggtttcaccatgttggtcaggctggtttcgaactcttgatctcaagtgattcacccacctcagcctttcaaagtgctaggattacaggagcgagccaccatgcctggccttaccccatcaattcttagctggccttcaaagcccatctcaaagcctgacttctcagcaaacctccccccagccccaagccccttagggtgaatcacctctggcctggcacgctggctcccctcttcccaggtgtctggatctgcctcactggatccgtaagctccctgagggtaggctctgggccctttacttatttgtgcccttgttaagtcccacctacacccacatattccaggctcattagattcttgaaataatgactttttattaaagcagacataagtaggttgcaggagcatctatattcccaacttggtcttgggtacaaagaaactgagacttcacgcttgactccttcacctgaaacccaagctacctcagctgtttcctacctctcagcttattctagggagactcaaaggtaggggcggagtgatttgctggcccagggtccctgaggcacattgatgtctaattccaggggatgtccatgatccctatctctagtctctccagagattctggttctcgtcctgcctggatgctcaccctagggcagtatgaagtttttccatctccagcagaggactctgagggaagcgattgggaactctctttggcttccgctctctggtagggcaagggttaatggtgaattgcaacatatctcttggctgagtcacctccctctgcctctcccccaaattcccctcagctgttataaagaggactagaggctggagagtaaaaagaactgggggtaagagcccctctgcctagcactgctcccccaaggctcccagaaatctcaggtcagaggcacggacagcctctggagctctcgtctggtgggaccatgaactgccagcagctgtggctgggcttcctactccccatgacagtctcaggccgggtcctggggcttgcagaggtggcg

SEQ ID NO: 9742 - DNA, 2300 bp, Homo sapien
gaccacagtgtcacaacacttgcaataacagtgtatcgtatgcaaatactttttatttatttattttgagactgagtcttgctctataatacaagctggagtgcagtggcacgatcttggctcactgcaacctccacctcccaggttcattcctcagcctcccgagtagctgggattacaggcactcgccaccacacccggctaatttttgtatttttagtagagatgggatttcaccatgttggccatggctggtctcgaactcctgacctcaagtgatctgcccacctgggcctcccaaagtgctgggattacaggcatgagacaccgcacccggcctggaaatactttttaaatgagccccacccccagacattctgaattggcctctagtggaagtcacagacatggaggatgggaaggaaggcaagctgcggcccccagaaaacttctgaggcctaatttgtcttataaaggtcctagtcagccattgctcagttttttagttttttttttttttttttttttttttttttgagacggggtcccactctgtcgtccaagctggagtgcagtggagcgatcttggctcactgcaacctccgcctcccagattcaagaaattctctgcctcagcctcccgagtagctgagattacaggcacccgccaccacgcccggctaatttttttgtatttttagtagagacggggtttcgccatcttggccaggttggtcttgaactccggacctcgtgatccacccgccttggcctcccaaagtgctgggattacaggcgtgagcaaccgcgcctgggttttgttttgttttttaaatgggacatgctgcctagtgttggaggtagtcaccaatacttacctcctgcctcctccctggttccaggggtactgctggacattaaactaagccaaagtggggatataagcaggaaggtaaaagggttgataaggaaaaagctatatgagggtggaggagggcagagttgacacctgaggagaggaacctgcagccgggctcctctcaggctgtaggggaaacaagtttaacaggacttagccctgaaggaacaacagttgctgaaatgggcggcggagggagaccatatgggttcgtctgcagaatagggaggtacggcgcagggcaggactacaaatggagtgacactacgggaccggattattggcgagttgccccgctttagatcctcagcggttggacgagtttaattagaatactaagtaggtccgcccagaagctttcaccctgccctctgaccctagggcccagcccgaggaggcactcagggttaggaggtctgggcgagaagcaactagggccctcatcacttcgccgccgaatccccggcgccgcccagcggggcagagccaggccagggccgcccgcccaacctggtccgctgcctcttcggccatggaagctgccggcagccctgcggctacggagacaggtgaccgacccgcggcgccctccgccttgcacgcccctcccgcgggtctctggtggttgagtgggttggccgacagcaatcggcacacgaattcgacctccccaccttcttagggttagatagggtctccaaccgtccctagaaacacttgtgcgccccagtgcgttcctggagtttgtctgctccacgtcaccaagccgctctgagatctgggtgcaggccagagcctggatattcttcctttcttcatttataaggccccctttttgggtgcaggtgggccttgcgcccttttccctcgcaggtcctggacgtacgaggagttcctggggatgagagggactgtgcctcggaacttctcttggctccctgaggactgttttacaggcagcaagcgctcagtaatggtatcggtggcagtaaaaagcccacggctttattttattaactatttcagcttctccactcttcctcctcctccacctccgcccatgaaatggtgcactctccctttaagactaagatggtggcttgctacgatcgggactccacttccggtggggaggggggcgggaccccagcccgctcacgccggaagtggtttgcgttttcaagatggcgactccctatgttactgacgagaccggcggtgagtgcgggaggcgcggagccgcttctctccgggctctcggggcaggggttcggacttggaaaggggtctgtgccccgcccatcccggggcccctcctttgccccgccccccggaccgccttccccattcattctctcctacggggtgtctcctgcgcccc

SEQ ID NO: 9743 - DNA, 2300 bp, Homo sapien
ctcagctttccttgcaaagaatgctcaaagtaatgccaccctatgtattacctgtgtttctcactctatcgtctttagatatgtccctaaataaagttgaagacactccttttaagatagtttttggtacttcaaagtggggtgtaatgttatctctcgaataaggaataaggtggaatcagtcttactctagacttctttgtgtcttctttaggatctgtgctccatcataccccaagtcagttactggggggtgtgggtgggggaagaaaagccaagaaacatctaagaaggaggcgtttaatgcctacggttccaggtgctcatttctttaatcaaccacatcataaaaatcagaaagaaagaaaccgcaatgaacaaagggaaaggaaaaaacaacagcctgttctccccggccttttttgccctgttcctcctcagggtggggggccacatccggggccccgggttgggtcccaggcaggtctactaagcagacaattgagtttcacttcctgtcaaccctagtgctgaggcaggatgtctgggggtgggaagggggcctagggttggtagtgaacaggggcgactttaggtttccctcctgcacaaaggtctattgagcagcctctgaaagctgcagagaccactcctgaggtagttcagtcaagaccaacgtatcccattagttcttagaggcttcatcccacactctcacgtctaatcataacaaggttaaggacaagatgttagaccctgcagggctgaagtacaatcggtgaaaagagagcaagggtttaagaccacagtgtcacaacacttgcaataacagtgtatcgtatgcaaatactttttatttatttattttgagactgagtcttgctctataatacaagctggagtgcagtggcacgatcttggctcactgcaacctccacctcccaggttcattcctcagcctcccgagtagctgggattacaggcactcgccaccacacccggctaatttttgtatttttagtagagatgggatttcaccatgttggccatggctggtctcgaactcctgacctcaagtgatctgcccacctgggcctcccaaagtgctgggattacaggcatgagacaccgcacccggcctggaaatactttttaaatgagccccacccccagacattctgaattggcctctagtggaagtcacagacatggaggatgggaaggaaggcaagctgcggcccccagaaaacttctgaggcctaatttgtcttataaaggtcctagtcagccattgctcagttttttagttttttttttttttttttttttttttttttgagacggggtcccactctgtcgtccaagctggagtgcagtggagcgatcttggctcactgcaacctccgcctcccagattcaagaaattctctgcctcagcctcccgagtagctgagattacaggcacccgccaccacgcccggctaatttttttgtatttttagtagagacggggtttcgccatcttggccaggttggtcttgaactccggacctcgtgatccacccgccttggcctcccaaagtgctgggattacaggcgtgagcaaccgcgcctgggttttgttttgttttttaaatgggacatgctgcctagtgttggaggtagtcaccaatacttacctcctgcctcctccctggttccaggggtactgctggacattaaactaagccaaagtggggatataagcaggaaggtaaaagggttgataaggaaaaagctatatgagggtggaggagggcagagttgacacctgaggagaggaacctgcagccgggctcctctcaggctgtaggggaaacaagtttaacaggacttagccctgaaggaacaacagttgctgaaatgggcggcggagggagaccatatgggttcgtctgcagaatagggaggtacggcgcagggcaggactacaaatggagtgacactacgggaccggattattggcgagttgccccgctttagatcctcagcggttggacgagtttaattagaatactaagtaggtccgcccagaagctttcaccctgccctctgaccctagggcccagcccgaggaggcactcagggttaggaggtctgggcgagaagcaactagggccctcatcacttcgccgccgaatccccggcgccgcccagcggggcagagccaggccagggccgcccgcccaacctggtccgctgcctcttcggccatggaagctgccggcagccctgcggctacggagacaggtgaccgaccc

SEQ ID NO: 9744 - DNA, 2300 bp, Homo sapien
aatgaacctgggaggtggaggttgcagtgagccaagatcgtgccactgcactccagcttgtattatagagcaagactcagtctcaaaataaataaataaaaagtatttgcatacgatacactgttattgcaagtgttgtgacactgtggtcttaaacccttgctctcttttcaccgattgtacttcagccctgcagggtctaacatcttgtccttaaccttgttatgattagacgtgagagtgtgggatgaagcctctaagaactaatgggatacgttggtcttgactgaactacctcaggagtggtctctgcagctttcagaggctgctcaatagacctttgtgcaggagggaaacctaaagtcgcccctgttcactaccaaccctaggcccccttcccacccccagacatcctgcctcagcactagggttgacaggaagtgaaactcaattgtctgcttagtagacctgcctgggacccaacccggggccccggatgtggccccccaccctgaggaggaacagggcaaaaaaggccggggagaacaggctgttgttttttcctttccctttgttcattgcggtttctttctttctgatttttatgatgtggttgattaaagaaatgagcacctggaaccgtaggcattaaacgcctccttcttagatgtttcttggcttttcttcccccacccacaccccccagtaactgacttggggtatgatggagcacagatcctaaagaagacacaaagaagtctagagtaagactgattccaccttattccttattcgagagataacattacaccccactttgaagtaccaaaaactatcttaaaaggagtgtcttcaactttatttagggacatatctaaagacgatagagtgagaaacacaggtaatacatagggtggcattactttgagcattctttgcaaggaaagctgagtgccttagagattaatatcgttccaagatttctaaatgaaagatccagggacagaaaactgataggcagaggtgttaggggacctattcttacattgtatgtttgtttaaagtagctcagagcagagaggctttacacacattgcaccactcattgatatagtccctaaactggactatgtttttgcttgtattgcagaactaagtacaggacttagtgtataaaaggccttcagaagagtttgtttactatgactaaggaggtcatagaggaaggagagatgaagctttgctaacagtgaagaaaatactgtaaagacaggatggggagtgtcaagggccttgtttttttttttttttttttttttttttagacagagttttgctcgtgtcacccaggctggagtgcagtggcatgatctcggctcactgcaacctctgcctcccaggttcaagcgattctcctgcctcagcctcgcgagtaactgggactacaggcatgtgccaccacgcccggctaattttttgtatttttagtagagacaggttttcaccgtgttagccaggatggtctcaatctcctgatctcgtgatccgcctgcctcagcctgccaaagtgctgggattacaggtgtgagccaccgcgcccggcctttggcccttgtctttttatgattgggggtgagagggtgagacttggaggggcacaggagcagagagacagacccctcttcaacctatgcccgaaatctccagtttggatacaacaatactcccaaaccctattactcagcagctatatttctggcaaatgtggaggagtctgttccaacaagcctgtcttgaaacaatcaagaactgcttagatatccctgtttccactagagggcctcatgtattcattccctttccaacccccaccaaaagtatgtatatattatgtgtgtgtatgtatgcatacacaatacccacacatgcatatacccttctagtcagaggtctcccctcccccttcttcccacccccaggtgtaagaaggacgattccaggaacctaaggctttgttactctgccccattttcaatgaagggtaggagggagttagacaggggttggggcggggccagtgagcaggatgcctgggtctccagttcctgccagtgagtccctaggcctccatctctctcccttgctgtaccaccttcaccaccatccatgcgaccccaagagccttaatgactctagaagagactccaggcaggggaagctgaaaggacctttcactccctacttttggccagggccttctgtgccacctgccaagaccagcaggtaaagtgggaggatga

SEQ ID NO: 9745 - DNA, 2300 bp, Homo sapien
ggacatatctaaagacgatagagtgagaaacacaggtaatacatagggtggcattactttgagcattctttgcaaggaaagctgagtgccttagagattaatatcgttccaagatttctaaatgaaagatccagggacagaaaactgataggcagaggtgttaggggacctattcttacattgtatgtttgtttaaagtagctcagagcagagaggctttacacacattgcaccactcattgatatagtccctaaactggactatgtttttgcttgtattgcagaactaagtacaggacttagtgtataaaaggccttcagaagagtttgtttactatgactaaggaggtcatagaggaaggagagatgaagctttgctaacagtgaagaaaatactgtaaagacaggatggggagtgtcaagggccttgtttttttttttttttttttttttttttagacagagttttgctcgtgtcacccaggctggagtgcagtggcatgatctcggctcactgcaacctctgcctcccaggttcaagcgattctcctgcctcagcctcgcgagtaactgggactacaggcatgtgccaccacgcccggctaattttttgtatttttagtagagacaggttttcaccgtgttagccaggatggtctcaatctcctgatctcgtgatccgcctgcctcagcctgccaaagtgctgggattacaggtgtgagccaccgcgcccggcctttggcccttgtctttttatgattgggggtgagagggtgagacttggaggggcacaggagcagagagacagacccctcttcaacctatgcccgaaatctccagtttggatacaacaatactcccaaaccctattactcagcagctatatttctggcaaatgtggaggagtctgttccaacaagcctgtcttgaaacaatcaagaactgcttagatatccctgtttccactagagggcctcatgtattcattccctttccaacccccaccaaaagtatgtatatattatgtgtgtgtatgtatgcatacacaatacccacacatgcatatacccttctagtcagaggtctcccctcccccttcttcccacccccaggtgtaagaaggacgattccaggaacctaaggctttgttactctgccccattttcaatgaagggtaggagggagttagacaggggttggggcggggccagtgagcaggatgcctgggtctccagttcctgccagtgagtccctaggcctccatctctctcccttgctgtaccaccttcaccaccatccatgcgaccccaagagccttaatgactctagaagagactccaggcaggggaagctgaaaggacctttcactccctacttttggccagggccttctgtgccacctgccaagaccagcaggtaaagtgggaggatgagggcgtggagaaagggtggacatagaccaaagtgcaaaactccaccctagaattaaggagagaacatgagtcttgacaggaggtgtccttagactggggaaaataggtctaaaaggaaagaggaacgtgaagaaggtggggagattgtctcaagcagggtagagcccggggcgggagggaggtgtttggtcaggttgtggagtttgggactctgggcttgcccccgtgggatctcctgagtgtgaagtcagtggtggatggaagggagttggttagggaagttcaggatggcagcaatcaggagagaatgagacgttggttgggtgcccaactgccgagctgttctgttagcggcccgcccggtatcttggtctcccaggtttgggatgaagggagaggctgtgagtgattagaaagaagggaaaatagaagcagagctgccgccggcgcgggaagaagatgaggagcgcagcaaatggagaaaatgtgtccaaagccccggacatattcgagggagggtggagcaggttatggtgaactggaaacctagaaacgggcctctccaacttcgaagttcccagagtcgggggcgccgggcgcgggcgcggcgggcaggctggggtggggggcgggcagctatgtcgtcaggaacggggcggccccgctgcggccgcgtctgcctggcccgtcccctccagcccagctcgggctccagctccagcgccggcgcttcagctgcgaccgcgagccctctcaagcaaggtagagaccccgcgagccccccagcgccccaccctcccccatcggaaaaggacaggggtagggaagccgaggacccacgggctgcgttcgtgctgctgggtcgg

SEQ ID NO: 9746 - DNA, 2300 bp, Homo sapien
tcctcctctgtaaaatacgagggttggtgactcccagctctgtggatgttctaagattctctgcctccaagtcaacttcttcctttctcgccccaattgggtaggggcgggcagggaaaccagaggagggaagggaagggtgagtcacaaatagctggcaggctggcagcagaccccaccctcccagccctggccttcgcctagactagcccaggttatagcctcagggttgggatggacctggaggaaaaaaaatggacttgttctaggtcttcaagtccccaggatcccacagtttgctgcccttcagctccagggatagctaaactttcagtcagagaagtcaagaaaaccactgaaaagatcccaggagcactcgtttccaagattccagcccaggggtgtccttgaaccctgagagtctagctctagccacctcgtcatcctcccagaggcaaagttcagaatcctgatactacatgtttgcacctgacagatatattaataacaaggggtaagacgtacaactgggcttcactgatgctagcagtccctgaaatttatgccttcctggttcaaagacatcatttttcctaatctccagaaatgtttctctaggtactacccttgtgtaataatgataatagctgatgttcattgagttcttattctgtgccatgctgtttgctaagtacattgcatatatcatcttatttaatgcccacattgcgactgatttctgtaggtgcccactttactgatgagaaaactgaggctcagggagatgaaatgaccttttaaagagctaggattctgatccttgcctgtccaatttgcaagtccattctcttaacttctactgtatactacttctccaggtttaagacctggggagctaggaaggagcaagaaagagttagatcattgtaaaaagagaggcagagaagaagcctgtcctctctcctttgcattgtaacttgtttgctccctccttgtcactttctccctcagattccatttcctagaactttggagtcatcttagaatccccaggggtaatcagagaggctaattaagctatagaggccccattagccataagactattagtattcattaggtctgttggcagcagaagttggactatggtcattgaaaagtgccagatgggtagagtcctttctctaggatgtcagtatcccagaaccctcttctgagtgttcccagagagctgctggaataggaatggtgtgctgcataaaagtaggcagcagagatgtcccaagggaagaggctgcagagaaagttcttgcatcatcagaaaggaaaagggctaggctgttcttgaacacccaaactgcttcccttacccaacaagccctaaatgagtgggtggagatcagggtgtttgatggggtagtcaataagtgcttttcagcatcattcatttatttaacaaatatttatttagcacctactctatgtactacaaattatctcctttcctctgactgtcaggtggacactctggcatcctattcccatgtaaccatatttggattaatagccccaaattatgaatccccagctttacacaatcatgtgtacaaccaatattcagcacccactacatactgggaagggtatcccaggcagacagaacagtaagactcattgctttgagcaggggagagcttggcatgcctgaggaacagaaaggagcacagtgagaccagatggcggggtgtgaggagagagtggaacaagaggagggcagagggacaaacagaggcactaccacatggccttgggctggagccttggattttccatctatcaactgccttaggaaatccaagcttctctgagctccagtttcttcatctgtagaatggttatgccaataatttcctatgtctgatgatttgattctaattgttagtacaataataactagcatttcttgtaggcctcctaaatgtcaggcattgtatgagtgacttttcatatattgttttacgtaagccacacaactgtgaaaaatggttctcattctccccattttgcagatataacttccccaagtcacacagtggtatcagagctaagaatgggacccagatatgactgatctagttctgttccaaaaccgtgctgtattatattaacgtaagatatgttattatcattactgaatcaaggaaagtcgcccactgcaccttggtccctggatccagtagccaaaacctggggctccctaagcactgctgacctagcggagtggaaggaagttcccagga

SEQ ID NO: 9747 - DNA, 2300 bp, Homo sapien
gataggttgggggagagggagaaggatccagaaatggagagacagagatgagtcagagaaacagagacagaggacagacactgtcagggaaggtagaggcatagggaagagggacacagggaaaggaagatgtttagggagggactaggagagaaggaaagaacaaaaaataatagtgggagtagagacagaatggaacagacagaagaaaagacacccagacagctggctcttcccactgtacgctctgtcacctttccccaggcctaccctctgaagaggtccaagcaacggaagtactactacgaagctgcctttctggccatccttgagaaaaatagacagatggccaaggagaggggcctaataagccccagtgattttgcccagctgcaaaaatacatggaatgtgagtcttcctgtcaggccttcagttctggagaccctgccccagagaatccctcctcctcctcattacaccccctgccccccagcttcctcagtggctttgagcagtgtgctgctcagatgtgcccatgactggaaatgggaggagtgggagatggggagatgtcagaaaaagatccggatctaccacagtctaactgggctgcattgtgcaaggtctcggctctctacccaccttcgctatacctggactgcttgctccagctctcagagaagaggagtaaagagtggtactgttttggaggatctgaaatatttttccctctgtatttctgtgtttcttcttggaatttcttcatctcatttgaatcttttttcctgctggatttctctggcaagagaactcagctggactaataatgctgttctcttactctctctacaccctagactccaccaaaaaggtcagtgatgtcctaaagctcttcgaggatggcgagatggctaaatatgtccaaggagatgtgagtggcagctgggaaatcttcttcttgatcaactcttcccatctttgtttttgatccccaacttccaggaattattctgggcctgcccctcactatcccctctagagataccctagtgtccattgtcactctgactattgctttaggataaaacaagggattctattaactcaggacttaatcaaagaaaccatactcctgcctcagatgcttctcagctctgcatttattatccctgtccccgctactcccaattcttcagccccagctctgaccttgcagactccccaggataatgctcactctcattataggccattgggtacgagggattccagcaattcctgaaaatctatctcgaagtggataatgttcccagacacctaagcctggcactgtttcaatcctttgagactggtcactgcttaaatgagacaaatgtgacaaaaggtatggtcaagcaggtaggactgggctaagcctctggcagaaaaatcaaactagtatggatttggggttgagaattaacttgagtcacacgttgtgcaggttgggggaaattggtggagaatagtcaggctggtctaggagctaaagggaggaaaggtaaaggggaaaggtaagtcgagggcagtggctcacacctgtagtcccagcactttgggaagctgaggtgggaggattgcttgaggccaggagttcaaggtgcagtgagcagtaatcatgccactgcactccagcctcagtgacagagcaagaccctgtctctcaaaaaaatcagtaaatcttttttttaaaaaaagggagaggtgggacaaacaaaggataaaacatgagccaaagtggagggagccctgacttctgatctgcttttttgtaaccagatgtggtgtgtctcaatgatgtttcctgctacttttcccttctggagggtggtcggccagaagacaagttagaatgtgagttgcccttctgaagtgaggtggcagggcagtgaagggagagagaggtgtttcccatcctcctttcccttattccttcaggattcctaaaggctgacaggtctagacaaaggtggggccagagaatgagcccatttcctgtgttctcccagactatttatacctaatacccttcaccatagtcaccccagtacccatgtcttgtgcattcccatgtaggcggcctaggatgtccttgggatatggattatgtattgtctcccctgacacattcactgagggtagagtccatgcctgttttcctttcctttttgtctctctctcagtcccatcccaggctctaggcttctcacccaaaagctctctccctgtctctttgtttcccccatattctggtatgaat

SEQ ID NO: 9748 - DNA, 2300 bp, Homo sapien
gaatgcaatggtgtgatctcggctcactgcaacctctgcctcccaggttcaagcgattctcatgcctcggcctcccaagtagttgggattacaggtgcgtaccaccatgcccagctaatttttgtatttttagtagagatggagtttcaccatattggccaggctggtctgacctcaagtgatccacccgtctcagcctctcaaagtgctaggattacaggcatgagttactgtgccgggcctcatcccctttctttttttttttttttttgagacggagactcgctctgtcacccaggctggagtgcattggtgtgatcttggctcactgcaacctctgccttctgggttcaagtgattctccagcctcagccttctgagtagctgggactacaggcatgtgccaccatgcccagctaatttttgtacttttagtagagacgggggtttcaccatattggccaggctggtctcgaactcctgacctcgtgatccacctgcttcagcctcccaaagtgctgggattacaggcgtgagccacggcgcccggcctcattccctttctaatgtgtgctgtaaccctagttgattctgctgggggaggatctggaatcatctattgagcatcccaccactagaacaagagaagtcataagataccccattctttctccacttccaactctcctcagagcagcacgggacattccagaccctctcaccaccccacccccgccccttgctcctgtcacgaggcccaatcccccagagccctttcatgtgatgctcagctgagacccctctgcctatctctccagccccagaacaaaaggtctgggctgtgttcacccgtacccatcccaagaggagaggattgtatctccttagtgttcttacccaataccacattctctgactccccactttaaatctcctaccccaagagacgtttcctaaaagagtctcctgcacatttcacccctttggagcccgtgctccagctcactgccaaggaagcctcagaatcagtgccacagagaccttctatccttctgcccctccaagcatatgagattattttcaggcaaaatcccaaatctccatgtagggagggagcccaggtgcccacatcctcactaaatcaaatgagtgggagacgcctgaaatattgccgctatctcccattaggaggacagaaaccagagcagggggaattcatccccaagttcacacctgctcatgtccacatatccacacataccttttgtagcccccacagccagcaaagcacctatcacagccaaatgaagaaggcatctttttagcaccagatccattgtgttcttccctccagcaaccaaaggcactggggggactgggataggcccctatataagaaaagggtgctcatttgcatagcccttcctcttctccctcagagaaggcctgggaggggccggaggagaggaaaaaggaaaaactgacaaagggatcctggtccctagacattgctttcccatcctgctactcaatgacagtttctggtttcactgggtcactctcatcttgatgcactcccgggcaagagctaactgaaaggcagctgcgtaacacataccagacacaacagtttatcatgggagagtgaattaaaccaggaacttctcaaaaagacagaaacagaaccctgcatcccaaaacagagacagtgtcggggtatgctatgaggcagaggcaacgactcctctgaggcccaggattcctttgcaacgagattcccggcttcctggtttccaaaggaggctcctgggccaggtggaatttaaccttaggtcgatacatattttccccaggattggtgaaaatagtgagttagaaatcaagaaatccctacagactagagacataggtaggaaacttggacccaaagcaggtacttgggaagagtgttcagccgccccaccggggaagaaacttgtctagcccccaagaaccaaacttgcctggggcgggatcatttgcggggaggagcgctgggctcgccccccggctctgacgttgaccaatagaaaggcctgggggcggagccagggaaacgcgggaagcaggggcggggcctctggtggcggtcgggaactcggtgggaggcggcaacattgtttcaagttggccaaattgacaagagcgagaggtatactgcgttccatcccgacccggggccacggtactgggccctgtttccccctcctcggcccccgagagccagggtccgccttctgcagggttcccaggcccccgct

SEQ ID NO: 9749 - DNA, 2300 bp, Homo sapien
gagagcagaggcatccatgaatttcttgagatcttggtgcagaaattcaaaaaccaggtagagtttattttctgtgtgaatgacatccagcagcctagagaaggaaagtttgaggaaatggaggtgtgtgagagagagaaatgcccacactgtacagacagaacttatcctcctttccagctggatcacctctcagacgcatacttacttgacaatattaggatggttaagctccttaagcagagagatctctcggatggcagtactgggcacaccctcagtctcacttggagaggttgggaaagcagagatgggaatatggttacaaatattcctttcccccccacctagtcatttctttcccccaaggagacaccacccagcaccccctaggaaagtgagagaagagaaagggtgatggtaagagctaattcttgggtagtcagggtgtggtttttggatatattaaggccattatctcctcttttcccaggggtaggtaagtaaagccgcctggtgaaggtgaagcagggagactgtaatggaggggaaaaaatgcaggagtagcccccagcctccccagaggggccagtgaggttcaactgccattctttggaaagaggagagaattctaaggtgagggtggggcagtgaagagggctcttcattcagaaaggcgattctcgccggttcccacataactccactccatggagagtcttggacctcatctcagagacctcctttctctccccgagtctgtagtcgcacatttgggggcacgatccggctcagtttgggaagaaagttttccatggattccacaccaccctatactctccccagggagtataagtatactcttcaccttctactggcccccaacccacctctccacttctaaagaagtccctccctgctctcttccggtccctggacggctacccgcccgtggggggttgggggggacaatcaaggaggtccccagttaggagtcccgggtacagaggccactcacgtgtccaggcggattttcttaagcgccaccacctctcccgtcaacttgtttctggctttgtacacaactccgtacgtgccctctccgatcttttccaccttttggaagttctccatgaagcgccagcgagtcgggtcagcccggccctggagcgggggcctgggaaccctgcagaaggcggaccctggctctcgggggccgaggagggggaaacagggcccagtaccgtggccccgggtcgggatggaacgcagtatacctctcgctcttgtcaatttggccaacttgaaacaatgttgccgcctcccaccgagttcccgaccgccaccagaggccccgcccctgcttcccgcgtttccctggctccgcccccaggcctttctattggtcaacgtcagagccggggggcgagcccagcgctcctccccgcaaatgatcccgccccaggcaagtttggttcttgggggctagacaagtttcttccccggtggggcggctgaacactcttcccaagtacctgctttgggtccaagtttcctacctatgtctctagtctgtagggatttcttgatttctaactcactattttcaccaatcctggggaaaatatgtatcgacctaaggttaaattccacctggcccaggagcctcctttggaaaccaggaagccgggaatctcgttgcaaaggaatcctgggcctcagaggagtcgttgcctctgcctcatagcataccccgacactgtctctgttttgggatgcagggttctgtttctgtctttttgagaagttcctggtttaattcactctcccatgataaactgttgtgtctggtatgtgttacgcagctgcctttcagttagctcttgcccgggagtgcatcaagatgagagtgacccagtgaaaccagaaactgtcattgagtagcaggatgggaaagcaatgtctagggaccaggatccctttgtcagtttttcctttttcctctcctccggcccctcccaggccttctctgagggagaagaggaagggctatgcaaatgagcacccttttcttatataggggcctatcccagtccccccagtgcctttggttgctggagggaagaacacaatggatctggtgctaaaaagatgccttcttcatttggctgtgataggtgctttgctggctgtgggggctacaaaaggtatgtgtggatatgtggacatgagcaggtgtgaacttggggatgaattccccctgctctggtttctgtcctcctaatgggagatagcggcaa

SEQ ID NO: 9750 - DNA, 2300 bp, Homo sapien
aaagctaggccctggagcagctggaacagatagctctgacaaaggagaaagagaggactgtgtttctccattacagtgagcagactgggtttgctctgtgcccctaaaactctactaaagcctttattatgttggattatagttacatatttacaagctatttctcccaatggactgtcagcccagagaggataaggaccaagtcttactcaattttccatcccttttctacatcctgtgcattgaaaaaatgtttgttaatagattgaaagtagctctgggagtgaagaatccagccctaaaatagacaatagggactcactagctaggtcttccaccaaatggaagggctttttggaggaatttaccaagtgctctcaaatcccgtttatctgagtttcatctgacctcccacctgagttgctaggttgactcactagagtttcaactttgattgttcagtccaaccctagggttaatgaatataatgagcagggaaggagacacaaaaagaaggggagtgtgtgtgtataggagatgagggctcagaaggaggccaaaatcataaaatatcaccctgaattgcctgccaccagtcccccaagacatgcccatgatgagaggagctgatgagaagcattaccttgatgaggggaagaggaatgccagtgagagcagaggcatccatgaatttcttgagatcttggtgcagaaattcaaaaaccaggtagagtttattttctgtgtgaatgacatccagcagcctagagaaggaaagtttgaggaaatggaggtgtgtgagagagagaaatgcccacactgtacagacagaacttatcctcctttccagctggatcacctctcagacgcatacttacttgacaatattaggatggttaagctccttaagcagagagatctctcggatggcagtactgggcacaccctcagtctcacttggagaggttgggaaagcagagatgggaatatggttacaaatattcctttcccccccacctagtcatttctttcccccaaggagacaccacccagcaccccctaggaaagtgagagaagagaaagggtgatggtaagagctaattcttgggtagtcagggtgtggtttttggatatattaaggccattatctcctcttttcccaggggtaggtaagtaaagccgcctggtgaaggtgaagcagggagactgtaatggaggggaaaaaatgcaggagtagcccccagcctccccagaggggccagtgaggttcaactgccattctttggaaagaggagagaattctaaggtgagggtggggcagtgaagagggctcttcattcagaaaggcgattctcgccggttcccacataactccactccatggagagtcttggacctcatctcagagacctcctttctctccccgagtctgtagtcgcacatttgggggcacgatccggctcagtttgggaagaaagttttccatggattccacaccaccctatactctccccagggagtataagtatactcttcaccttctactggcccccaacccacctctccacttctaaagaagtccctccctgctctcttccggtccctggacggctacccgcccgtggggggttgggggggacaatcaaggaggtccccagttaggagtcccgggtacagaggccactcacgtgtccaggcggattttcttaagcgccaccacctctcccgtcaacttgtttctggctttgtacacaactccgtacgtgccctctccgatcttttccaccttttggaagttctccatgaagcgccagcgagtcgggtcagcccggccctggagcgggggcctgggaaccctgcagaaggcggaccctggctctcgggggccgaggagggggaaacagggcccagtaccgtggccccgggtcgggatggaacgcagtatacctctcgctcttgtcaatttggccaacttgaaacaatgttgccgcctcccaccgagttcccgaccgccaccagaggccccgcccctgcttcccgcgtttccctggctccgcccccaggcctttctattggtcaacgtcagagccggggggcgagcccagcgctcctccccgcaaatgatcccgccccaggcaagtttggttcttgggggctagacaagtttcttccccggtggggcggctgaacactcttcccaagtacctgctttgggtccaagtttcctacctatgtctctagtctgtagggatttcttgatttctaactcactattttcaccaatcctggggaaaatatgt

SEQ ID NO: 9751 - DNA, 2300 bp, Homo sapien
tgctgaagagggttggtataaaaataattttaaaaaagccttcctacacgttagatttgccgtaccaatctctgaatgccccataattattatttccagtgtttgggatgaccaggatcccaagcctcctgctgccacaatgtttataaaggccaaatgatagcgggggctaagttggtgcttttgagaaccaagtaaaacaaaaccactgggaggagtctattttaaagaattcggttgaaaaaatagatccaatcagtttataccctagttagtgttttgcctcacctaataggctgggagactgaagactcagcccgggtggggctgcagaaaaatgattggccccagtccccttgtttgtcccttctacaggcatgaggaatctgggaggccctgagacagggattgtgcttcattccaatctattgcttcaccatggccttatgaggcaggtgagagatgtttgaatttttctcttccttttagtattcttagttgttcagttgccaaggatccctgatcccattttcctctgacgtccacctcctaccccataggagttagaagttagggtttaggcatcattttgagaatgctgacactttttcagggctgtgattgagtgagggcatgggtaaaaatatttctttaaaagaaggatgaacaattatatttatatttcaggttatatccaatagtagagttggctttttttttttttttttggtcatagtgggtggatttgttgccatgtgcaccttggggttttgtaatgacagtgctaaaaaaaaaaagcattttttttttatgatttgtctctgtcacccttgtccttgagtgctcttgctattaacgttatttgtaatttagtttgtagctcattaaaaaaatgtgcctagttttatagttcatctctttcctcctcttatttactgaaagaatggtgggagacagaatatgaatgtgtgtatgtgatcattgatttcagaccccttttcctaatctctctgtgcatggctgcccaccccaccccattttggctagtgctgacggtgaacaaagtggttattatcatccctatttatggctggggaaactgaagcctatatacttcctacttcactttctccacacaccagcaaacctcctttcccccagccaacataccacacacacaccacaccacacacacatcacatacacacaccacacacacatcatatacacacatataccacacacaccacgtatacatataccaaatacacacacaccacatacacaccatatatgcacacacaccccatacatacacacacccatgcacatacatagcggcaggaagagggctcccggggaatttgcctttcgacactgcatttcccagtaagcccgccgtttttcctttctgtttcatatcacagacagaaaagttttccaaagattcttttatttacatttacatacgattctgaaaaagcgtctccaagctaccacttcttgtagttgccattgtctcattccaccaaaaaacatctcagaccgcccgcggccaccccaaatacgcctgtccactgaagcctcactaaaaggaggaagcgctgatgtcagggttacttaaattcccaggctccggatccctagaagaggtatttccctttacgcccgcgaatttgtcatagaaggcagggcactagagccagccccagccaagtccagggggaggggcgaaggtcagtagcggccttcctaaggcttccttcaacccctccttgcctgccagtcaagtaccgtattttcgcagtactggttaaagtttcactttgacccgcctccatcactcacctgattagatgtttatgagtcaaaaggcggggtcatggggtgtcgagattttattggtggatacatacgcctgtcggcagtgtaccgccccctgtcttcaggagcttgctctttaatggctccttacctcgtccatcttcgaggtttctccctcgctattggcttgtggccccgcctgtcgcgtcccttgctcgtacttgttggtgacagcgcccaaagagactcgcctttctccagaggattggtggatgagtgcacatatagcccaccctcgaaggtaggcgggtaatcgagctattggctggagccccgccccagggcgaggaggagaaggaggggcaggagggtttggttgagctgcagctgtttgtctgttcgacacaggcttggggccgacgggggagacggagccccaggtaccgagctgatggagcccaaagggcaggggcgga

SEQ ID NO: 9752 - DNA, 2300 bp, Homo sapien
tcaagtgattctcctgcctcagcctcctgagtagctaggattacaggcacgcaccaacacacccagctaatttttgtatttttagtagagacggggtttcaccatgttggtcaggctggtcttgaactcctgacctcgtgatccacccaccttggcctcccaaagtgctgggattacgggcgtgagccactgcgcccggccgtatgtgcatatttctaggatccatttctatatgtttctcaaaggggtccatgacccaaaggttgaaaaacatcactgagttagttttcttgtagcttccacctcaacgggaaaatttcctctggatctgctcttgactcctagtgtacttcaaacccttcagtccaccacagtctaaaggtcgagggaagggaaatgaaataggattatgtgtggttgcagtaggctttaaattccaaagaatctgaaggtggataggaaagaggactggtgccagacaaatctgacattctaggcctgtctctgtcaacttaaccagctgtggccttgatcaagttagttagtgccttccgcctcgtttcttcatctgtaaagtaaaagctgaagattaaggtcaattatgtaaagtatgtgtgtcacacaaaagtagatgacactattaggaaggaggcttttagatagtccctaactgacttctctgtatcttcctttggctgagacttttttttttttaggttgaagctcgctttctctctctctccctctttctccctctctctctctctctcactctctctctctccatatatatatacatatatatatatatatatattttttttttaacaactggtaggataggttgggcattagccttcttcagtgatttgattgtatacagattgaaatcctttccatttccaaacacttaagagccaaagccaacttgccaacttttcactgtcggttcccttaccttatatctcttggtaataccccccacccccgttccctgattcctggtaaaagctctagttggagagccgaaaggaaaggaaatgatctttcaaaattaaaggtgaacaccttcacttaaactgattaaaattgcagctccaccgtccggcctctagagggcagtgtatggatacatttgtccagattgggggactaggtttgataaattttgtcctgcatcaaatgacaaaagggtaataggaaatgtattatatttatgccccttactttgagataagagactacaaccttcatacttcggggtgttaagctgccattgctcttgttaaggggcagtttgttttttaagagatggggtcttgctctgttgtccaggctggagtgcagtgccgcgatcttggctcagtgcaacctcgaactcctgggcttaagcgatcctcccgcctcagcctcccgagtactgggactacaggcgtgtgccaccaaggggcgattattattttttttttctacgcaaaataaaagacggctattcagtgttgttgtttcatttttgtttggggagaaattcgactagcccaaggaatctcaaattcttggaaccactattttaggcatttctgttatcattcctggaatacgagaactaagcgattgactttgctttccctaaaagataaacagggtagttgtagttgcaacagagtagatagaggtaggtctaccctgggtttaaagtggagatcacagccggggaaaaccggactggatcccgaggcctcctccagggaggggcggcaggggtgtctcaaaatctcccacctgtcagcccaacttttggattccttgtcaccttccacactgcccgagctccggacatacagccctggtgcacaagggtcccattctttgcacaccaggggtataatggactccggactgttggcgagagtgacagcaaaaagagccagcctcttctcccaggcttcttagcaacctgcctgtctcggctccaggaggcgggttccagccaatggttgagccacccgcttccagccaatggctgagggataagctgaggggagtgagaggtcacttactgcagccggacataacggcgctggccccgccccttctcgagaactcgcagagctgggctggtaaaattgcagtgctgaagacactggacccggtaaggagactgggggtggtaaagaagctggggaggaagggctgctgagctgggcagcggagggggccttggtgtccagctgtgctccgaacctcaagggcaacaaaactatcagtacctgcctccactccttctgtctgggtgctct

SEQ ID NO: 9753 - DNA, 2300 bp, Homo sapien
gtccggaattggtgggttcttggtctcactgacttcaagaatgaagccgcggaccctcgcagtgagtgttacagttcttaaaggcagcgtgtccggagtttgttccttctgatgttcagatgtgtttggagtttcttccttctggtgggttcgtgctcttgctggctcaggagtgaagctgcagaccttcacagtgaatgttacagctcataaaggcagtgtggacccgaagagtgagcagcagcaagattcattgtaaagagggaaagaacaaagcttccaccgtgtggaaagggacccaagcgggttgccactgctggcttgggcagcctgcttttgttctcttatctggtgccacccacatcctgctgattggtagagccgagtggtctgttttgacagggtgctgattggtgcgtttacaatccctgagctagacacaaaggttctccacatccccaccagattagctagatacagagtgttgattggtgtattcacaatccctgagctagacataaaggttctccaaggccccaccagagtagctagatacagagtgttgattggtgcattcacaaaccctgagctagacacagggtgctgataggtgtatttacaatccctgagctagacatgaaggttctccacctccccaccagactcaggagcccagctggcttcacccagtggatcccgcactggtgctgcaggtggagctgcctgccagtctcggtgccatgcgcccgcactcctcagcccttgggtggttgatgggactgggtgccgtggagcaggggtcggtgctcctcggggaggcttaggccccacaggagcccacggcgaaggggggctcaggcatggcgggctgcaggtcccgagccctgccccgcggggaggcagctaaggcccggcgagaaatcgagcgcagcgctggtgggccggcactgctgggggacccagtacaccctccgcagctgctggcccaggtggtaagcccctcattgcccggggccggcagggccagccggctgctccgtgtgcggggcctgccaagcccacgcccacccggaactccagctggcccgcaagctccgcgctcagccccggttcccgctcgcacctctccctccacacctccctgcaagctgagggagccgactctggccttggccagcccagaaaggggctcccacagtgcagcggcgagctgaagggctcctcaagtgccgccaaagtgggagcccaggcagaggaggcaccgagagtgagcaagggctgtgaggactgccagcacaatgtcacttctcactaggattataagggtgagccaccacacccagctcttttattacagtataatgttataatttttttctttttctttgttttttttttgagacgtttgagacggagtctcactctgtcgcccaggctggagtgcagtggcgcgatctcggctcactgcaacctccgcctcctgggttcacgccattctcctgtctccggagtagcagggactacaggcgcccgccgccaagcccggctaatttttttttttctatttttagtagagatgaggtttcgccgcgttagccaggatggtttcgatctcctgacatcgtgatctgcccgtctcagcctcccaaagtgctgggattacaggcgtaagccactgcgccgggctaatttttctattttgttattgttgttaatctctcttttttttttttttttttttttttgagatggagtctctctctgttgcccagactggagagcagtggcgtgatctcagctcactgcaacctccacctcccaggttcaggtgattctcctgcctcagcctcccgagtagctggggttacaggcacgtgtcaccatgcctggcttatttttgaatttttgtagagacaggttttccccattttggccaggctggtctcaaactcctgacctcaggtgatttgcccgcctcagcctcccaaagtgctgggattacagacgtgagccactgcgccgggcattgttgttaatctcttactgtgggtaatttagtaattaaactataagaggtatgtatgtatgggggaaaaaacagtaatatagggtttggtgcaatctgtggtttcaaacatctactgggggtcgtagaacatatccccagtggataagggggtactactgtacttgttggctcttcatgttagctctgctaggcagatgtcatttcagagatgaggaagcaagttcagaacggcttggaatcttgctcaggaaatcgggctggttaatgaata

SEQ ID NO: 9754 - DNA, 2300 bp, Homo sapien
agactgctgggggaaaatgggagaggagctaggggagagtagccgagcgccgaaagattcaaatccgaaaggcaccatcgtctgccgaaggtaacccaaaaactagcctttaatctgcacccagtttgcaatctaagcacacgctggacgcccgatgtggcctggcacgtcaggccctagagccaagttttccctctgtaccttgtgaatcccaaaaatctgagacaggtctcagtttaggaagtttttggcaaaacttaattttgccaaagttagggacgcacgcccgtaacgcagcctcaggaggtcctgacgacatgtgccctaggtgactggagcacagcttggtgttatacattttagggagacaagagacatcaatcaatatatgtaaaggcgggacaactcaagctgggaggaggcttccaggtcataggtagataagaggtaaatggagcggggcgcagtggctcacgcctgtaatcccagcactttgggaggccgaggcgggcggatcacctgaggtcaggagttcaagaccagcctggccaacatggtgaaaccccatctctactaaaaataaaaaattagccgggtgtggtggcccgcgcctgtagtcccagctacttgggaggctgaggcaggagaatcgcttgaacccgggaggcggaggttgcagtgagccgagatcgcaccactgcactccagcctgagcaatagagtgagacttcatctcaaaaaaaaaaaaaaaaaaaaaaaaaagccgggcttggtggctcacgcctgtaatcctagcactttgggaggccgaggcagacgtactgcctgagctcaggagttcgagaccagcctgggcaacatggtgaaacccatctctactaaaatacaaaagaaattagccgggcgtggcggtgtgcgcctgtcgtcccagctacctgggaggctgagacagaattgcttgaactccggagacggaggttgcagtgagcggagatcgtgccaccgcactcctgcactccagtctgggtgacagagcaagactctgtctctacaaaaaaaaaaaaaaaaaaagaggcaaatggttgtattccactcaaagaaggcaatcaggtatgcatttatctcagtgagcagagggatgactttgaatgggaggcaggtttaccctaatcagttcccagcttgacttttccctttagcttagtgattctggggcctcaagatttattttgctttcacgacctcctaagacaatattgattttaaactcctagcaccctttgcctttcctgccaagtgcattggaactgttggggaaaggagttggagggtacatgtttttgtcacctctcctctcttcatggtatcctgaggtcaatcacctaggtgtccctgcagatactgccaaacctcagagaaggaagcccccctttttttgagacagaatctcgctttgtcgcacaggctggggtgtagtgggtgtgatctcggctcactgcaacctctgcctccttggttcaagcgattctcctgcctcagcctcccaagtagctgggattacaggcacccaccaccacacccagctaatttttgtatttttggtagagactgggttttgccatgttggccaggctggtctcgaactcctgacctcaagtgatccacctgccttggcctcccaagtgctgggattacaggcgtgagccactgtgctcagccggaagccctacttcttaacctacaagcctacttcctctctgtcttcctccccagttttgtttgttttggtctaatctcattatacatcccagtacaaatgcatccttcctcctgcaataggctcactccccaggcccaagagttatgatcttaaacagactatttattagaaaagtagaactataaagggagacggttgtgccccttgctctcctcgcaactctctggcaacctggagaggtagtataagatagtatatacacttttcttacacatgccacacacatttctctgaacaatccaaaaagaaaagcaaaacaaggccttgatggcagtaggcattagaaatggaggtggggtaggaagagaaaatagtgcttgtctccagaattacttttttcacttctagccccttgctgtaacagctcacacttcctggcacaggttcaaaggccaagaggggtatgtaacatagtgtccaaagagggaaggtccttgggtgaaatgtgctatatgtgtacttgggtatggcttaggaaggccagagttgtgatccaagaagttgaaaggtgggaaagatt

SEQ ID NO: 9755 - DNA, 2300 bp, Homo sapien
gactccccccccgccccccccgtccttttttcttttttaaaataagcgtggtagagtaattgatgagagggtggggataaccatttacaggtttaacttgtttattacaccttcagtagaggacttatcactgaaccctgagtgggctgctctcctccatcttctccttttcctgtcaccctccctcacaccacatactccaagacagaatcccttgaatgactgaacccagcttcttaatactacccccatctttaactgaggtatagagcctctaaggggctgtttctttgcctcctcagggctgaggtgtaatctccacctacatacacggtctaatctcaaaatcaaggaccactctggattaagatagtgtttccacctcagaggctggggaggcctgcagaagttgtaaattggaggaaatattggggtttgtaaatcagggtatgttgtctttcaccaggacaaagtgtaaggtttttcttggagacagggtctcgctcggttacccaggctggagtgcagtggtaagatcacagctcactgcagcctcgacctccaggctcaagtgatcctcccacctcagcctcctgaatagctgggactacaggcacatgccacgatgcctaatttatttttatattttgtagagatgggatctccctatattgcccaggctggtctcaaactcctgggctcgagtgatcctcccaccttctttccaaagcactaggattacaggtgttgagccacagtgcctggctaaggtttttcttctttaggatagtatcagaccatgcttaagtgctcctttaggtttcttgctaactcaagaatattaaagaaaagcctcctcccttcccagagctatcttctaatagcagctattttctttttcagcagaatctctttaaaatggacatagaagactgcaatggccgctcctatgtgtctggtatgccttctgtgtgttctatttgttaggggctggaagcagacactctcctgtagagcagagcagagagccttcagcctaggcacacagcctctaaatgtcctagtcacacagctaacactcatgcttggtggcccttggtagtgtgcaattattttggtgatcttacattccctaaatagtaattttcttttccagacttcttggggtatagaggaagggaataggaggggaatatgagcagacatcattagaagaataatttgaagcaaatagatggaaacaagatgtggttccttctcctttgctctgaagtcaccagccaaacatgaaatcctgttctatccagatagagcggcacaaggtttcaaagctcaaaggcctgcaagggccaggtagtcatgtgaatgagtgaagtaaggttaggataataagcagaaaagaatggtgggggctgtcatgaagtggagaacatatgtcccacttaaagggacagcagctttcagtgtccactagaacttgtcatgcaggaatgtgtatctagtgtggccaaaacttctaaatttttaagagataccagaaatccaaatttttatatgaaatgtctccattttaaaataatgactcaaggctgggcatggtggctcacgcctgtaatcccagcactttgggagacaggcagatcacctgaggtcaggagttcgagaccagcctgggcaacatggtgaaaccccctctctactaaaaatacaaaaattaggccaggcacgtggctcacgcctgtaatcccagcactttgggaggccgaggtgggcagatcacgaagtcaagagatcaggaccatcctggccaacatggtgaagcctcatatctactaaaaatacaaaaattatctgggcgtggtggctcacgcctgtagtcccaacttctcaggaggctgaggcaggagaacccaggaggcggaggttgcagtgagctgagatcacgccactgcactccagcctggcgacagagtgagactccgtctcaaaaaaaaagaaataatagaaaccaaaactgggttttgatgtgatgagtatccctatcagaaacccaagcaccattttggaaatgacctatagcttattttttactctaaagtaggaccaatgaaggaattattggcatgcactaaaggagatagcaagatgggtcagacacacatatgagagtcattggcaacacccgggtaatgtaaggtaagatgttgactctgacccctttcttgtttaaggagggaaggagttggaatgggtaaaggcattcaatatctgccacatgcttgacagaatgacagggatca

SEQ ID NO: 9756 - DNA, 2300 bp, Homo sapien
tggctcacgcctgtaatcccagcactttgggaggccgaggtgggcagatcacgaagtcaagagatcaggaccatcctggccaacatggtgaagcctcatatctactaaaaatacaaaaattatctgggcgtggtggctcacgcctgtagtcccaacttctcaggaggctgaggcaggagaacccaggaggcggaggttgcagtgagctgagatcacgccactgcactccagcctggcgacagagtgagactccgtctcaaaaaaaaagaaataatagaaaccaaaactgggttttgatgtgatgagtatccctatcagaaacccaagcaccattttggaaatgacctatagcttattttttactctaaagtaggaccaatgaaggaattattggcatgcactaaaggagatagcaagatgggtcagacacacatatgagagtcattggcaacacccgggtaatgtaaggtaagatgttgactctgacccctttcttgtttaaggagggaaggagttggaatgggtaaaggcattcaatatctgccacatgcttgacagaatgacagggatcaggtagactcatttaattggaagagactttattagaacaaaagtcatggccttgtgaggagcgagccagtcctcctacctcctgctcagttaagcctattcagaaaaccactactgagcaacaagtacacttgggaccctgctttagtgctggggaacactcagatggataaaatccagtccctaccataaagcaggcaaatgagaaactacaaatcctgtggagctcttttcaaacctgtttatggagaatattggatactcatggaggtgatttgcttcaccgtgctatgaaaccaagttttccctgctttcagcagattggcatgtcctagataagaagtggcctctgcacaggatggtttttgaatggaagtggaggccaggaactcctcctctgtactttgagaattttagatgtcagcagctaccttagaaagggaaaagagaaagtcaaagtaaggctaccattagccctgaaaagtacccctcttaggactgggcatagctgcgctcatcactgacccatctctcctggaagagtcatatggaagcagagggaaaggctgcagcatgcagccctcccgaagcacactgcgggcctccacaggccatcatagttcttctgctccacgccaggtgaccttccctcatcaggccacttgatgaaaagggtatctctcctgttcttccaagagatttgaattcctcacagaatgtgattcagaaaatccatcttttctccccttttctctttttaaaggtacagatcattcccttctggggcagggaaaagggggagataagcaggagtctattaatttatggcacagataaccaccccctccattttcctatctttcaagggaaacagagttgctgaaacccagctcctgccattaattgactgagcagggcttgccccaagttttctgagactgtgaaatgttttagagaactttagtagaaagggattcaggggtaggcagcccgaagtttcacagcccctcccacccccaaattcttggaatcagaaaatgtagtcttccaaagtaggtcagtttgtcagtgagcagctcctctgaaagggaagggagcagaggccttgtcctgatagagggcggattcatccagggctttcggctgctggggccccaggggcacaggaagggggggaaatggggagaccgtaccagcctttttgcccgggatctgaaaggtctcagggccacggagcaacactagcctgacaccagactctgctgggccctctcactgctggaaaggaggaggctgtcagtccccacatctagagagcaaccttcctcctggaggaggagggaaagagttcggtgggggaggggctttctgcctctctgagagccttgaagctgtccgtgtcctgggccccatgacctctggggccttggcttccccagctggcagaggattgggccttccctagggccccccctttctccctcccacccgcaggcccatccatctctctctctctctcttgcacacactcttgcctctctcaggcatttgttgtgcagttcctctttgtctgctgggcacgaggggcaacagcatctgcctttccctccctgtgcacacacccaccacccacccccttcactgtcttggaaaagggatgctgtagcctagcatctcccccactatatacacatatacattctctccagccccctccccaagcacatcca

SEQ ID NO: 9757 - DNA, 2300 bp, Homo sapien
tgaaagtagacttgatcctgtttttccccttaccttaatcttagggagggcaacagcatcaaagagcctcttgaattactggtgtgactcctgcttctcttcctgtttctgggccttaattgggaaagccacaaaggatgcttttccctcagtgtttcttttttttttttttttttttgagacggagtctcgctctgtcgcccaggctggagtgcagtggcgcgatctcggctcactgcaagctccgcctcccaggttcacgccattctcctgcctcagcctcccgagtagctgggactacaggcgcccgctaccatgcccggataattttttgtatttttagtagagacggggtttcaccgtgttagccaggatggtctcgatctcctgacctcgtgatccgcccgcctcggcctcccaaagtgctgggattacaggcgtgagccaccgcgcccggccgccctcagtgtttctaagtgtacttttaaatatattttcctccacatagcaagtcgctggcctcaagaggcagcctcagccgaataagctgggaccagtgatggatttccaacaagttcactcatccttttagggtcaaggcctcaaagccaagtgccctgttcttccctgatagtaacatcaagtgatttagggcaattcagcactaataaagggaataagaagataacattttcagcccttttaaccctagtaaaccctacacttagttgaaaggatatatttaaaactggctctgagtctacaagtctcaacccacaatcctgagatgctcacttcatgatatgtgtgtggttctgatttcgggcaacatttttaggtaaccatggctcacctaaaaagccccagctgggaaaactcagattcaagccataaggctttttctatagatagtgaacatttttcctcaggctttgacgggatagaatggggaaaatgggactttaggagaggatatgaatgggaaatggtcccaaagtcctgagtggttgttttcttcccactgaccaaagctggagagggatccctcaggagggtgtgttccggatttcttgcctcaggcccaagactccaaccattttataatggaatctttattttgtgaaagtaagtatgtgcatagctgggcaattgggtaaagtactaataggtggacttcagggatgaattttaggcttcctctctctttcttgcactctcccttgctttctctttctctcttccatatttaggcctgtgtgcacacatccatgcatgttcatgttagcagataatgtagaaggctaccagtatgtttatcccaataggtatgttctctttatatgtatctacatatgtgttgtgtctctgtgtgtgtttatctacatgtatttttatttcacctatatatttgtgtagaagattgtggggaggagggatttttttaaaaaagacattcatatcttcctttaggtatgttatctgattttgaaaaacattatgaaagcctcaaaaagcatttttacaaagcaatttatcagaaaattaaaacaaatatactgagaataagttgatcacttaactgtcaatgaatatcaaatagtaaacacgtgattggaatcagatcagtaggagactttctagagtaatcaaatttttgctgaatttagaaagtctaagaggcccaattcttccctactaagattgtgaccaccaattggctgtgtaggtgctggttaaggacatggacgcttactgtctatgatcccagttccacactagcagctatgtaaccttagacaactaacataacctcttttgtacctcagttgcctcatctgaaaaaatcatgatattagcacctacttcatatagttgttgtgaggattaaatgaaattattcatttcaagtgcacagaataaagcctggcacatagtaagtactcaattaatattattagctgctatgatgattactaatattatcattagattcaaggacaattccagttacctttcctgcagatcctgaaccggctgggggctccagagaggaacagtagggaagaatgtctgtcctgaacatctgtcccttctgcagcccccattttcctctccgccctggcgcacccagcctcagccctgcttcctgtggacgtcaggcagtgatgctcttgccctcaggcctagataaaggtagggtaggcaaggcccagccactgagctcacagaaggcagcaccaggcatccagactggcgggggcacaaggtatggtgcccagcatacaacactgctttgtaca

SEQ ID NO: 9758 - DNA, 2300 bp, Homo sapien
gcactttgggaggccgagtcgggtggatatcctgagctcaggagttcgagaccagcctgggcaacatggcgaaaccctatctctactaaaaatacaaaaattagctggggccgggtgcagtggctcacacctataatcccagcactttgggaggctgaggtggatggatcacgaggtcaagagatcgggactgtcccagccaacatggtgaaaccctgtctctactaaaaatacaaaaattagctgggcatggtggcgcccacctgtagtcccacctactcgggaggctgaggcagaagaatcgcttgaacccgggaggcagaggttgctgtgagctgagatggcaccactgcactccagcctgggtgacagagcaagagtctgtctcaaaaataaaaataaaaaaagaaaggaaaagaaaaaagaaagtaagaaaacagattttagccccaagaagtgggttaaaggttaaaagaaaccatgatgggttgctggagggaaggtgaatctggtgtgttcaaactctagagtgagtcataaatgaacaatggtttccatctgtaccatcctgggtctgaatgctaggaggtccccttgccaccctagtgtcttcaactttggagacaactgggtggttggctgtggacagccattcctgccaggctgaagcttgcttgctttttttttttttttttttgagacagagtttcgctctattgcccagactgtagcacagtagcccaatctcagctcactgcaacttctgcctcccgggtgcaagcaattctcctgtctcagtctcccgagtagctgggattacaggtgtgcgccaccaggcctaatttttatatttttagtagaggtggggtgtcactatgttgactaggctggtcttgaactcctgacctcaggtgatccgcctgccttggcctcccaaagtgttgggattacaggcgtgagccactgcacccagcctaaggcttaagtctttccgatggctcttcagaggtaaatggagcttacacataatctttcaattaggggtcagattcactaatgagtggtgaaataattttcgtggtttttgatcagcatttattaaaatagagaacagaaagattaagtaaaaataaagaatagaacataccagcacacctatgacaagggtaagtatcgtttcataaagcttgtgtttcagttttgcatgtgcatgtaatcgtgtttgtgtgtgtactgggtaccaatgtaaaatgtattcgtgctatgaatctgggtgaaaaacgtttaagtcattagtccaggctattcctccatccatttgttaggtgacatacagcatagtacagcggagccagaatacctactgcacgtcagttcttcaatctttttttttaattgatttatttatttttgagacagagtttcgatctttttacccaggctagagtgcagtggcgcgatctcggctcactggaaactccgcctcccaggttcaagattctcctgtcttagcctcctgagtacctgggattacaggcgcccaccaccaggccgggctaaattcttcaatctttaaagtgaggataataatagtagctacctataggcttgctcaaagttaaatgagttaatatttataaagacgcttaccacagggccaggcactgtgccagagataaaaagatgaatgagaaatagccccagcctcaatgcacttcattgtgggattttctccatattggaaggagggattcacaaaatgcttgtttcctctcaggccttcctcttcgtaatcctacacctacctagtagaaggactgtcagagaaatgagcccagggcgtcccccggtggcgcagcgccgccttcggtctaagcacttggggcaggggggaagggggggaggggggagcctcttggcttcgcactacaattcccaccaagcatctgtccctctctggcctctaataacgagtgcgccttgtggtccagcgtctggcaactttcacgcctagcgtcgcgtataccggaaaactgcatcgtccagaattgcttccgagtcggcgcggcgcaaggcttgctgggagacacataacctcgattttcttccgccatccggctaaatagtcccatgtgcactttgttccatggataaataaacactaggaacgcatttccaccctagatttcagcagaaatgctgaatgtaaaggaatatttgagtaaagtgagttgccgttcttgaagcccgtctcctaaggattctcccggtgtccgcgtagggatctcatgctatatagg

SEQ ID NO: 9759 - DNA, 2300 bp, Homo sapien
gagtgagtcataaatgaacaatggtttccatctgtaccatcctgggtctgaatgctaggaggtccccttgccaccctagtgtcttcaactttggagacaactgggtggttggctgtggacagccattcctgccaggctgaagcttgcttgctttttttttttttttttttgagacagagtttcgctctattgcccagactgtagcacagtagcccaatctcagctcactgcaacttctgcctcccgggtgcaagcaattctcctgtctcagtctcccgagtagctgggattacaggtgtgcgccaccaggcctaatttttatatttttagtagaggtggggtgtcactatgttgactaggctggtcttgaactcctgacctcaggtgatccgcctgccttggcctcccaaagtgttgggattacaggcgtgagccactgcacccagcctaaggcttaagtctttccgatggctcttcagaggtaaatggagcttacacataatctttcaattaggggtcagattcactaatgagtggtgaaataattttcgtggtttttgatcagcatttattaaaatagagaacagaaagattaagtaaaaataaagaatagaacataccagcacacctatgacaagggtaagtatcgtttcataaagcttgtgtttcagttttgcatgtgcatgtaatcgtgtttgtgtgtgtactgggtaccaatgtaaaatgtattcgtgctatgaatctgggtgaaaaacgtttaagtcattagtccaggctattcctccatccatttgttaggtgacatacagcatagtacagcggagccagaatacctactgcacgtcagttcttcaatctttttttttaattgatttatttatttttgagacagagtttcgatctttttacccaggctagagtgcagtggcgcgatctcggctcactggaaactccgcctcccaggttcaagattctcctgtcttagcctcctgagtacctgggattacaggcgcccaccaccaggccgggctaaattcttcaatctttaaagtgaggataataatagtagctacctataggcttgctcaaagttaaatgagttaatatttataaagacgcttaccacagggccaggcactgtgccagagataaaaagatgaatgagaaatagccccagcctcaatgcacttcattgtgggattttctccatattggaaggagggattcacaaaatgcttgtttcctctcaggccttcctcttcgtaatcctacacctacctagtagaaggactgtcagagaaatgagcccagggcgtcccccggtggcgcagcgccgccttcggtctaagcacttggggcaggggggaagggggggaggggggagcctcttggcttcgcactacaattcccaccaagcatctgtccctctctggcctctaataacgagtgcgccttgtggtccagcgtctggcaactttcacgcctagcgtcgcgtataccggaaaactgcatcgtccagaattgcttccgagtcggcgcggcgcaaggcttgctgggagacacataacctcgattttcttccgccatccggctaaatagtcccatgtgcactttgttccatggataaataaacactaggaacgcatttccaccctagatttcagcagaaatgctgaatgtaaaggaatatttgagtaaagtgagttgccgttcttgaagcccgtctcctaaggattctcccggtgtccgcgtagggatctcatgctatataggagggccctgccaggcaccgtctcctctctccggtccgtgcctccaagatggtgagtcttcttgcgtggtgagggtgggggttcgggtgcagactctgggattgtggggaagtgagagcctggagcacggctgaggggtggaccgagtgtacatttcatttgctctgggggtcggcgggatttgcggagaaacaggagatccgagcggcgccttcctggaggctgccggtgcggcttgtggccggaaagggactgaggctgggtgagttgcgccgttttcctaacagttttcccatcctgtcgcagacaaagaaaagaaggaacaatggtcgtgccaaaaagggccgcggccacgtgcagcctattcgctgcactaactgtgcccgatgcgtgcccaaggacaaggccattaagaaattcgtcattcgaaacatagtggaggccgcagcagtcagggacatttctgaagcgagcgtcttcgatggtaagtgggtcaccggcgcgaactgtgtgaggatcccagtatct

SEQ ID NO: 9760 - DNA, 2300 bp, Homo sapien
ctgcactccagcctgggtgacagaaacagaacaagattccgtgtcaaaaaaaaaaaagcaacagaccagaaggccatgaggtcaaacaaaacaatgttttgtttttgttttgagatggcgtctcactctgtcgcccaagctggagtgcagtgatgcaatctcagctcactgcaacctccacctcccgggttcaagcgattctcctgcctcagtctcctaagtagctgggattacaggtgcccaccatcatgcccagctaatttttgtatttttagtagagacggtgtttcactatgttgactaggctggtctcgaactcctgacctcaagtgatctgcccgcctcggcctcccaaagtgctgggattacaggcatgagccaccgcgcccagccgaatgttttgttttttaagatggaagatatcccagcactttggcaggctgaagcaggtggatcattccagcttgggcaacaagagcgaaactctgtctcaaaaaaaaaaaaaaagaaaagaaaaaaaaagagagaaagaaaccctaggtaaaagtctgagccccacctcccaatcacctgatcacctcaaccactgtcaccaggtggatgaccttggagaggtcacacacttctagttctgtaaaatggggagttatattgcctaaatcatataatttttatgttaagtgacacattctctaaggcactaagtttgaggacatactttgtaaatgaaatgatatatggaaatgtttgtatatgttaatggttttgttgttgctattattattatgactactatacacatggtctggagaaagccaacctccccaaagcggagattctccagtagagaacaggccctctaggttgcatatcaatagggagcatgtttaaggaatgttagccggtagtctttgctaggtgtgaggggtgaaatttttctttatcaaggctcaactgttttcgaagtcttcaggcttgaagttctggagaaaacaactaggctctccgggcgagatcccgaataccagtttaagggatttgaaatgcaaggccgtctgggactccactgccacggatgggcaccaggcggcgccggtcggatccgtcccgggactagcagggctttgggcagcaacccgcagggagcccgaccgcctctggccaggtccgggcagctggtgggggaggttccagaggtccacgccattcgtggacgcagtctctagtgtcctctccgcgtcccacttcactgccccatcccctttcctgcgagagcctggacttggaaggcacctgggagggtgtaagcgccttggtgtgtgcccatctgggtccccagaagagcggcgggaactgcggccgcccggacggtgcggccagactccagtgtggaaggggaggcagctgttctcccaggcggccgtggggggcagcagaggggacggcgacaggtgcgggagcccctcccggggtagaagtggaaaggcgggctccggggtctgttcccaggctggaaaccacccccgccccccatccaaatccccgggagaggcccggccggcgccgggtctggaggaggaagcggccagagacagtgcaatttcacgcggtctctgtggctcgggttcctgggctgggtggatgaattatggggtttcgagtctgggagaaactgaggtggcctggacgtgaggcaaaaaacaccctccccctcaaaaacacacagagagaaatattcacattctgagagaaaatccaccaagtgaaccaaccggctaggggagttgagtgatttggttaatgggcgaggccaactttcagggggcagggctttggagagctttccactccctcattcattacccttccctggatctgggggctttcggaatctcgacctccccttggcctatctcctgcagaaaaattagggtgagccccatcctcgatctgctccgccaagttgcgggaccgcggggcgtggcacgctcggggcaggcggtccgaggctccgcaatccctactccagcctcgcgcgggagggggcgcggccgtgactcacccccttccctctgcgttcctccctccctctctctctctctctcacacacacacacccctcccctgccatccctccccggactccggctccggctccgattgcaatttgcaacctccgctgccgtcgccgcagcagccaccaattcgccagcggttcaggtggctcttgcctcgatgtcctagcctaggggcccccgggccggacttggctgggctcccttcaccctctgcggagtcat

SEQ ID NO: 9761 - DNA, 2300 bp, Homo sapien
ctggtcacttagttaaggtgatatctgtcaggtttttctactgtaaagttactatttttccattcacaattaatgaatgtcttgggataattgcctgaatcaattattgttatgatagttgccaaatgataattttctaattccattattccttctgcatttgtttgttggcattctactgttaggaagagtctttccagctgagcacagtggcttatgcctgtaatctcagccctttgggagccagtgggaaaattgcttgggcccaggagttcaaggttacagtgagctatgatggcactactgctctccagccagtgcactcactctgcacaacagagtgagaccctgtctcttaaaaaaaaaaaaaaaaaaaggccaggtgcagtggctcatgcctgtaattccagcactttgggaggccgaggcgggcggatcacaaggtcaggagttcaagaccagcctggccagcatggtgaaaccctgtctctactaaaaatacaaaaaattagccaggcatggtggtgtgctcctgtattcccagctacttaggaagctgaggcaggagaatcacttgaacccaggaggtggaggttgcagtgagctgagattgctgccactgtactccagcctgggcgatagagcaagactctgtctcaaaaaaaaaaaaaaaaaaaaaaaaaaaaaaaggtcttcctttcctatttactcttatggatacttattttattctagtcaatggttataatcctttacaatcattatttattttagccagcccctccaagttggctcctgtgttctttgggctgtacccttaattctttgagtcttgtcttgtttgcacaagatgctctgggcttatattatatttcccccatcccagccatttctccaaggaatgtttccttttagtggagaatgatatttagaaaccaaatgctgaggctgggtgtgctcattgccattgagttatacctttaccttattgactggtttctactgttctattcagagacccctggcacaagatccctgccctggacccagagaagctcaatgtcttccggacagtacgggagatcacaggtgagtggcagagagtttgccctttctagaagaataggtgaaccactggcataaattgcggtataactacttgagaaaatcacgtcccaagttataggggaggagccaggagaacccaagaaagaagaaggctccctgcccatatgcctctctccaacccctcaggttacctgaacatccagtcctggccgccccacatgcacaacttcagtgttttttccaatttgacaaccattggaggcagaagcctctacaagtgagtaaagggtatggaggaaatggcatcttcaggcaatgaagcctgtgtcataggcattctttagtaaaatacaaggcactgtctcatacagcagtgcctcaaaaccaaagggtttcagagtttcacgaggaaaaggcaaaaggagggggattccctctcagtggatctgactagcactgagcaaatttcttgactaacatgaatcctttgaatagttaatgttcccttagtagtctctcctctcatcctgtctccttattctcagccggggcttctcattgttgatcatgaagaacttgaatgtcacatctctgggcttccgatccctgaaggaaattagtgctgggcgtatctatataagtgccaataggcagctctgctaccaccactctttgaactggaccaaggtgcttcgggggcctacggaagagcgactagacatcaagcataatcggccgcgcagagactgcggtgagggaaagggtctgctaggtggtgagaatagggagtcagggaggagagggctgaaaggactattctgccctagacgtgggagtagggttgagggatggaaccaaggagaagggggctgttaggctggaagcagtaacgaggaagaataatgaagagagggcttgctgggagtcctcagactcctctcctaacccaccccttcctttccagtggcagagggcaaagtgtgtgacccactgtgctcctctgggggatgctggggcccaggccctggtcagtgcttgtcctgtcgaaattatagccgaggaggtgtctgtgtgacccactgcaactttctgaatgggtacagtaaggggagccagtcaaggatgggtgggggtggggccctgcaatggaactgttcaggtggcatacaataaaagtctttagacagctttctgcatgtgccttggtgggattgaggtaggagacctgtggt

SEQ ID NO: 9762 - DNA, 2300 bp, Homo sapien
gaatgggtacagtaaggggagccagtcaaggatgggtgggggtggggccctgcaatggaactgttcaggtggcatacaataaaagtctttagacagctttctgcatgtgccttggtgggattgaggtaggagacctgtggttgtgagatcggagcatgaaggtcaggacttggaagtgacccccccctccctttattccccactacagggagcctcgagaatttgcccatgaggccgaatgcttctcctgccacccggaatgccaacccatggagggcactgccacatgcaatggctcggtatactagtagcaccaggatctccaagggagacagagaaggggcaatacttggagcatctggggaatgatatggctaaggatagcacagagaggccagataatgctagggcctgcagatagaagatcctgaatgtctgggttggtctttgctgggaggtatggaattgaccttgggatctgattcttcctgaccttctctcttccactcagggctctgatacttgtgctcaatgtgcccattttcgagatgggccccactgtgtgagcagctgcccccatggagtcctaggtgccaagggcccaatctacaagtacccagatgttcagaatgaatgtcggccctgccatgagaactgcacccaggggtcagtgatgggataataaggagagggggtcaggtggaagggtaggagcacagaactagagtgagggaagcagaaagaagagagaggctgtgattcaagaatcactcccagctggccgggcgcagtggctcacacctgtaatcccagcactgtgggaggccgaggtgggtggatcacctgaggtcgggagttcgagaccagcctgaccaatatggagaaaccctgtctctaccaaaaatttaaaattagcccggcgtggtggcgcatgcctgtaatcccagctacgcgggaggctgaggcaggagaatttcttgaacccaggaggcagaggttgcggtgagctgagattgcatcattgtactccagcctgggcaacaagagtgaaactctgtctcaaaaaaaaaaaaagaatcactcccagctgtgtagcgaaggattggagaaagggaaaatcagtaacagcacaaaattacaccacagttttgggaacctggaataacctcagttcaagggagtttcacagaagaggggcttggggagagctagtgagctggaggtggaggccatgtcttgggatcagctctgggctccaggatgggatgccacggtaagttctgaaacaagcttttatatgttaggctgttgaaattgagcctctgctgtccaagctctcatttaaggtggtgactttcttccctaggtgtaaaggaccagagcttcaagactgtttaggacaaacactggtgctgatcgggtatgatggggttggagattctggaaactggggatatttgggagttgggagagaggtggttacctggagagaagagggaggctgtcttcattctggccttttatgtatgcagtccactatcactggacacttgggactcaagaatgcaggcttctggacttcccttcctaaaattaactttcagtagtctaagactggtccagatttaggttggtcccttcagtgcttaaggatatatatgtgaatgttaatttcttgccccaggtcagcatcataccttcaacacaagtatagttgacatttgtaaggaagatgcaaacccaggataatgttgggtttctatatatcccatagcaaaacccatctgacaatggctttgacagtgatagcaggattggtagtgattttcatgatgctgggcggcacttttctctactggcgtgggcgccggattcagaataaaagggctatgaggcgatacttggaacggggtgaggtgagtacttagcttacttttgttttttcttttctttttttgcatgtcctggaagtctctttatagcttaattttgagtggtaccctgtgcacccaggggtcagtgatgggataaatgtcactcccctcctctttccccagagatttgatccctttcttcaaggaagtagtgtggtcccctagaagaacactggtcagagaaatgggaggcatgcattctagtcctgattttgccattaatttgccacatgactttgaagaagttacttatcttctctgtgcctcggtttatgcatctatacagaggaaataacatttgtccttccaggatggctgtaagggtaaagggggatgatgtatgtgaaagtgctttggaaagcacag

SEQ ID NO: 9763 - DNA, 2300 bp, Homo sapien
aagggggatgatgtatgtgaaagtgctttggaaagcacagagcactgtataaaaggtactcaaggtggtaatagtactaccaactctccctagctgtccccttccccactttgtgctcctccatcaaagggaaaacccaacccctttgattcctgatctcatgagcacaaataacttcctcagttctcagggtctgtacctcaatatgcctataatccattccaggactaacggtgcttcctcttcctgccctttcagctgtgctgcttttggcattcacctatgaggagcgggttggagtgggacatgggaatggcctttcctgagtaactccttcccatttgctcctcagagcatagagcctctggaccccagtgagaaggctaacaaagtcttggccagaatcttcaaagagacagagctaaggaagcttaaagtgcttggctcgggtgtctttggaactgtgcacaaagtgagtgacccataggaattctggagaggtggggaaggcatctagggcaaaggggtgaaagatttttgcataggattgacctagggagaatgaccttatgccaactcctgccccaaacttcccagggagtgtggatccctgagggtgaatcaatcaagattccagtctgcattaaagtcattgaggacaagagtggacggcagagttttcaagctgtgacagatgtaagtgaaggaaattctgtatgccgctaggagagaggacaatattagatacaatcatgtagaagcagggtcctgtgcttctcagcagctactatgttagccagaatgttgggggtgggggggcctgggctggctgtgcacatgctgagtgtatgtgaacctgttggtttcctagataataccttttgtgtctcttagcatatgctggccattggcagcctggaccatgcccacattgtaaggctgctgggactatgcccagggtcatctctgcagcttgtcactcaatatttgcctctgggttctctgctggatcatgtgagacaacaccggggggcactggggccacagctgctgctcaactggggagtacaaattgccaaggtgagagaagcctggaggaattctgtgataagaactgcttgtctgggggccagccaggaaaaagtgagaaggttgaagttctgagaggtgaggtccccaacccccgggctgcagactggtaccagtccatggcctgttaggaaccaggccacagagcatgtgagcggcaggcaagcgagtgaagcttcatctgtatttacagtcagtccccatcacttgcattaccgcccgagttccgcctcctgtcagatcaggggcagcattagattctcttaggagcttgacttctattgtgaactgtgcatgtgaaggatctaggttgtgcactccttatgagaatctaactaatgcctgatgatctgaggtggaaaaatttcatcccaaaaccaaccctccccttcccctggaaaaactgtcttccacaaaaccagtccctggtgccaaaaaaggttggggaccactgctgagaggtaccttcaagatttgggggaattccagatctcagtgactgattcccccaaccttaagaatactttcttcccctatacctacagggaatgtactaccttgaggaacatggtatggtgcatagaaacctggctgcccgaaacgtgctactcaagtcacccagtcaggttcaggtggcagattttggtgtggctgacctgctgcctcctgatgataagcagctgctatacagtgaggccaaggtgaggagacacaaagggtaaggaggcgggggtggagtgaagcatggggatagggagcagccagtggtctcttccagaggcaagcagatgcttcatggtaagttcaaggagagaaggctgcagatgccagatattttagttcagagggcaacaaataaaataatgatcaagaacttgggactggccgggcgcggtggctcacgcctgtaatcccaacacttcgggaggccaaggcgggtggatcacaaggtcaggagatcaagaccatcctggctagcacggtgaaaccccgtctctactaaatatacaaaaaaaaaaaaaattagccaggcgtggcggcatgcatctgtactcccagctactcgggaggctgaggcaggagaatggcgtgaacccaggaggcggagcttgcagtgggccgagatcgcaccactgcactccagtctgggcgacagagcgagactccgtctcaaaaaaaaaaaaaaaagaatttgggacttggaaatccta

SEQ ID NO: 9764 - DNA, 2300 bp, Homo sapien
gaaagggaggaaacctagcagaggaaagtgtaattttggtttatgactcttaaccccctagaaagacagaagcttaaaatctgtgaagaaagaggttaggagtagatattgattactatcataattcagcacttaactatgagccaggcatcatactaaacttcacctacattatctcacttagtcctttatcatccttaaaacaattctgtgacatacatattatctcattttacacaaagggaagtcgggcatggtggctcatgcctgtaatctcagcactttgggaggctgaggcagaaggattacctgaggcaaggagtttgagaccagcttagccaacatagtaagacccccatctctttaaaaaaaaaaaaaaaaaaaaaaaaaaaactttagaactgggtgcagtggctcatgcctgtaatcccagccagcactttgggaggctgagatgggaagatcacttgagcccagaattagagataagcctatggaaacatagcaagacactgtctctacaggggaaaaaaaaaaaagaaactgagccttaaagagatgaaataaattaagcagtagatccaggatgcaaaatcctcccaattcctgtgcatgtgctcttattgtaaggtgccaagaaaaactgatttaagttacagcccttgtttaaggggcactgtttcttgtttttgcactgaatcaagtctaaccccaacagccacatcctcctatacctagacatctcatctcaggaagtggtggtgggggtagtcagaaggaaaaataactggacatctttgtgtaaaccataatccacatgtgccgtaaatgatcttcactccttatccgagggcaaattcacaaggatccccaagatccacttttagaagccattctcatccagcagtgagaagcttccaggtaggacagaaaaaagatccagcttcagctgcacacctctgtccccttggatggggaactaagggaaaacgtctgttgtatcactgaagttttttgttttgtttttatacgtgtctgaataaaaatgccaaagttttttttcagcttcctgtctgtcaaatgaagacatttcgtatgttagataagagatctgctcctcagcagtggatactcacctttctgtgttctgacagtgctactctgtcccatgcagctttctctagtcctactattacttctatttctttagaacaaccatagcgcatagtccttttcattaagggttttagtaggaatctacaaggcaaccaattgggaataacaaaaagaacctacgtgctttaggacttataaaaagccctataagccctccttcagaggccaaacactgaaacctccagatgcttctgaattcattatcttagaaaagtcatcaaatctttttattttttcacggtaagaactctcaacaaacatgtctttctgaacacttcccttaggtgctccatccaggtgcctgttattggaacaataaagtcatgttacttcattaggagtccggcctctagattgcgaggcctttaaatggatgatccctccggtgtctggctgcccagttagcccccgttaccagcacccttggtcttcttccacctgtctgcccctccctgttctcccagcttcggaggacgactggaccggctgggcgggtttcgccagccgacccagggatccgaagaagggcgcacccagcctccccgacctaggtgtagacactgcccacccgctgcggctccactctactccacccctgcccgctcgactttaaacctatttccccgccgtagctccgcccctctcccctcagcccgcccctctctgttactggctctcgctcagcgttctcggtggaagtggtttttccgggagagaccacgcttcccctcaagctccccaacggctccgccttcccgccggagcctgacccttcccagagtgcccggcgattccggcgtgcgaggcccttggagggcaaggccccagggcctggcttaggagcgcgagaggcaggctgggaattgtagttcgaaggccctcgagagcggctagagtctggcggccgagaggactagttgtcccagcgtgccctgcgcctcagcccgcgcgctcgcagcttctcgctctcgcctgcctgcccgctcccttgcttgctcgcgctttcgctcgccctctcctcgaggatcgaggggactctgaccacagcctgtggctgggaagggagacagaggcggcggcggctcaggggaaacgaggctgcagtggtggtagtaggaagatgt

SEQ ID NO: 9765 - DNA, 2300 bp, Homo sapien
tggatttggggtgataatggtatatcaacgtaggttctattgttaacaaatgtaccactctggcagggtggagtgatgtttataaagggggaggctatatgtgtgggaaatgtctatacctttctcaattttgctgtgaacctaaaactgttctaaaaaattaagtctattaaaaaaagaaaaaaacagccaagtgcggtggcttatacctgtaattccagcactttgggaggccgacgcaggcagatcacctgaggtcaggagatcaagaccagcctggccaacatggtgaaaccccatctctactaaaaatataaaaagccaggcttagtggcgggcgcctgtaatcccagctacttgggaggctgaggcaggagaatcgcttgaacccaggaggcggaggttgcagtgagccaagatcgcgccactgcactccagcctgggtgacaggagtgagattccattccgtatcaaaaacaagcaaacaaaatttccctcaaagagcttataaactagttggcaatcatcagttgaaatcttggtggaactgatacaaaataattctgctaggattttttttgtttcaaaaaaattgtcatatatatttgggtggtgacaatactacaactacttagaaggaacctaattttaaaaacgtttttcagggattgaaagtgaaatgctatcctggaatataataaagggaaaccacaaaaaaagagggattgtaacaatcacatacaaaatgttacagtattttaaaactgtaagatgaagtctctatagggaaagggttctttttcatcccccattaactcaaaagtttcctgtagccaaatcttaggggatctggttgttttccagtgcttctcacctgagcatacaatcaaactgggaagttctttatcttaacaccaaatgtcatactttccctagatttaggtaattttctccctatgtccgttggttcgctcttcacccctagagaatcactgcataggtcactgcagcctcgacttcctgggctcgagattcccccacctcagcctcccaaagcgctgggattacaggcatgagccaccgtgcccagcccgctgacgtattttctgaacaaatgatgcattgtagccaggaatctctagtgatattttgcttcgggcatcgtgggggaagaccataatcagctattttattcttgaaatttaggaaaaataattgctctatcttaaacagtgagaaaatattttttgaagtatggcagctttcccgaatccccactttatatcttcctatgttctgaaatcttaggaccttcgatggttccggaatcgaatcaccctgcagcaatttattttagaaaataaggcaaaccggctgggcgcggtggttcatgcttgtaatcccagcactttgagaggccgaggcgggcggatcgcttgagctcaggagttcgagaccagcctgggcaacacagcgaaacctcgtctctactaaaaatacaaaaattagccaagtggcgcgcgcctgttgtcccagctgctcgggaagctgaggcgggagaatcgcttgtattcaggaggcggaaattgcggtgagccgagatcgcgtcactgcactccagcctgggtgacacagtgagatcctgtctcaaaaaagaaaaaaagaaagaaagaaagaaaagaaagaaagaaagaaagaaagaaagaaagaaagaaagaaagaaagaaagaaagaaagaaaagaaggcaaaccagtaaaacaagaatttctgtacagtccgcgcctatccatagcaaaatggaggacttctccagggaactgcaactcccaagaagcaatgcgagggaaggtggcggtcactattttttccccgtctgcacctctaggtccaatattggaaataggtgctgacgtttaaataacacagcgtcctcatactaaatctgggggggaactggtaactcgaaaaccaaatactcggtcttccgaaagaactaactcaacctacccttctacaagagggtccgaaaaccactgttacgcccattgggtagccccgcccttggggggggcaaagggcgtgaaagcggaagtgacgacacccggcgctccattaaatagccgtagacggaacttcgcctttctctcggccttagcgccatttttttgggtgagtgttttttggttcctgcgttgggattccgtgtacaatccatagacatctgacctcggcacttagcatcatcacagcaaactaactgtagcctttctctctttccctgtagaaacctctgcgccat

SEQ ID NO: 9766 - DNA, 2300 bp, Homo sapien
aaaaaaagaaagaaagaaagaaaagaaagaaagaaagaaagaaagaaagaaagaaagaaagaaagaaagaaagaaagaaagaaaagaaggcaaaccagtaaaacaagaatttctgtacagtccgcgcctatccatagcaaaatggaggacttctccagggaactgcaactcccaagaagcaatgcgagggaaggtggcggtcactattttttccccgtctgcacctctaggtccaatattggaaataggtgctgacgtttaaataacacagcgtcctcatactaaatctgggggggaactggtaactcgaaaaccaaatactcggtcttccgaaagaactaactcaacctacccttctacaagagggtccgaaaaccactgttacgcccattgggtagccccgcccttggggggggcaaagggcgtgaaagcggaagtgacgacacccggcgctccattaaatagccgtagacggaacttcgcctttctctcggccttagcgccatttttttgggtgagtgttttttggttcctgcgttgggattccgtgtacaatccatagacatctgacctcggcacttagcatcatcacagcaaactaactgtagcctttctctctttccctgtagaaacctctgcgccatgagagccaaggtgagcggttcctggtagtaagcttgggaggtaggagttggcgagtagtagcgaggagacgaaggcaagtccgccatacctcctgaactactgggtttcaagggtgcccaagagctggtgggagagagaaggtagtttgtgagagagctagcggttaagtgctatgggtagagagggtgggcttagaaaagggtggaattctgatcttatgttgggagggtgtccaagttactgatgtagttgttacgaccaatctttcatacttcttggttaagaatctgtccggttctaaagagtgcatttcatatccttgctaagcctactaataagcttcatcccttttttttttttttttttttaattatctgctgcttgtgatcggttgctagtggaggaagaagcgaatgcgcaggtacgttgagactttgccagcccaggaggagggaagttccttggacaaaacttaggagaaacatttggtttggaaatcttaaaagatctttaggagaaaaacgtttgagtgttttctccctggagccaggatttaacagaacagagaacgatagaaccgtagtgcttgttcattttaccacctcattctttatgtggacgtttgatttaatgtgggagggaaaggcaactctggtttgaggtgtattccattcctgtgtctgcttttcaggctgaagcgcaaaagaagaaagatgaggcagaggtccaagtaaaccgctagcttgttgcaccgtggaggccacaggagcagaaacatggaatgccagacgctggggatgctggtacaagttgtgggactgcatgctactgtctagagcttgtctcaatggatctagaacttcatcgccctctgatcgccgatcacctctgagacccaccttgctcataaacaaaatgcccatgttggtcctctgccctggacctgtgacattctggactatttctgtgtttatttgtggccgagtgtaacaaccatataataaatcacctcttccgctgttttagctgaagaattaaatcatcttgtctattatgttttttatggttccatcgggtgggggttttctgtcattagagtttgccctgtcactacctgtgctatggagggtatcaaagctataaaggcaacagcccgggttacgtggtgtggtttgcatctcgctggagttggatgggatatggtacgtctctggaggcaggttttaggtttcgcgggttattaggggccaatgctggtaccgcccctttccaggagggctgccttggcgactaccgcttagaccatgtcgtgcctttgggttgggttgccatagtgacacgcaaagcgtgctgggaacgccctgcggcatgtcgcacgcgtacttcatacaccatagagtatggttccgggtctgctggctagagcgtcacttcttccgcaggaagcggaagagcgatcgggtaggcggctctttgtcgaagctagaggaccggcaggcggcagcagcaactacggcggcggcggcaggtgagggaggcgggagacttaggtggaggccgcgcccggaggggaggagtcggggccggcccagcggctgggctcggccaggccacagaaggccccccagaaccgagctggctcgtcctcacacccc

SEQ ID NO: 9767 - DNA, 2300 bp, Homo sapien
tcccatctttgtgagctgagatcagagtaccgtatctcaccctctgcctcttggaggtgattatggtttacatataaatgcagattgcaagtccaggaagtttactctctctcctcctgtaggcctcatcctgtaagacacttcctctaacaaatgggcatcccttcctgttgtccacttactgcttatcaccaccaggtggcacctgggcagcagaattgtcagtgggcggggacccaccctgtttacttgtgttggtaactgcattgcagctgctgatcctgtggctcctgggccccagctgggacaagaacttcctgaggatgaagttttatcccctatataatttctgatgatctggatgaggtgaggaagggagaagtttggaaaagaacctccataggtcaccctctccattcccccattctcaggaacctccttgcctactccagtgcttggcaaatttcagtttatagagaggtttctctctaaggttcatccatgttccttctgtagttctgctttatcagttggtgagcaggtcactcataattcctccaatttccttgtttcccttttctacctgcttacctctgggaatatggaggatataggagacagaatattgtttcttaaatagttctgcaaactgaatgaagcagtcaagatactgctagccctagggaagtagagaaaaggaagtgaaaaaatttaagtgatagaggctgagcagggacaggttttaagcagctttggtaaacacaggctgatgaaatctatgccctgcagaaccagataaaatttatcagctgcaggcctcatcctgtaagacacttcctctaagaaatggctagtttcttcccagtgatcaaccccagttcttctgctgcatctgacagatttacataatatgccccatatatactgcattaaaaggtaatcatcttatgaccaacacttccctcatcaacttccaattagtctagttcctagatcctaggacaacactccacctctaacgccagttaactagtaacaatagtcatcggtgtaccctgcactttttccttcctaaacctacaccgtacactgtgggactgcactagttctgcacctgactgtatggcaaaccttccttctaactcaggcaaatgtgaaaaggaattgtctttcccttactcttgatccctcattttagtgtcctagaagttcttcagggtcagaaaattattggaaaatgtaataatttgcgctgcctccctcccttttggagccaactagtcttacatccatcctctaagatagagatgacttactaactcttggaaatttccaaaaagaaataaagcctcactttctattcactctgctttttttccccctttccctgaaggctggattatctcaactctgtaattctctgactctccagttttctccagggtcagtcgttacaccacacaaagaaggtaggggattagggacgggatagacggggttagttttcaaacactttcattccaaatacgatcgtatcctttccttttgtaagggcaggcaggaaaaagttgaaggataaggaatgtgcttagagtatgaaaactagagaaagtcggcaaaagaacatatatatatatcccagaccaaatcctgccaaaccgaatgagtagagggaaatcctgaagctccacaacccctcaacttcgcaacttgggctttctccaaaaccaagaaattggcggtgcagctctgcatgacgtcataccacaggcactccaatcccacgtgggggagctcttggtcccgcctctcctgaaatggtgcgccacgcctcctcctctttattaccaatcgaatgccgcccctgagcccctttcttccttttcccgccatctcagacctcccatcttggccttcgggcccaatcagggaggccctacctatccgaaacccggtccgttccccgcggaagaggggtggagtttcaaccttttaactccaccttggtctgtgcagcgcggaccaacccaaatcgccagaaaggaggggcgtggcttgaagtcccctcctccatcccggggatcacgttttgcctgggggagctgatcgcaagactaggcaacctccagccagtccctgggtcgggcggatcctcccagaggtggcacaatggagcgatctccaggagagggccccagccccagccccatggaccagccctctgctccctccgaccccactgaccagccccccgctgctcacgcaaagccagacccaggttctgggggccaacctgctgg

SEQ ID NO: 9768 - DNA, 2300 bp, Homo sapien
tttatccccgggtacccgctaggacccagccccggcccctggacgaccctcgggcagccaccttcaagcctccagccgccagactgcagcgcggcagaggcggctgctggacggagggagggctacgggaggaggtggtgcggctgctgcagtgcccgcggcgcacactcccccgcactcctcggccggccacacccttttccggactgtgggctgcgcttgttccgttggggcagagacccttatttctgcggcggccgcgtctcctgtgctgaggcggatgccttctctctagtcttgcagaggcgaagccggttacccggcccctcccagcagaggtgccagtctagggggagaatggcagcagagaggaatcaaaattgacactagacagacacagccaagcttcccaggccctggactggaaaggggaggagaaagagggccaaatggctctaggggacctgtagcctaggcagcaagtgtttgtctcctcctcatcatcatggaaaccaatcttcctacccccaatacaaagcgcaggtgtcctttcccttaaaaggagtcacacagagaaagatagaggaaaacacacacacacaccccaaaaaacccacaaagccaggcctaattaggtcttctggcccctccctgactcaaggaaggacttgcttccctcttcaccttcctgctctagaagccccgtctgaggggagttgagaaggctggaaaaggggacttttttttttttcttttttgagacggagtctcgctctgttgccaagctggagtgcagtggcccgaacttggcacactgcaacctctgcctcttcaagcgattctcctgcctcagcctcctgggtagctgggattacagtcacgcgccaccacgcccggctaattttgtatttttagtagagacagggtttcaccatgctggtcaggctggtgtcgaactcctgacctcgtgatccgccggcctcggcctcccaaagtgctgggattacagatgcgagccaccgcggccagcctggaaccaggactttttaaatcccaggattccctcaaactccaatttgactggacctccccctccagaaagaatgcgcccttctcctcctcccgctcctctctctctcagcagctgtcatttcaccacgtccctgagctatccacagggcaacagcgtgacctctaccttgtcagctccccttattagagagacatcagcccccaaactctgtgaggaatgaacctttggggcatcctcgcccctcgcccaccctgagtgtgaggagtcacacacactccctctcctctgtggcacaccaccagcatcttagtaggaaaccagaggcgagggtgtgctgcacgtcactgtctctgccttccccacctccaggtcagcttcccagacgtggaaaaggctgaatggctcaataaggtgaggattgatttgatttttagtcttcatgaggggagaatgggaatttgtttcttcttgccagacccatcctcaaccctcagtgctctccgtggggaggattctgaaggaacttgccttgagagggaagactggactctcctctgaccatctctctttcctcccagattgtggcccaggtctggcccttcctgggccagtatatggagaagcttctggctgaaactgtggctccggctgttaggggatctaacccccatctgcaaacatttacatttacacgagtggaactgggtgaaaaggtatgtgtggaggagggaaagtgaggaggtaggctagggagggtgagtggcccggagtagactcaggtacttctccctatccctgccctctctcaggaatttctctctccctagccattgcgcatcattggagtcaaggttcacccaggtcagagaaaagagcagatcctgctggacttgaacatcaggtaataccactcaccactcttactgcttccccttcaatgtgtcctgttcagtccaggctacttcactccccctccccgcaacttcagccaaggactaactctcttggttctcttcttcaccaatccccagctatgtaggtgatgtgcagattgatgtggaagtgaagaaatatttttgcaaagcaggagtcaagggcatgcaggtaggccagatgtcaggggccacataatagggaatgtttgtcctgcgtttcatgggatatggggaagtgtgaggttggaaagaccaaggctgagaaagtctgggaggacagaagagggacttttctggggaaaggctttgattttctcttcttgcctcagcta

SEQ ID NO: 9769 - DNA, 2300 bp, Homo sapien
ttcatccgacgcccggtaagggaaaacaatgaaggggtatggggaagcaggagaaacagaggactgggaggatgagggcagccagtgaaggggaatgagaagggaactgacaagaaggccgaggggttctggcaactgtttgatgggtatgaccacaccccataggatctgtcctgacccctgctctttccctccagaccctagacatcaactggacagggatgaccaacctgctggatatcccaggacttaggtatcaaggacttactgagcacctgctgagtgttccagcgctgggttgggggtttaagggacacagagcagtcaaagatgctgcttgtgtcctctaggagcctcaacttcatttggggagcaaagacaaatacccctgcaaagtttgatactgtgatttttctttgggttgggggagcaggaagggaatgcagagggctgaagactgcaaaaggcaatggggatggcagtgaagaagggagagagcagtaggtggggaattagggtagaagagtagcacaaaggattttcacaaaaggactttcttacagctttaggtctctcttgggtgtgggaaacatagttggggttaggagaaaattggaagttgaggccatacccactcctttctactcccccattcagctcactctctgacaccatgatcatggactccattgctgccttcctcgtgttgcccaaccgattactggtgccccttgtgcctgaccttcaagatgtggctcagttgcgttcccctctgcccagggtatggcctttcccccactagatagatccttctctcaggaaccccttgctgggtccttagtttctcaccatctgattccttcctccagggcattattcgaattcacctgctggctgctcgagggctgagttccaaggacaaatatgtgaagggcctgattgagggcaagtcagacccatatgcacttgtgcgtttgggtacccagacattctgcagtcgtgtcattgatgaagaactcaacccacagtggggagagacttatgaggtgggagagttgagcagctctgtgaaatggggaagccccaggaggttgtgagagaagatgctgattggatgatcctcacagctgcagccccatgagacactcagccttctgtgttccccaggtgatggtacacgaggtcccagggcaggagattgaagtggaggtgttcgacaaggatccagataaagatgactttctgggcaggtgagactctgcctgttaggattctaaagcccatgctggccaggcacggtggctcatgcctgtaatcccagcactttgggaggctgaggcgggcggatcacgaggtcaggagattgagaccatcctggctaacacggtgaaaccccatctctactaaaaatacaaaaattagccgggtgtggtggcgggcgcctgtactcccagctactcgggaggctgaggcaggagaatggtgggtgaacccgggaggaggagtttgcagtgagccgagatcgcgccactgcactccagcctgggcgacagagcgagactctgtctctaaagaaaaaaaataaaaataaaaaaaataaagcccatgctaccgaggttctggaggtaattatactcactttctgggcctgggaatcatgtatcattttccttcctaacctccccacccccagcccctaccatgcacatactcacgcatgcaggtgaatatcttctgagaggaataagggagtctgagatctgccagtcatttctgggtgggtgagtggagggccactgacatgctgctaattacaacactacccttttcttcctttcactaccctctcccccgccaaccctcagaatgaagctggatgtagggaaggtgttacaggctagcgttctggatgatgtaagttgggagaagaggaaggtgggggctgatctcaccctttgggtagatagtagttgctacattggtagggaagtagttgagcaggtatctgatctctactacatctcaatttcttctagtggttccctctacaaggtgggcaaggccaagttcacttgaggctagaatggctgtcacttttgtcagatgcagagaaactggagcaggtaagccacatgggaaataggaagctggcaggggagaaataggtagctggaagtgtaggggacttggaacggggaccaagatctgactactaccacccctccccaggttctacagtggaattggggagtctcctctcgaccagatcccccgtcagctgccatcttagttgtctacct

SEQ ID NO: 9770 - DNA, 2300 bp, Homo sapien
tggtggcatgtgtcagtaatcccagctacttgggaggctgaggcagaagaatcatttgaacccgggaggtagaagttgtagtgagctgatttcaagcactgcactctagcctgggtgacagagcaagactctgtctccaaaaaaaaaaaaaaaaaaaaaaggaacagaagaatagcaacaattacatatgaatttgtgggagtaaaatatccatagtataggactaaggagggtcagagaaagggataggctggagtaactagggagattttgtgaagcaaaaaattggattttaattgagtcttgaaggatgagtaggatttaaataggccgagggaagagaatgaggactttccaaatagtgggagcagaatgaacaaaggtggaaggggccatggattgggcagaggactataaaagatggctctggccgaggtgggcggattgcctgagctcaggagtttgagaccagcctggggaacaccatgaaaccctgtctctactaaaaaatacaaaaatttagctgggcgtgacggcatgcgcctgtagtcccagctatttgggaggctgaggtaggagaatgggttgaacccaggaggtcgaagttgcagtgagccaagatggcgccattgcactccagcatgggcgacagagtgagactctgtctcaaaaaaaaaaaaaaaaaaaagatggccctgagtggagcaggaggtttgtgattggtacagagaggaatgaagttggagccatgttatcattttcacagtatgcctccctttcccctaatcccttcactacagtccttcctcctgtgcctgtaggtgaaggatgattccagggccctgactttaggagcactgacgctgcctctggcccgcctgctgactgccccagaactcatcctggaccagtggttccagctcagcagctctggtccaaactccagactctatatgaaactagtcatgagggtatggaaatagaggaggtactgaggtgtgggggaaaggcctgttgattctttggtattaagagtaaggaaagggacccccctaagattaaaagagctaatacatgtagaagtgccaagcaggcacaaaaacatatattgatctgactggtggaaggaatggcttatgagttgagggggtgtggagggaaccctgtagagatgagcccagccagggcagcacctagttcccctgtcacagcccctcctctaccccaccccacatgctttgcctgctggtgacgagctgcacttctttgattcagcatcatactacccttcctagatcctgtacttggattcatcagaaatatgcttccccacggtgcctggttgtcctggtgcttgggacgtggacagtgagaatccccagagaggcagcagtgtggatgccccacctcgaccctgtcacacgactcctgatagccagtttgggactgaggtgagtctatatctggaaaggactagggtctgtttgccccgctaagtatgcaaagcctgtttcagggcagattctgacaggtctctctccctttgccatctggcacccccccgtcccttttgcagcatgtgcttcggatccatgtattagaggcccaggacctgattgccaaagaccgtttcttggggggactggtgaagggcaagtcagacccctatgtcaaactaaagttggcaggacgaagcttccggagccatgttgttcgggaagatctcaatccccgctggaatgaggtttttgaggtcagaattgagtggctgtgactcctggttctgccccatttttcccccaatcccaaaagtggtccagaaacctctgaggttcagttgactggggggtccagtcatttgcagaggaaaaggagagaatctttcatctgcactattttctcccactaggtgatcgtcacatcagttccaggccaagagctagaggttgaagtctttgacaaggacttggacaaggatgattttctgggcaggtgagagcataggagtctacgtgaaaaacaggctggggctctttaggccatggagtctggcctccttggttctcaccatctagcttttgtcttaatctttctcttcaacaggtgtaaagtgcgtctcaccacagtcttaaacagtggcttccttgatgaggtgagcattgaattagagtcaacaacccctcctgatcctgcccaagcttcattctcaaagttctcctgtctgcatatccccaagtcttcaccctgcctacttccacagtggctgaccctggaggatgtcccatctggccgcctgcact

SEQ ID NO: 9771 - DNA, 2300 bp, Homo sapien
ccctgcccacaaaatgcaatctctaagaatatacaggccagtcaaggtaggtcatacctataatcccagcactttgggaggcacctgagatgggaagatcacttgagctcagtttgagactgggtaacacagtgagacctcatttctagaaaaaaacaaaaccaaagaaaaataagaatatacaaatcacatgctaagcagggagaggagagaggagagacaggcatttctcacagataattcacatatataatcaccctatgcccagttaagaccatgtttcgtccagttcctgttatttatgatcaagacagggatggcacagaaaatgaaggatagccttcccatctctgcaagggtcttaacgttttttccctgtactacttctctatagaaaatgctagaaagtcagatgatgccataaccactcatacttggcaaaatgccaaaaatgggaaaaggaaagaaaaaaaattacaagagccatattttgaaatcaatgtctgcaaaagtaatgaaagccacacaaaggcatctataatgtggccctttcccagtcttataaccacttaaaaatgtattccttcttcctctccgtctcttcacaacacctattgatccttacttcattgatgtaaaatggggaaaatatcagcgacctcataccttgggaagattaaaggaaagttatttaacaaaaacttatacagcacttatgctgtgccaggcctattctattttacacttttttttttttttgagttggagtctcactctgtcacccaggctggagtgcagtggtgcgatctcggctcactgcaacctgccgggttcaagtgattctccgacctcagcctcccaagtaactgagattacaggcgcccgccaccaggcccagctatttttttttttttttttttttttttttttttttgtatttttagtagtgacagggtttcaccatgttggccaggctggtctcgaactcctgacctcaggtgacccacctgcctcgcctcccaaagtgctgggaggtgtgagccaccaagcccggccctattttaccaataataacacttcgaatcctccgaagagccctatgaggtaggtaccattatcattattttacagatgaggaactgaggcccaggagagataactaaacctgctgagggtcactaactaggacctggtagaaccaggatttaaatctgagtaggctgtctgaaccccatccacttgagcaccctctgagataatttagccccttcaccggtacgagatctatggcggcctccagaaatggttgctaacttactattatcgttatttctgtcgtacaattcatttctacctttccaataaactttccccaaccagtgaacctcacttactgcccataaagttcacctgtgcctcaccaccctgccatcgcccgagttttctgctctgatctaatcctcacacgcctgtgcagcaccagcttccaacaccaggtgcaccgccagggtatttactgatccagtgagtgaaggtgggcccggccgggctggttcccatcctctgatcaacgcctaggggaaccagtgaactccaatgctgaccataagagtttcagaaagtagggctggaaagcccagccctccgctcagagacctgtgaagatcgaggaggatggcgcatatgctgccgcaggatggaaacctcgatcagagaaggctggggcaggtgactgggcttaattgcaaattttaacatttacttcagcaaccagctcattaaaaacaaactactctgaggcctcttttttttctaccaaaccgcgagaggaagcaaaagagagtgcagcggttctccccggggccgttaagtgcttccagctatctgacctccacgctgcctgctgcagcctcaatctttccccaggttctgagttctttcagcagtaggtccaggaaaacagccgccccgccccctccacctcccgagactaggagcccgccagggttaagtaggagggataccctaggggccccgcagggtttttagggttggggtggattggaaattgttcattgcctttcagttccgggacataaagcgcgctggaaggacactgagtcaccaaccaccgccatgggccggaagccaccgccctcgcgtcaactgcaatctagagcgcggcgcatcccgtgagcccgcggggaactacgactcccggcatgctccgcggccaccggaattaacccttcagggctgggggccgcgctatgccccgccccctccccagccccagacac

SEQ ID NO: 9772 - DNA, 2300 bp, Homo sapien
atctaatcctcacacgcctgtgcagcaccagcttccaacaccaggtgcaccgccagggtatttactgatccagtgagtgaaggtgggcccggccgggctggttcccatcctctgatcaacgcctaggggaaccagtgaactccaatgctgaccataagagtttcagaaagtagggctggaaagcccagccctccgctcagagacctgtgaagatcgaggaggatggcgcatatgctgccgcaggatggaaacctcgatcagagaaggctggggcaggtgactgggcttaattgcaaattttaacatttacttcagcaaccagctcattaaaaacaaactactctgaggcctcttttttttctaccaaaccgcgagaggaagcaaaagagagtgcagcggttctccccggggccgttaagtgcttccagctatctgacctccacgctgcctgctgcagcctcaatctttccccaggttctgagttctttcagcagtaggtccaggaaaacagccgccccgccccctccacctcccgagactaggagcccgccagggttaagtaggagggataccctaggggccccgcagggtttttagggttggggtggattggaaattgttcattgcctttcagttccgggacataaagcgcgctggaaggacactgagtcaccaaccaccgccatgggccggaagccaccgccctcgcgtcaactgcaatctagagcgcggcgcatcccgtgagcccgcggggaactacgactcccggcatgctccgcggccaccggaattaacccttcagggctgggggccgcgctatgccccgccccctccccagccccagacacggaccccgcagggtgagtttttgggggctgaggagggccattttctttaagatttagtgggggtgcgtgagtgtgtgtgtgtgtgtgtgtgtcgtgtgtgtgtgatgtattttgtaaaaatgggacaatttgcagtcatgagattcagacgctgttttgcgaatgggagacccagcatcaaccccggggcctaagtggaatcactgctatcttcctcagaatgctacctaaatcctttcctaatttaccccagaacaaaagtagcctgcaatccctccccactcccaaacgccccccaacttggactctctcccagcgcccctggcaaggtttgtgacctggcccctgagtcaggatttttattatacccctggttgtggggtgaatactcatggagccataggagcgcccacatcctcttggattagggaatttaagccgtctcccagagcctgcccttctcctcaggtgccaccaaagggtccccacaggttcagcaagcaccctaccttttgtttgtcttgaatgaccgtgggcttgtggaaggtttcttccatggaagaatgggtagcagatgttaaacctgatctttgcccccactcctgcccctaaaacaacactgggcacaggagacaatgagggatgtcatactcctgtttttatgactattcttcctttatactgtgaatagttccagttcttggctgggtgggggctcaggaactacaagtattagggatcattagactctaaggttaactacccctgctctttacaaagccatggtcagaagggagtggaggggctgggcagatgggcttcttgtttttgtcattgctcccagaccacactttaacttgttccagttcacacaagcctccctggctgctacccctcaccccacccttcaagaagactaaagctgctggatcacctgctttgcctcaccacccccatctcagtgccactggcaagcatcctatcctcaccctggaggttaactacctcattctgggcagtctctggcttcctcccctacccctaaaggaaacattgttcttttctggtcagcctttggggataaggggacagagggaagaagaccttggggcaggagtcctgaaccataggaggccaggggagtgagggcaggcggttatatctctcctctacctcatctttgccacagccaactggctccctgcccctgcccccgccccttgacatcccagactccctggctatttaaacagagatgggtgcccccatccgcacactgtcctttggccaccggacatcatgcctcccaagaaggatgttcccgtgaagaaaccagcagggccctccatctccaaacctgctgctaagccagcagcagcaggggctcctccagccaagaccaaagctgagccagctgtcccccaggcccctcagaaaacccaggagcctcca

SEQ ID NO: 9773 - DNA, 2300 bp, Homo sapien
catgccactgtactccagcctgggggacagagcaaggttctgtctcaaaaaaaaaaaaaaaggccagacacggtggctcaagcctgtaatcccagcactttgggaagccgaggcaggcggatcacttgagatcaggagttcaagaccagcctggccaacatggtgaaacctcgtctctactaaaaacacaaaaattagccaggcatgatggcgggtgcctgtaatcccagctacttggtaggctaaggcaggagaatcgctttaacccgggaggtggaggttgcggtgagccgagaccgtgccactgtactccagcctgggtgatagagcaagactcagtttaaaaaaaagcaaaacagcatgggctggccgggagcagtggctcactcctgtaatcctagcactttgggaggccaaggcaggaggatcgcttgagcccaggagttcgagaccagcctgggcaacgtagtgagattctatctctatttaaaaaaaaaaaaagtacaaggctgggcgtggtggctcacacctgtaatctcagcattttgggaggccgagatgggcagatcatttgagctcaggagttcgagaccagcctgagcaacatggcaaaaccatgtctctacaaaaaaatttaaaaattagccaggcgtggtggtgcacgcttgtagtcccagctacttcgaaggccgatgtgaatcactggagcccaggaggtggaagttgcagtgagccatgatgatgtcactgcactccagcctgggtgacagagggagaccctatctcaaaaaaaaaaaaaaaaaattacaattgttatgtttatattgttgtttacaaaaatatatggaaaaagccaggcgcggtggctcacgcctgtaatcctagcactttgggaggccgaggcaggtgtatgacctgaggtcaagagtttgagagcagcctgcccaacatggcgaaacctcgtctctaccaaaaatacaaaaaattagccgggcgcctgtaatcccagctactcgggagggtgaggcaggagaatcgcgtgaacacgggaggcggaggttgcagtgagccgagatcgctccgctccactgcactccagcctgagcgacaggagcgaaactccgtctcaaaaaaaaaaaggaaaagcgtggcctgggtgagtgaaggagggaaaggagggcctcagacgttgtgtctgggattcaggagagaagatgactgaggaggaggtggagaccgttctggcaggacacgaggacagcaacggctgcatcaactacgagggtgaggggacaaaaaagcgggagcggggccgagggaggagggcagcctggcgtcttgccgcgtgtgggcgggggcacccctggattacctagagtcagatgtattatccaaaggcctgcttctgaagcccctcttgcctcctctctctgcagccttcttgaaacacatcctaagcgtctgagtgctgcaggtagggccctcccaccccttcgccgcgccttacgaggcaagtctcccgcccttctctcagccaacatagaaaagcagcggagttcattctgctgtccggttgctgcacgggctccagcgcttcgcaactttggtttttttccacagatccagtggggtccggacactgggccccgcaggcgaaagcacgttccagccaccaggaggccacctattgtttcaaaataaagactgggttcctctcttggtttcagactgctatttttttcatggttgggggagcagcgggagacggggagggtgctaggaggagagggcgggaaaagagggctctctcctcttccaatcctctgatcttcctgctgttgggaggtgcagattcattgtgccccagcccacgtccccccacgacccccgcccccccacctccccccacgaccccccccacctccgagcgggttctgtgcccaggtggcgctggagaaaggaacagcggaccccgcccaagtcattactaatgtagcaatcgtctgcataaacccaggccacggttcctattggctgagtcctctgagggtgacgtcatcgggacgtactaagactagggttgggccgagagtcggagccattactgcaggaaaaggtcccggagagctgagcagtcaagatggtggggcccaggtcttgggagacgggcaggattggggacgagaggcaggaagagacgggtggggggcgaggagaaggcaggggtaggaggcaaagggaatctgaggacccgaaaggttggaggtggggttggaaagactggggccctgcggggaagc

SEQ ID NO: 9774 - DNA, 2300 bp, Homo sapien
ggagttcgagatgaacctgggcaacatagtgagactccgtctctacgaaaaattttaaaaattagccaggtgtggtggcacacacctgtggtcccagctactcaggaggctaagtgggaggattgcttgagcctaggaggtcaaggctccagtgagcttcaggaccagctccaggctggggatttgggccatttcattaacttcatatcctttcttagtgctacttcaagatcccccttggacctagcagagtacacaaataccagaacatagagaactttgaaaccagctgcccttagtaggatggggggagtcagccttcgagaaaagtggctaagtaagcggagttatgtctccaccactaccaccaggcactggaaatgtacaaagatgactggaacaaagtgtccgagcatgtgggaagccgcacacaggacgagtgcatcttgcattttcttcgtcttcccattgaagacccatacctggaggactcagaggcctccctaggccccctggcctaccaacccatccccttcagtcagtcgggcaaccctgttatgagcactgttgccttcctggcctctgtcgtcgatccccgagtcgcctctgctgctgcaaagtcagccctaggtaatgggggtgggtggttccacctggccttcttagtttgcttttgaagggctagttactcagactgtgaatcctctcaagtttggctgccctgctggccttgtctgtgcgggcctcagctcaggcacctgtctaggctccatactagcttagatgaagacatgggcttgtgagtaagcttttgcagggattgccagaactgttccactgtgccgctcccagcctcattctttctgggtcttgcagaggagttctccaaaatgaaggaagaggtacccacggccttggtggaggcccatgttcgaaaagtggaagaagcagccaaagtaacaggcaaggcggaccctgccttcggtctggaaagcagtggcattgcaggaaccacctctgatgagcctgagcggattggtaaggccaggcaggttcccagatttcttgcctttcacaagatccagagctacctggcctcctgtgccatttctgcctcaagttggcattagagcacaacatgaatgagaacattggtagggtttttattttccccatgagtttacctcaggggctctggagccctactagtcctctcatgaagattttgggtagaaaaatctttgcttgtagaaggggctgttagaaaagtcttgtgaaggccgggcgcagtggctcatgcctgtaatctcagcactttgggaggccgaggtgggtggatcacgaggtcgggagttcaagaccagcctggccaagatgctgaaaccctgtctctactaaatatacaaaaattagctgggcgtggtggcacgtgcctgtaatcccagctacttcagaggctgaggcaggagaatcacttaaacctgggtgccagaggttgcagtgagccaagatcaagccactgcactccagcctgggcaacagagcaagacttcgtctctcaaaaaaaaaaaaaaaaaaaaaaaagtcttgtgaaggctgggtgcagtggctcatgcctgtaatcccagtactttgggaggctgaggtgggcagatggtttgagaccagtctgggcaacatggcaaaatcccgtctctacaaaaaataccaaaaaagttagccaggcatggtggcatgcgcctgtagccccagatacacaggaggctgaggtgagagaaccacttgagcctgggaagtcaaggctgcagtgagccatgattgtgctactgcactccagcctgggcgacaagagtgagaccctgtcacaaaaaaacaaaaaacaaaaaaaaacaggtgttatggagaagctgggtgcaacggctcacacccatagtccaagctgctcaggaggctgaggtgggaggattgcgtgggcccaggagtttgagaccaacctgggcaacacagcaagaccctgtctctaaaaaaaaagaaaagtgttagacacagacgactgtgtattaaacatttcctgttttctttcttttctcatgggcccagaggagagcgggaatgacgaggctcgggtggaaggccaggccacagatgagaagaaggagcccaaggtatagagggatttctggaagctgcaggggctgcgtgcagcactgtggtgatggggaagttggccttgttcagcttaggtgggcaagggctggttttggacggggttgtctcctagaatcagatcacctccaaag

SEQ ID NO: 9775 - DNA, 2300 bp, Homo sapien
gtcccagctagtctggaggctgaggcaggagaatcacttgaacctgagaggcagaggttgcagtgagccgagatcacgccactgcactccagccggggtgacagagcgagactccgtctcaaaaaaaaaaaaaattagctgggcgtggtggcaggcgcctgtagttccagctacttgggaggctgaggcaggagaatggcatgaacctgggagacagagcttgcagtgagccgagattgcgccactgcactccagcctgggcgacagagcaagactccgtctcaagaaaaaaaaaaagattttgcctcaggccaaacctgcttggctttggataagacatggcagtcttctttggttaggaatacttcaagataaccacattgatgaggtgggtgagactgagaactgaacaagttttcttcccagctattccacagcttcccctctctgggggtccctccgtgttttttcttcatagcttgctatggttctctcttccttctcttcctggagaaagcagtatgtgtgaaaagaaagtagtgatcaggtgaaatgaattcaacatgacatgcaggcagggttggagtaggaactgaactcttggtataaaatagtaaatgatggctgggcatggtggctcacgcctgtaattccagcactttgggaggcccaggcgggcagatcacgaggtcaggagttcgagaccagccaggccaacatggtgaaaccccgtctctactaaaaatacaaaaattagctgggtgtggaggcacgcacctgtaatcccagctacttgggaggctgaggcaggagaatcacttgagcccgggaggtggaggttgcagtgagccaagatctcatcattgtactccagcctgggcaacaagagtgaaactccatctcagaaaaaaaaaaatagtaaatgatgataattgcctgcatctattgagagcttagtatctcccaggcactatactaaatgtccaacctacattgagtaatttaatctttacgtcaaccttagaggtagatatcatcttcagttgacagatagggtatagaggagtcaagtcacctgcataaagtcacagagctagtaaataaaaccaggatctgaatcctttaatctggcccatgatctgaaactttacactgtaccacatgatagctgccatttttttgagcccctacaatgcgccaggcactatactagtactttatagacctctcaacagacattccattttacaaatgaggaaactgaggtttaaaaattcgaagtaaattgccaaggtcctcatggtagaactgggatttgaacttagatcttttcaacttcaaaacatatgttttttaccgtggtatgctgactagctatatgcatgaataaggacttccttttaacatctgagtttggaaatgagtattttcttaacttctaattccttgtttaaaaattgtataaaatggctaggtgcagtggctcatgcctgtaatcccagcactttgggaggctgaggcaggaggctcacctgaggtcaggagtttgagaccagcctgaccaacatggagaaaccctgtctctactaaaaatacaaaattagccggccgtggtggcacatgcctgtaatcagagctactgaggaggctgaggcaggagaatctcttgaacccaggaggcggaagttgccatgagccaagatcatgccattgcattccagcctgggcaacaagagggaaactccatctcaaaaaaaaaaattgtatgaaatatccctaagtatagccaaggagataattcatttaaagaaaaccccatcaaggaaaagtaagacatatttgaaaccctttcatctagcacatagcaggcactcagcatgtagagtcaaataatctacttttttccatctttatcatgcaggagaagtcattagctctcttaccattttttcctttagccctttaacaaacatttatttttcttcttcttgtttctctctctctttcttctaagctacctggcctatcgaaactttatgattgacacttaccgactgaacccccaagagtatcttacctctaccgcctgccgccgaaacctagcgggtgatgtctgtgccatcatgaggtgggtcttgtggctgaggggaagggggtacatgaggatgcctgcctatggatgtgttttggcaacagtagagatgccagcaaggaacacagaggagcagacagaaaaaagcacctctagagaaaggtgaagtacaggtttggggaatgaatgacttgagggattagcaatg

SEQ ID NO: 9776 - DNA, 2300 bp, Homo sapien
gagtccaggagtttgagaccagtctgggcaacatggcgaaatcccagaacgccgtctctactaaaaatacaaaaagttagctgggcgtggtggtgcatgcctgtagtcccagctactgaggagggaggattgcttgggcctgggagtttgaggttgcagtgaactgagatcgcaccaatgcactccagcctgggcgacagagcgggaccctgtcacaaaaacaaccccccaaaacaaacaacaaaatcctcaacaagcagcctagatcctccccacaatcagaaattaggggataggaaaaatggggtgagatgagtataggagggttaaaggttaaagatgagattaatttccttgcttggttaatacacatagataatttaaaacagtatctggcacataataagcactcaataaaaagtgagaattatcttcccataccttggctctaactggatctgcaatgatgtttcaatagactactcccttctagccctgtacacctcaaggaaatccagatgagagaatcctgtttcctgggtcttcggtgtaatcagacctacaaggtgtgacttctggtcatgaaatttagaggaaactctaagtttgactaatattgcaaaacagccactcacattcccaaaatgtaacccttcaaccaaatccttccctatgccctcaaaagaatgagacatgtgccaaagctctcccaggaagcctgaagttacaaaattctgaaaatgcctcacagtctagcagccaatacagtcgtgcataattaaacttcccaagatcactcccatcctcccaaatccaggggttaagaccttttggcggcttcccttttggagagagaaagtgcacgaaagaaacgtgtgagaactggggttacctttatgtgctgtgaaaggggttaaaaaagtcgacgcctgtaatcccagcattttgggaggccgaggcgggcagataacctgaggtcaggagtttgagaccagcctggccaatatggtgaacctgtctctactaaaaatacaaaaattagccaggtatggtgacgcatgcctgtggtcccagctactcgggaagctaaggcaggagaattgcttgaacccgggaagcggaggttgcggtgagccgagatcgcgccactgcactccagcctgagcaacagagcgagactcccttttaataataagaagaagaaagaaaaaaaaaaaaaacccgtcacgaacaggattcgaacctgtgcggggaaaccccattggatttcgagtccaacgccttaaccactcggccaccgtgacttccaaaaccgcgctttatcgcgcgcttacagaaggggtccgcactgcaatccgggaatgcgtgcgggaaccggaagcagggtaccggccccgacacacacacacctgaggactccccacccctcggttccttacctcctatctacgccacccaaagaaaaagagtcggatggactgggtgacccagggagggagggtctcctgcctagcgaagagtcggggtctcgagtaggagctcacacctacttaggaggcgacagcgaggcctgcggaggaagcagttgagggaaggcactgggccgccagggtggcgactaggggacatttgggttaacaagtgaggggagtgctgggtggacaaggcgcgaggagtgagggagactctgaaaagtttaaatggggagctgctgtgaatggatggaaggaaggaacttcttggggaaaggggtttggggttttgggggacgaggggcttcgtcgggttaggaatgcgcaaggtgaggaccactcgggtctacgggttggggctgctccagcgactggcggccgcctggagtgggatagcgaggtgacactcccgagctgaggcaaaaagagggaaagggcttcgcgtctggtaagagcgatctcaggagaatggcgccccctccaggaagcgtccttctccccggaggctcccgcctccgctgccggggaggccgccagggtcggcccgcgcctggagctccgccgccgcgcccggcctgccggcagggggcgcagcgcggaccggggccggcccaggcggcgggaggcggcggccgcggcggcgggaggcggcgggaggcgggcggaggaggaggcggaggaggcgggagctgagctgagtggggcgggcggcggcggggcccgagccggagaagatggcggtgcggaagaaggacggcggccccaacgtgaagtactacgaggccgcggacaccgtgacccagttcgacaacgtgcggctgtggctcg

SEQ ID NO: 9777 - DNA, 2300 bp, Homo sapien
aataacatatatatatataataaatatgtatatattatatataccttatattaatatataaggcaggtatcattttccctacttgacagttgaagcaacagaaaaactacagcagggttacttgacttgtttaaatgtgtagatttgggggtgggcgcagtggctggtgcctgtaatcccagcacttcgggaggctgaggtgggaggattgctggagcctgcccaggagttcaagaccagcctgggcaacatggcaaaaccccatctctaccaaaaatacaaaaattagccaggcatggtggtgtgtgcctgtggtcccagctatttgggagactgaggtgggaggattgctggagcctgctgggaaggcgaggctgtagtgagctatgatcatgccactgtactccagcctgggcaatagagcaagaccctatctcaaaaaaataataataatttatgtgggccaggcgcggtggctcacacttgtaatcccagcattttgggaggctgaggcgggtggatcacctgaggtcaggagttcgagaccagcctggccaacatggtgaaaccccgtctctactaaaaatacaaaaattagccgggcatggtggtgggtgcctgtaatcctagctactctggaggctgaggtaggagaatcacttgaactcgggaggccaaggcttcagtgagccaagatcgcgccattgcactctagcctaggtgacagagcgagactctatctcgaaataataataataatttatgtgaaagcactttggaaacattaaagcagcatccccagcctttttgtggaagatagtttttccacagatggtgggcgaggggatggttttgtgatggaactctaccacctcagatcatcaggcattagattctcatagggagtgggcaacctagatccctcgcatgggcagttcacaatagggttcatgctccaatgagaatcaaatgccgctgctgatctgacaggacatggagcacaggccttaatgctcgcttgtttcctgctcacctcctgctgtacgacccggttcctgataggccacagtctggtactggtccatctggggatttggggacctctgcattaaagcatcatcctgtacacataatgtattatggatctatgcattttgctttttttttgagtcagagtcttgctctgtcgcctaggctggagtgcagtggcgcgatcttggctcactgcaacctccgcctcctgggttcaagcaattctccctgcctcagcctcctgagtagctgggattacaggcatctgccaccatacccggctaatttttatatttttagtagagatggggtttcgccatgttggccaggctcatctccgactcctgacctcaggtgatccacccgcctcggcctcccaaagtgctgggatcacaggcgtgagccatcgcaacctggatctatgcattttgtagtcacagatttggaatcattattactggtagttatgtgcactgaataaaagaatcttaaatctccaacaactcctctacttttcctcttgtcttttttttttttttttttaagacggagtcttgctgtgtcgcccaggctggagtgcggtggcgcggtctcggctcactgcaagctgcagctcctaggttcacgccattctcctgcctcagcctcccgagtagctgggactacaggcgcctgccacctcgcccagctaattttttgtatttttagtagagacggggtttcaccgtgttagccaggacggtcttgatctcctgacctcgtgatccacccgccttggcctccctaagagctgggattacaggcgtgagccaccacgcccggcctctcttgtccttttctttccccctcccagctatgttcaaatctactggaccccgtgtgtgtgcttccttagctggtgagctccctccttagaaggtagtcttatttgcctagcactgaaaactgtagtgcttaatggagttgtctcatcctccccaaccaactgccagatccatctgtccagtctccttgccaagtggaggtagttctcctgactctcctttctcttccttgttcctattactagagtactcctgattgtgacatcacattcatcccctgggcgatggagcttgtcactgggaaggaatactcagtcggagaatagccaacaagatgggttactgggagaatctcttcagtggcactgagtggaggcatcagggggttggagccttgtgaacagggaacctgccccccaacacttggaaggtaaagagctttga

SEQ ID NO: 9778 - DNA, 2300 bp, Homo sapien
ggagcaagggcttcggaatctggcggacaaaagtttgaatcctggctcaatgcttcacttcatttctcgactatttaaacatatgtaattccaattccgcaaggcgcggtggctcacgcctgtaatcccagcacgtagggaggcataggctggaggatagcatgagtccaggagttccagacctgcctgggcaatataacgagaccccattctccacaaaaagggaaaaaaagacaaaaaatatgtaattccatcttacgagaaaacggaagttatatttaaaaaagtgccttgcacacagtaggcacacacggtttcctccctttttattgctctaaccgttatctttgttcctgatttggggttctcatctttaatgcactacccagcttggtcaaggtctctgggaaaagtggcatttacaccagagacaaaaggcaggctcacccttcttggaagaaatggaacctgcgacaaagagagaaacattgttagtcccttttttttttttttttgaaacagggtctcgctgtgtaacccaggctggagtgtagtggtgcaatcttggcttactgcaacctcccaccacagcctccgtagtagctggtactacaggttcgcactaccaccctcggctaatttctgtattttttttgtagagacagtttcgccatgtttcccaggctggtctcggactcatgacctcaagggatccgcccacctcgtcctcccaaagtgctaggattacaggcgtgagccgctgcacctggccatactactcttccccgccccgccccaccgctccaccccggcaaaggagtcttgctctgtcgcccaggttggagtgcagtggcgcgatctcggctcactgcaatgcaacctctgcctcccgggttcaagcgattctcctgtctcagcctcccgagtagctgggattacaggcgcccgccaccacgcccggctactttttttgtatttttagtagagacggggtttcaccacgttggccagcctgggctcaaactcctgacctcgtgatccaccagcctcggtctcccaaagtgttgggattaaaggcatgaaccaccgcgcccggccatactactcttatcttacttatctcagagtcccgctagaagacagcagaaaggaggcctgaaactttagttccttttgggacctgtcaaattgtccacaaaaggtagctagctctgtattgttgtgtataaacaaattacataaagatatgtgtgtatgtgtgtattaatgtgcattagcatttgcttagccaatgtccacaataaataccatactatttaataccagattagtctaggaagtcatgtgattgtaatgccttggtttgcttaattaatcccttatctgctcacggagctctttaggctccacattgacttcccttggatcccacgttctctaccgcccacatccccaacaccacggtgttgtaagctaaggaaatcaaaccccaactcaggaagagggaaattttttctcccttccttcctcttaggtgtttcagggaactccacaagtgttcggggagccatcgtggatacggcaggagagcgcctgggagagaggcagacaacccgttgagcaccccagatctaagctttgcggtcagactccctcactccccaccccgcggccgccttgttaactgcaatatccattcccatgacaggagtcaaggggttacgaagctctgggatgctgaccagggctctggaaaagggagaggggccggacccgcagcaggtcacgctgcaggcctgcctctccgcaatgatctcgcaacaatctgcgtcagctctaagacacaagtcacctgcacccctccaaagcgaagcgtggccggccaggcccacacgtttttgccgggaagaacatagagttctccctcctaaatggctacatagtcctggctgggaccatatagactctagactagacttcctgtctagagtggaggcctggccagccttcgtccctcctcgtaggcagctcctggctgctggtgtaggggctgagttaaacaaagaggcggggtttggtgacgagcttccgccgggttgcgtagcagcggtgggcggggcaaaggatccgtctgaggcggcgacgagtggtaggagtcttctttcccctccttcccctttcccttcccttcccgggagaggctgggacccggcaccagggcagtactgtggccgctgcggcctcagctccgactgggtcaggttgcggagactccaggccgcttccagggcggtgcgtac

SEQ ID NO: 9779 - DNA, 2300 bp, Homo sapien
gacctgctgcgggtccggcccctctcccttttccagagccctggtcagcatcccagagcttcgtaaccccttgactcctgtcatgggaatggatattgcagttaacaaggcggccgcggggtggggagtgagggagtctgaccgcaaagcttagatctggggtgctcaacgggttgtctgcctctctcccaggcgctctcctgccgtatccacgatggctccccgaacacttgtggagttccctgaaacacctaagaggaaggaagggagaaaaaatttccctcttcctgagttggggtttgatttccttagcttacaacaccgtggtgttggggatgtgggcggtagagaacgtgggatccaagggaagtcaatgtggagcctaaagagctccgtgagcagataagggattaattaagcaaaccaaggcattacaatcacatgacttcctagactaatctggtattaaatagtatggtatttattgtggacattggctaagcaaatgctaatgcacattaatacacacatacacacatatctttatgtaatttgtttatacacaacaatacagagctagctaccttttgtggacaatttgacaggtcccaaaaggaactaaagtttcaggcctcctttctgctgtcttctagcgggactctgagataagtaagataagagtagtatggccgggcgcggtggttcatgcctttaatcccaacactttgggagaccgaggctggtggatcacgaggtcaggagtttgagcccaggctggccaacgtggtgaaaccccgtctctactaaaaatacaaaaaaagtagccgggcgtggtggcgggcgcctgtaatcccagctactcgggaggctgagacaggagaatcgcttgaacccgggaggcagaggttgcattgcagtgagccgagatcgcgccactgcactccaacctgggcgacagagcaagactcctttgccggggtggagcggtggggcggggcggggaagagtagtatggccaggtgcagcggctcacgcctgtaatcctagcactttgggaggacgaggtgggcggatcccttgaggtcatgagtccgagaccagcctgggaaacatggcgaaactgtctctacaaaaaaaatacagaaattagccgagggtggtagtgcgaacctgtagtaccagctactacggaggctgtggtgggaggttgcagtaagccaagattgcaccactacactccagcctgggttacacagcgagaccctgtttcaaaaaaaaaaaaaaaagggactaacaatgtttctctctttgtcgcaggttccatttcttccaagaagggtgagcctgccttttgtctctggtgtaaatgccacttttcccagagaccttgaccaagctgggtagtgcattaaagatgagaaccccaaatcaggaacaaagataacggttagagcaataaaaagggaggaaaccgtgtgtgcctactgtgtgcaaggcacttttttaaatataacttccgttttctcgtaagatggaattacatattttttgtctttttttccctttttgtggagaatggggtctcgttatattgcccaggcaggtctggaactcctggactcatgctatcctccagcctatgcctccctacgtgctgggattacaggcgtgagccaccgcgccttgcggaattggaattacatatgtttaaatagtcgagaaatgaagtgaagcattgagccaggattcaaacttttgtccgccagattccgaagcccttgctccttttcccattgtgtcactctttggaaagaaacgtcttagaacctaagtgcattctccctagccaagttaaggaaaactgggggccctgtgcgccttctagtggtggatttttccccctacagagccaactatctccaaggttcctttaatacctgaaattcgcccccttcgcggcgcacgagtctctgatcccgattggctgggcagggcaggcggcgggacgcagggcgcgcccgggcggtgctgattggccggaggaggccagccgggggaaacttccgggaatgtccgcactcccgcgttccacggggcagcatccggcggcagcggagcctgtggctccccctgcgggctgctcagcggcgtgcacagtcctgccggctggcttgggtgggtggtgggctgcgggtaggggaggggatggaccgagtcccggcttgtcgggatgagggttccggaagatctggccagtaagattctactccctggctgtgcaccgggttccctacccctgt

SEQ ID NO: 9780 - DNA, 2300 bp, Homo sapien
gagattacaggtgtgagccaccacgcctggcccagtaaaggggcatttttgtcagaggtccctgagcctagaactaaacagctaattctaggtctgattcccaataatagtgagataactacaagagaaaaataccgtaccgaggttcatgtagcaacttcctaaatgatcgtgtaagtcttctctggagctccattcatactcgcagcccacagtcttttgcatttggtccagttggcattaagatgcagttgtgcatggtgaagactgtgccactctttggggcatggagacaggccttgggatggacccctctcctatgttaactaattcctttgtttcttctcctcccacaattagcctctgagaaccagaatgggaatggactgagtgccccaccaggtcccggtggtggcccacatccccctcatactccctcccacccacccagcacccgaatcactcgaagccagcccaaccacacacctgcaggcccgcctggcccttccagcaaccctgttagtaacggcaaagaaacccggaggagcagcaagagatagcatgacattctttcttcctgccaccaaccacatcccaagtgtcccctggagagcaagatagccttccactgattggctggtgtagcagtattttagccactgaacttcagtggagggtggtgagcagtgtccttatccaccctaatctcatactccctcattgtccagctgaactacctgtcccctgggagtcaggaccctctgcctgctctctttcctctttagaaatggcagttactggctgggcgcagtggctcacgcttgtaatcccagcactttgggaagccgaggtgggcggatcacctgaggtcgggagttcaagaccagcctgaccaacatggagaaaccccgtgtctactaaaaatacagaattagccaggcatggtggcgtatgcctgtaatcccagctacttaggaggctgaggcaggagaatctcttgaaaccgggaggcggaggttgaggtgagccgaaattgcaccattgcactccagcctgggcaataagagcgaaactccatctcaaaaaaaaaagaaagaaagaaagaaagaaagaaagaaatggcagttaccatctgtttcttctgtgtgagacatgggagtctaactgaagtctctccttcctaataaatgttaccactctactctgtgttggactcctttgctttctgtgggaaaaggaagaggttagcaactaggcatttgggaaggtggggtgtccctagaaggtggaaggaaaataggttacaggtaaggaggcccaggcaaagcagacctgcccctttaaggtagtgtccctcccctaccccctccctgcaggtgacccttgcccgcctgcctgcctgcccccccagctggaaccaagaaggttgtgtcccccttcctctgggtgtccttgtctcctgctatcaggtaatgccaacctcaaccccctggaccagtcaccccgatcagactttgcttgcctgattttaggccaggtcagacatcagaggagagcccagatccttgtttcctctccccccgcagggcttcccctttcttggtcatcgatccctagagctctggctctttctcttcttggggtgagaaactgctaagaacagtttatttcccatgcatgcatctgggcttgccactgatctgccttttcccccctcctccccaggttagggacacctgggtccaaccttcccaaggaatatggggatgggggttggagatgaagtttagtgctagactgtaaggtaggtggggtggaagtacatgagggaaagggctaaaatggtactaatggtgttaaggatagggtgaattatttaagaggaaaaagactaggcccaggttctccttagccatgtggctttcccagggcagagggtggcccctccctacccaggggcccagcagagactgacttttgatccctaccccagagaccagtgaaccattaactcctctcttatgtgagccttcacacactggccccacccctgaccccgccccaaggcaggtgggctaggagggggtgcatgtccatctcagccttctatgtgacgtggcctccgatccacctggacacctggaggctaagcctggattcccccttccctgactcaggaactgcttaacgtctacagcaaggcctaataggggacctgaggtgacagctcttatgttgccagtaggggtgaggccctggggattgaggggggataaagaggtggggcaaagttgaggggt

SEQ ID NO: 9781 - DNA, 2300 bp, Homo sapien
tggccatcatgaatggccatgtggactgtgtacatctgctgctagagaaaggatccacagctgatgctgctgacctccggggccgcactgccctccaccgcggggtgagtgagcttctaggggggattgtttgcacatgggcctcagtgtgggagcatgggactcaccagcagtagggaatccaattgtctaggaggcaagccaggattttgtgccgtcttttttctttttcttttttttttttttttttgagacagggtctcactcccattgcccaggttggagtgcagtgacactatcacagctcactgcagccttgacttcctgggctcaggtgattctcgcacctcagcctcctaagtagctgaaactgtaggcacatgccatcatgcccagctaatttttgtattttttgtagatatgggggtcttaccatcttgcccaagctggtcttgaactcctgggttcaagtgatccccccaccttggcctcccgaagtgctgggattacaggcatgagccaccagacccacgctgtgcccaggattttattgagctttgtgcttgctccaggatgagttcctgacgtccccagctgatttccctgatatctgtgctttgtttattattattattattattattattattattattattattattattattattattgagatagagtctcgctctgtcacccaggctggagtgcagtggcgtgatctcggctcactgcaacctccgcctcctgggttcaagcaattctcctgcctcagcctcccgagtagctgggattacaggcgcctgccaccacgcctggctaatttttgtatttttagtagagacagggtttcaccgtgttagccagggtagtctcaatctcctgatgatgagatccacccgccttggcctcccaaagggttgggattacaggcgtgagccactgtgcctggccaatatctgtgctttgtaatcacgtacaactgagtgctcaccacccagactctacctgggataccctgctggccccaacccatcgcataatgtcgccacaacctagatcctcttccgtgaccacctgtcctaagctgcctcctcctcccataagattttttgatcccttagtctccttctctccatttagtctttccagtattaactccagagctccagtattaactcttagtatcctgattgtctgctggcatagagagagtcaaggagggagatgtgggtccctaatacttagaattgttgttgtaaagggccgggcatggtggctcacgtctgtaatcccagcactttggaaggccaaggcgggcagatcacctgaagtcaggagtttgagaccagcctggccaacatggtgaaacttcgcctctactaaaaatacaaaaattaattgggcatggtggtgcatgcctataatcccagctacttgggaggctgagacaggagaattgctggaacctgggaggcagaggttgcagtgagccaagatcgcaccattgcactccagcctgggtgacagagtgagactccgtctcaaaaaaagaaagaattattgttgtaaagacaaggattgaggccagtggctcatgcctgtaatcccagcactttgggaggccgaggcaggcggatcacgaggtgaggagatcaagaccatcctggctaacgtggtgaaaccctgtctctactaaaaatacaaaaaaattggccgggcatggtggcacctgcctgtaatcccagctacttgggaggctgaggcaggagaatcgcttgaaccggggaggcagaggttgcagtgagccgagattatgccactgcactccagcctgggcgacagagcaagactccgactccaaaaaaaaaaaaaaaaaaaaaaagacaaggattggagccctggaagtggttcttactcctgagccagactccagcaacaggccagtggaaaaggaggagcttttcatccccctcacacccccatgttactcacaggcagtgactggctgtgaggactgcctggctgccctgctggaccacgacgcatttgtgctgtgccgagactttaagggccgcacgcccattcacctggcctcagcctgtggccacactgcagtactgcggaccctgctgcaggctgccctttccacagatcccctggatgccggggtggattacagcggatactcgcccatgcactgggcctcctacactggtactagactggggcctccacaggcacaggagcatgtgttggagtgtgtgtagagggggacaggtgggttgttggggggg

SEQ ID NO: 9782 - DNA, 2300 bp, Homo sapien
tcaaccagccgaatgacaagggcttcacgccactgcatgtggctgcagtctccaccaatggcgctctctgcttggagctactggttaataatggggctgacgtcaactaccaggtgcctgaagggataaggcttagaccagtggggagcgaaacttggatctaggggtcctgactgtatctggatagctctcttggggaattatccacttgcttcctagggtaatcagaccttgccagggactcaggaaagagtgggctaagaaggtgccatatgacccttttgtccttagagatatgtccttggaagggaggtagggcattctctgtgctttgcactggaaaaaaaaacaaaaacaaaaacccaccatgtttccacagagcaaagaagggaaaagtcctctgcacatggctgcaatccatggccgtttcacacgctcccagatcctcatccagaatggtatggacctgggagactttgtgctctcatcccctcctcccccaaggaactcatttctagaatctagggaggttcctaacttccttctcctgccctcttccagtaggataggcccttggaactctgaccaagggacctgtggaaatggccctgctctgccctgcccagtctcctaaggcctagaaacaggataaaatatgtagaatcctgggcctggcacctgatgcatacatagtaggcactcaaatcatggctagctcgcgaaagtggtcttaagcctgaggtctgcctgagcttgtgtgtgtgcatcccctcacaggcagcgagattgattgtgccgacaaatttgggaacacgccactgcatgtggctgctcgatatggacacgagctgctcatcagcaccctcatgaccaatggcgcagataccgcccggtgagtcagggccccgactccacttctgggctgcccagatctgcacagactgctcacatcaaccatggaggcacagataagcttgccaaagggcaccttggagaacctcctaccctgactctagggtggtggtaggtcacagaagaggtcttacttggtccctccttgacccaaggactgagtccctcaacttctctctaggcgtggcatccatgacatgttccccctgcacttagctgttctctttggattctctgactgttgtcgtaagcttctttcctcaggtatgtgctgatgggctggggattggcaggtgtataggagagcaaaggcctttccctccctgctgaacactctcagatgtgacctgtggctgttctgtgcctccaggtcagttgtacagcattgtgtcttcactcagcaatgagcatgtgctttcagctgggtttgacatcaatacacctgacaaccttggccgtacctgtcttcatgctgctgcttccggagggtgagttctctttctctctcccatgctttgagcagggagctgggcaaaggtctgggcccctcattcttgcctgcccagatctattccccctctcacaatgaaagcagtcacagcagaaagggcttgctagtcccatccttccttagccccaccctgggcctgtggcttccctttgaggctgtaactctcttaacacatctttcttttaggaatgttgaatgtcttaatttgctgttgagcagtggagctgacttgaggaggagggacaaatttggcaggtatgctaatatgcaggggtaaacatagggaatatctgattagagaaacaaatggtagagggaggaagggtttagattggagacttaaataaggagaatgttacaaagcagcatttggctgcacatctgattgcattcgtatctgtctctgattctcttccccaccctccttcacttcttccccaggaccccactgcactatgcagctgctaacggtagctaccagtgtgcagtaacattggtgactgctggggcaggtgtcaacgaggccgactgtaaaggctgctctcccctccactacgctgccgcttctgacacttacaggaggtgaggctaccagtctggtccttctcagccccattcacctccctgagcctggccctaactttctctctctcttccccagagcggaaccccatacaccttccagccatgatgccgaagaggacgagccactgaaggagtcccgcaggaaggaggccttcttgtgagtagcagagagggcccctgggatgtgctttccccaacccatgcaagctctggccctactgtcctcctacctaatctgaacctctaccctatactgctgctgtcctgccggtcagccagcagtgtgtcttga

SEQ ID NO: 9783 - DNA, 2300 bp, Homo sapien
agtagggggttgggatgtgtggatctccacatgtggatttgtttgggaatggatgtatgtgtgagtgaagattttcagggtctaagttggcgagtcaggtggcttgaagaagagcaaagggtccttgttttaatcagcaaggtaaggaagagcttaagttctaagaagatccagaagatggaaagtaggtattcagaggctaggtatgttggaaaaatgagaagagattctgtgctggggaaggggctgtagatgctatgctgacctattcctccttccatttcctgttgttttacctcctgctcccactctctcttttgtcccctgcccctcaacagaaggtgctggggctgctgctggcacattcagcagatgtgaatgcccgggacaagctgtggcagacaccactgcatgtggctgctgccaaccgggccaccaagtgtgctgaggctctggcacccctgttgagcagcctcaacgtggctgacaggagcgggcgcagtgctctgcaccatgcagtgcatagtgggcatcttgaggtgaggactgttcccatccaggcccagctggggctttcccttttcttaccttcctactcacgtttccctgcttctgggccctcaagcctgaaggagaagcagcccggatggttatataaacacttaagctgaagcactaaatgaatggtcagactagattaaaattcttaacttggacttcaggaggttgataaaaccttggattttgcgtggaaaatatttgcatacacgcctttctgaagagagtccatgtctttcagcacatttgcaaagacttacaagagtttaagaaccggccgggcacggcggctcacgcctgtaatcccagcactttgggaggcgaaggcgggtggatcatgagatcaggagatcgagatcatcctggctaacatggtgaaaccctgtctctactaaaaatacaaaaaattagccgggtgtggtggcggccgcctgtagtcccagctactcgggagactgaggcaggagaatggcgtgaacccgggaggcggagcttgcaatgagccgaaatcatgccactgaactccagcctgggtaacagagcgagactgtctcaaaaaaaaaaaaaaaaagagtttaagaaccaccagatcacctgaagagactctcttgtttcccttaaagttccaaatctctccagtatctcctccttagtgcctgcttctgctgttccctcgagtcctccaggttgttttgctcatggaaaaaggcattaggctgcctcagccttttcaggagatgaggcctctgctcttaggtaggttgagggcacgaatctagctctgaacaggtgtctttcatatcctgatgcagacggtgaacctgctcctcaacaagggagccagcctgaatgtctgtgacaaaaaggagcggcagcctctgcattgggcagcttttctaggtgagagagaatacacgggaaaatcagaaatttgacatttaggattcctagggcagggatgtggggttgcagcctttgaagagaggagtgtagggtcttagagtttaccttctacttcctttagagtgtcttctcttttctcagggcacttggaggtcctaaaactgctggtggcacggggagcagacctcggctgcaaggaccgcaagggctatgggctgctccatacagctgctgccagtggccagattgaagtggtgaagtacctgcttcggatgggagcggaggtcagggctttgagctctggggttgggaactatgggcagcaagtaggagattatagtctgttacggagatatgaggtattgggatgttggtatagttttgggaagttggaaggacgtggtagagagggtctgaataatgcttaccttagccatagtgcccttagtaccttagtaccttgggtcataaacccgagaggaaatgaggcagtcgttggatttctgggatctggaggctacatgtgctggcttctactttgtttaaactgataccaccttactctcacccctgaatatccagatcgatgaacccaatgcttttggaaacacagctttgcacatcgcctgctacctgggccaggatgctgtggctattgagctggtgaatgccggagccaatgtcaaccagccgaatgacaagggcttcacgccactgcatgtggctgcagtctccaccaatggcgctctctgcttggagctactggttaataatggggctgacgtcaactaccaggtgcctgaagggataaggcttagaccagtggggagcgaaacttg

SEQ ID NO: 9784 - DNA, 2300 bp, Homo sapien
tagccagaggagacttcctggaagaggtaagtttaaatttcttcataatttttgtgtgtgcatggaatcacggagtgattgctcctaagcaatattttaacttttattttcaatatggtaaaaatttaaaaaattccaaaaggtatatagtgataggtaaatttctctctcattccttatttcctgtaccccagtttttctttctgggaaaaaaggactgttactagtgtcttaagtatctttctagcaggaaagcaagggaaggctttttttttttttttttttttttgacatggagtctggctctgtcacccaggctggagagcagtggctccatctcggctcactgcaacctccgcctccttggttcaagtgattctcctgcctcagcctctccagtagctgggattacaggcgtgcaccaccacaccaggctacttttttatatttttggtagagatggggtttcaccatgttgggaatgggaaggctttttttttttttttttttttttttttttgagacggagtctcgctctgtcgcccaggctggagtgcagtggcgcaatctcggctcactgcaagctccacctcccgggttcacgccattctcctgcctcagcctcccaagcagctgggactacaggcgcccgccaccctgcccggctgatttttgtattttagtagagacggggtttcgctgtgttagccaggatggtctcgatctcctgacctcgtgatccacccgcctcggactcccaaagtgctgggattacaggcgtgagccaccgcgcccggccgggaaggcttttttgaaatgtattttcgccgggtgcggtggctcacgccggtaatcccagctctttgggatgccgtggcaggtggatcacctgaggtcaggagttcgagaccagcctgaccaacatggtgaaacccccgtctctactaaaataaaaaattagccgggcagggtggcgggcgcctgtagtctcagctacttggtagtctgagacaggataatcactgaacccgggaggcggaggttgcagtgagccgagatcgtgccactgcactccagcctgggggacgagagtgaaactccatctcaaaaaataaaataaaatgtatttttattttttaatttttttcctctcccctcaagggaggatttttatatataaagccttgacaggacgccagcatgctgcacttcgtccatttcgtgttctcttcaatgtgtattgagttgtgaaactctgaacaggaccctggatcaccttttataaattgtatcaatttttcaatctccacttttcgtcttcctcctttttccgtttctgggttgagatgacctccattcatttcttctctaattgacggctctctggcctctccattggaggaggggaagcgccacaggctgttctggggagaaattgttgagtgttttccactttaaccttgcaatggaatcagtaaggagttggaaaatgccccttctgttggtcttggcggccttttccagctgccagttgtcatggcctctttgtgggtgttttctgcagtagaatcctccttggggtttctctgcagtttgagcacttttgctatttcttctctaccgaactcacgcctccgccagtggagatacacgctttccctccctctggggctattgccatacataattcccagttctccacccgccagttcctcctagtctgtgggggatttcggggtgtggaatcgctgacgggaggagttagctcgggcgggagcattgtgggctgggtaagatctggccagccgttcggtcctcagtttgggaagcaccgcgggactaaggcccaggtttccgctagggtcttgtggggaaccccttgggccgccagactggagcggagagcacagcgcggccagctgcgtgagccggggagccggcgcgcgagttcgggggtgcaggggctgctggggccgccagggtggggcggagggcgctgcggccggggtccgtttgcgcggggagcgccgggaccaggacggccgccagggagcgctgcggcctccaactcgcccgccccccggtaggcggggccgcgctctccctgcagccgccaccgcagccgccgcctgggccgctccgtgtccccggtggagccgccgccgccgccgccgggagctcgatgcggacggagcccgggccgagccatggggatcctcagcatcacggaccaggtcagccctcctgccctttcccgcttcctccttccagggctcggcgctgccgtcacgcgagcccgg

SEQ ID NO: 9785 - DNA, 2300 bp, Homo sapien
cttttttttttttttttttttgagatggagtcttgcactgctgcccaggctggagtgcagtggtgcgatcttggctcactgcaagctccgctccccgggttcatgccattctcctgcctcggcctcctgagtagctgggactacaggtacccaccaccacgcccggctaattttttgtatttttagtagagatgcagtttcaccctgttagccaggatggtctcgatctcctgacctcgtgatccacccacctcggcctcccaaagtgctgagattacaggcatgagccaccgcacctggcccacctgacttttatcaagagcattttttctctttcttgctcgcttgctttcttttcttttctttctttccttttttttttttttttttttttgagatggagtcttgctctgttgctcaggctggagtgcagtggcacaatctcagctcactccaacttccgcctcctgggttcaagcgattctcctgcctcagcctcccgagtagctgggattagaggcgcccgccaccatacctggctaatttttgtatttttagtagagataaggtctcactatgttggccaggctggtcttgaactcctgacctcaagtgatctgcccgcctcagcctcccaaagtgctgggattacagacgtgagccaccatgcctagccaagagcattttttttttctccttgaatcatgaaaagtagtatagtggtatttaattgcgtgggtttctgtccatgaggtctcactcttcatcaagcgcacacttttcaaacaaagatggttctctgtcctaagaatatctggttcttcctacctcgacttctttctataaatattaaaggtaaaaactatgcagtcttagcccagagcttggaatgttaatctcctttcccaaaaatgtagaacacagcactaaccacttgtggaagctacaaagatgaacagtgcttctaactataaacaaggccgaatatgataaaggctctgtgatgattgagtgtcaacttgattggattgaaggaggcaaagtgttgttcctgagtgtctgtgagggtgttgccaaaggagattaacatttaagtcagtggactggaaggaagtgacccagtctcaatggtgggcaccatccaatccgctgccagcgacgctagaaaaagtaggcagggctaggcatggtggctaacacctgtaatcccagcactttgggaagccgagacgggtggatcacctgaggtcaggagttcgagaccagcctggccaacatggcgaaaccccatctctactaaaaatacaaaaattagctgggcatggtggcgcatgcctgtaatcccaggtactggggaggggggcggggcgggggtggtgaggcaggaggatcgcttgaacctgggaggccaaggttgcagtgagctgagatcgtgccactgcactccagtctgggcaacagagcgagactccgtctcaaataaataaataaataaataaataaataaataaataaataaaagtaaaagtaggtggaagaagctgacttgctgaagtcttccggccttcgtctttctctcatgctggatgcttcctgccctcgaacatcagactccaagttcttcagcttttggactcttggacttacaccagtggtttgccaagggctctcggggctttggccacagactgaaggctgcactgccggcttccctacttttgaggttttgggccttggactgatccaccactggcctccttgctcctcaacttgcagacggcctaatgtgagactttaccttgtgatcctgtgaggcaattcttaataaactccctttcatatatacatttatcctattcactatgtccctctagagaacctaaggctctaacagcgacgttcagaggatctacagatatctgcggtagacacgcccacgaagtcgcctctgtgcctacctatcgggtcctgtgaccacaggcgacctcagtccccgaaccatctttgcagcttctcaaacgcacaccccagtgccctttctcgccacaggtgtgaaactacatctcccgacaggcggcgttgtccccttccttccttccttcctctcccaggcccgagccatggcaacagcgtgacgtgggggtaccgagatctgcgggagcagcggtcccggcttcagttctagcctacccggcagcctggacgggagcaaggcgagaggtgctgccgcctcccgtcgcccctgcgctcagaggtcccgaaccagcccagccgctgcctcttgccgctccgcctttgga

SEQ ID NO: 9786 - DNA, 2300 bp, Homo sapien
caggctggagtgcagtggcacaatctcagctcactccaacttccgcctcctgggttcaagcgattctcctgcctcagcctcccgagtagctgggattagaggcgcccgccaccatacctggctaatttttgtatttttagtagagataaggtctcactatgttggccaggctggtcttgaactcctgacctcaagtgatctgcccgcctcagcctcccaaagtgctgggattacagacgtgagccaccatgcctagccaagagcattttttttttctccttgaatcatgaaaagtagtatagtggtatttaattgcgtgggtttctgtccatgaggtctcactcttcatcaagcgcacacttttcaaacaaagatggttctctgtcctaagaatatctggttcttcctacctcgacttctttctataaatattaaaggtaaaaactatgcagtcttagcccagagcttggaatgttaatctcctttcccaaaaatgtagaacacagcactaaccacttgtggaagctacaaagatgaacagtgcttctaactataaacaaggccgaatatgataaaggctctgtgatgattgagtgtcaacttgattggattgaaggaggcaaagtgttgttcctgagtgtctgtgagggtgttgccaaaggagattaacatttaagtcagtggactggaaggaagtgacccagtctcaatggtgggcaccatccaatccgctgccagcgacgctagaaaaagtaggcagggctaggcatggtggctaacacctgtaatcccagcactttgggaagccgagacgggtggatcacctgaggtcaggagttcgagaccagcctggccaacatggcgaaaccccatctctactaaaaatacaaaaattagctgggcatggtggcgcatgcctgtaatcccaggtactggggaggggggcggggcgggggtggtgaggcaggaggatcgcttgaacctgggaggccaaggttgcagtgagctgagatcgtgccactgcactccagtctgggcaacagagcgagactccgtctcaaataaataaataaataaataaataaataaataaataaataaaagtaaaagtaggtggaagaagctgacttgctgaagtcttccggccttcgtctttctctcatgctggatgcttcctgccctcgaacatcagactccaagttcttcagcttttggactcttggacttacaccagtggtttgccaagggctctcggggctttggccacagactgaaggctgcactgccggcttccctacttttgaggttttgggccttggactgatccaccactggcctccttgctcctcaacttgcagacggcctaatgtgagactttaccttgtgatcctgtgaggcaattcttaataaactccctttcatatatacatttatcctattcactatgtccctctagagaacctaaggctctaacagcgacgttcagaggatctacagatatctgcggtagacacgcccacgaagtcgcctctgtgcctacctatcgggtcctgtgaccacaggcgacctcagtccccgaaccatctttgcagcttctcaaacgcacaccccagtgccctttctcgccacaggtgtgaaactacatctcccgacaggcggcgttgtccccttccttccttccttcctctcccaggcccgagccatggcaacagcgtgacgtgggggtaccgagatctgcgggagcagcggtcccggcttcagttctagcctacccggcagcctggacgggagcaaggcgagaggtgctgccgcctcccgtcgcccctgcgctcagaggtcccgaaccagcccagccgctgcctcttgccgctccgcctttggagtgaggagggcgcagcccgcgtcagaacttagagggccaggcagggtcgcgcgcatggcctgggcgggctcgcggcgggtcccagctgggacgcgcgcggcagccgagcgctgctgccggctctcgctcagcccgggcgcgcaaccggccccgcccccaggccctctgccaccgccgcgaccaatgaggtgagagggaggtgaccgcggctgagggcagggggtcgctgcgaaccccggggttccgcggtggaggggtgctatactgggatgcaggcgcggcggggactggcagcaatcatgccctgggagctaacgtagagctttggataatgcttttgcaagttgtacgagaagggaagttctcggggtgagtgtccaacctcttcttggccctcgcgggcgccctggggtccccg

SEQ ID NO: 9787 - DNA, 2300 bp, Homo sapien
agtgcttctaactataaacaaggccgaatatgataaaggctctgtgatgattgagtgtcaacttgattggattgaaggaggcaaagtgttgttcctgagtgtctgtgagggtgttgccaaaggagattaacatttaagtcagtggactggaaggaagtgacccagtctcaatggtgggcaccatccaatccgctgccagcgacgctagaaaaagtaggcagggctaggcatggtggctaacacctgtaatcccagcactttgggaagccgagacgggtggatcacctgaggtcaggagttcgagaccagcctggccaacatggcgaaaccccatctctactaaaaatacaaaaattagctgggcatggtggcgcatgcctgtaatcccaggtactggggaggggggcggggcgggggtggtgaggcaggaggatcgcttgaacctgggaggccaaggttgcagtgagctgagatcgtgccactgcactccagtctgggcaacagagcgagactccgtctcaaataaataaataaataaataaataaataaataaataaataaaagtaaaagtaggtggaagaagctgacttgctgaagtcttccggccttcgtctttctctcatgctggatgcttcctgccctcgaacatcagactccaagttcttcagcttttggactcttggacttacaccagtggtttgccaagggctctcggggctttggccacagactgaaggctgcactgccggcttccctacttttgaggttttgggccttggactgatccaccactggcctccttgctcctcaacttgcagacggcctaatgtgagactttaccttgtgatcctgtgaggcaattcttaataaactccctttcatatatacatttatcctattcactatgtccctctagagaacctaaggctctaacagcgacgttcagaggatctacagatatctgcggtagacacgcccacgaagtcgcctctgtgcctacctatcgggtcctgtgaccacaggcgacctcagtccccgaaccatctttgcagcttctcaaacgcacaccccagtgccctttctcgccacaggtgtgaaactacatctcccgacaggcggcgttgtccccttccttccttccttcctctcccaggcccgagccatggcaacagcgtgacgtgggggtaccgagatctgcgggagcagcggtcccggcttcagttctagcctacccggcagcctggacgggagcaaggcgagaggtgctgccgcctcccgtcgcccctgcgctcagaggtcccgaaccagcccagccgctgcctcttgccgctccgcctttggagtgaggagggcgcagcccgcgtcagaacttagagggccaggcagggtcgcgcgcatggcctgggcgggctcgcggcgggtcccagctgggacgcgcgcggcagccgagcgctgctgccggctctcgctcagcccgggcgcgcaaccggccccgcccccaggccctctgccaccgccgcgaccaatgaggtgagagggaggtgaccgcggctgagggcagggggtcgctgcgaaccccggggttccgcggtggaggggtgctatactgggatgcaggcgcggcggggactggcagcaatcatgccctgggagctaacgtagagctttggataatgcttttgcaagttgtacgagaagggaagttctcggggtgagtgtccaacctcttcttggccctcgcgggcgccctggggtccccggggacagtgatgcttccttaaagtcttagctttcagcagtagtgtaggcccagtcaaaggcaactggcgcttcccacacacccctttttctcatccccctcaccccgcccccagccctgtccttagctgccctcgaccttttgcactcgtgactccctggccagagagagcctagcgggctgcagcaggtgctggggggaaagcttgtttggacgaccttcgtctgggatgcactcttcttctccttcacctacaaatgatagaggattacgaagaactatacggttggctcctctttcctttggccttaggtttctgacctcctgcagcctcctcttgcctcgggctgcccagatcttggcggctgaggctggcttaccttcgagccgttccttcatgggatttgctgctcccttcaccaacaagcgaaaggcttactcggagcgtagaatcatggggtaagcattctctgccttgcatccttgcacctcccttttccctccaaataaccctgtccaggcaagaatgtcagggtatca

SEQ ID NO: 9788 - DNA, 2300 bp, Homo sapien
taaaaagaggtatatgttaccttacaggattattgtaagaaaagaaaaagtaatactgcaaatagatagcacagtacctgttgcatagtaagtgcttaaagaatggaagcctcggccgggtgcggtggctcactcctgtaatcccagaactttgaggggccaaggtgggcaaatcacctgaggtcgggagttcaagactaacctgaccaacatggtgaaacccccctctactaaaaatacaaaattaagccaggcatggtggtgcatcctgtaatctcagctactcaggaggctgaggcaggagaatggcgtgaacccgggaggcggagcttgcagtgagccgagatcgcgccactgtactccagcctcggcgacagagcgagaatccatctcaaaaaaaaaaaaaaaaaagaatggaagtctttgttattaaataacaattgcatatcactgtttgatccttggcacatacagtgaattttctttgaaagatggaacatagaattcattattaaaacctagtgtcttttttttttattttttgagacggagtctcactctgtcgcccaggctggagtacagtggcacgatcttggctcactgcaagctccacctgccagattcacgccattctcctgcctcagcctcccgagtagctgggactacaggcgcccaccaccacgcctggctaattttttgtatttttagtagagacggggtttcaccgtgttagccaggatggtctcgatctcctgacctcatgatctgcctgcctcggcctccgaaagtgctgggattacaggcatgagccactgtgcccgacccctttttttttttttagacagagtctcgctctgtggtccaggctggagtgcagtggcactatctcggctcactgcaacctccacctcccgggttcaagcaattctcctgcctcagcctcccgagtagctgggattataggcgccggcccacaccacgcctggctgattttttgtgtttttagaagagaccaggtttcaccatgttggccaggctggtcttgaactcctgacctcaaatgatctgccagcctcagcctcccaaagtgctggcattataggcatgagctgccgtgtctggctgtaaaacctgctgtcttaacacattgaacgtcaagtcatggtgtagtgaaaaagatcatgattaaacatatcagagggccaggcatggtggctcacacctataatcccagcactttgggaggccaaggcaggcagatcacctgaggtcgggagtttctagactagcctaaccaacatggagaaaccccgtctctactaaaaatacaaaattagccgggtatggtggcacatgcctgtaatcccagctactcaggaggctgaggcaggagaatcacttgaacttgggaggcggaggttgcagtgagctaagattgcgccattgcactccagcctgggcaacaagagtgaaactctgtctcagaaaaccatatcagagttcaaacttgactttagcatttaacctaatactatgagccttagtttactcatctttaaaatggcagtcattatatactttgtagtagtaagcattgggaataatgttttagtgtacattagatagtattacaaatcacttagtgcctgggtcataatagttattcagtgaaatggttatgattgttattctctactttcaaacatactcaatatataacaacccatcatataactaaccatcaacccaaatagccccaattcatggaggacagacgatatccctgcctaattcttctttgctgataattcctttttttttctccatcttgctcctcttctgtcagttgatttatgaagactctatggatctaatcgcaaagctaccttgtgttgcagcaaagatctaccgaaatctctacagagaaggcagcggtattggggccattgactctaacctggactggtctcacaatttcaccaacatgttaggctatactgatcatcagttcactgagctcacgcgcctgtacctcaccatccacaggtaagctagacccagcaaccacagccactaggtgcctcaattggtgggaaatttttttaaaagctcctttatgttctcatcttctgagaacagatgataggcagcaagaagacagaaacgtggcataaaggatgatccaaggcaagaaaggggtctagtaagcaaggtcaggaggcctaaagaaattactgtaaccatgctaagaacaagatggtgcttctggctgggaaaaggtactagctgctcacattaga

SEQ ID NO: 9789 - DNA, 2300 bp, Homo sapien
aatctagtacagaaaaattaatttccttgcctcaggccgtattcctagttagtaacctgattggtcatcttatttcaaagttggtgtatggcctggcatggtggcttacgcctgtaatcccagtgctttgagaggccgaggcaggcagatcacctgaggtcaggagtttgagaccagcgtggccaacatggtgaaaccccgtctctactaaaaatacaaaaaaaattagccaagcatggtggtgcatgcctgtaatcccagctactcaggaggctaaggcaggagaatcacttgaatccagaaggctgaggttgcggtgagctgagattgtgccattgcactccagtctgggcaacaagagtgaaactgtctcaaaaaaaataaagaaaaggaaaaagaaaactcacaaagttggtgtggaacttttattgcaacttaacaatcttctcacagatgtattttttatttgaggaaaaaagaaactacctgtacacacagaaaagcataaactagctaaactattttctctctctctctttttttttttttttttttttttttttttttgacagagtcttgctcatttgcccaggctggagtgcagtggcacaatcttggctcactgcaacctctgcctccaaggtttaagccattctcccacctcagtctcctgagtagctgggattacagctgcctgcccataccacgcctggctaatttttgtatttttagtagagaagggtttcaccatgttggccaggctggtcttgaactcctgacctcaggtgatccaccgcctcagcttcccaaagtgctgggattacaggcatgagccaccgcgcccagccaaactaattattttcttttgacactcttagaaactttgcaagtttccatttctgctaatgagtagtcttctgtcagcttctttgtagataatctttgtgctttttccaggagggtcagaagtaccgttatgaaaggctgccctctgcctgtggtctttcccagattagagaggttgaagtgctgtcgaaagaccaggtgcaggagagatcttaccagcagtgttaagtaattgctcagtttcctcatttgttttccttggggtcactcaaaaatattgataaccgccctgctctggagcccagatgatgggaaagagtctgtcttcaaggaatgctagtgaagctatggatgaaaaaaagcagttaaacctcctgctgtctccatagtggtaactccttccaaactgtttggggacttttacagctttcttatgtcaaactgccctaagagactgagatgaagagagagaggttgagtcactgtaattccttcttgttaatataaaagagggaggggtaacagttacataaggttctcttttttgctttgcagaatgcatcttgtcttgttcttgcagcccggcatgccagtgcttcctccacggtaaggtttggaaaagaagactaagaataagaatcattgcggccagcctgaccttggggcagaggatttggcaaccacctggcctcttattatcctgagtatttcctggaagtgtttgttactattgttattgttatagctgctattattattatattactatttaacaaataatttactcagtggtatagtgagatgggaatatcaatacatttgcctaattcttttaaatgttttaagtagtgtaaaatatacataacataaaatttaccattttaatcatttttaagtatatggtttagtggcagtagatatgtttacattattgtgcaaccatccatctccagaacttttgtctgcccaaaccgagaaactgttcccattaaacattaactcctcattccttcttccccctgcctaattcttttaccctcatttgtgcagagtagttgaccagacttccctggcagataaagccagcttctaaaaagcaaattcttgacacacctactttgcaggaaatctaataaacttttagaccattgcttagtccttctacttttctttttagaatttgaaagacatattggctgacctgatacctaaggagcaggccagaattaagactttcaggcagcaacatggcaagacggtggtgggccaaatcactgtggacatggtaagggttgtgtggctttggctgggaaaagtagctctgtaatgtgcttcaacaaaagtaacattctctccactgactattcaaaagcattctgtcccataggccctgtaggacagctttaggatgacttttccccatccttcagattctgagcagctcagctgatagt

SEQ ID NO: 9790 - DNA, 2300 bp, Homo sapien
cctaaattctcagccttctctcccttgccccttcaagttcccaagcacttagttatacctggacctagagctcacttggctgctttattcatgccaatctttcttccttaacattctctccaacctccccaggtcccatcagtgttgagaaggaatctaggccagctcctgggagatgccagttagccgctttgatcctgtgctttccaattgcccttatagcagtcgatgtcaggattggacaacttcaaaacaagtccataaagtccccatggcactaggggctctgggacccagtgtcgagaggcttagagcattgctgttccccacccaatcactaaagctccaagacagatgatcctgtggcctctcaataattgtccctttggtagtctcatcctggggcactgaagttcagtcctgtggtctgctggttagtctctgtggataattaaccagagaaaaggaaccaggtcagactattctagggttatgtggaaatcctttatgagatgctaaatggggagcaaatattgatcagtgaagctttgaagtcaccggggtcttcaaaggtagctgaggtcagtgctcctctggagcattgcctaaagttttttcctgagacctaactatctgatccccaggccagaagagcattggttgttaggtgtgaagctgagtataaagaaaattaagaagagaaaataggggttttctatctctttttccaagtccaagctagaaactcggttctttgtaaaggagatctatctaaacctggcttaggtggatactgagacctgtgatccttgttactgctatgtggtgagataaaagggctattcacagctgggcacggtggctcacgcctgtaatcccagtactttgggagcccgaggcgggtggatcacctgaggtcaggatttcgagaccagtctgaccaacatggcaaaaccccatctctactaagaatacaaaaattagctgggcgtggtggcgggcgcctataatcccagctactcaggaggctgagatcgcaccactgcaatccagcctcagctacagagcaagatctgtctccaaaaaaaaaaaaggcttttcacttggggctggaggtttgtagataagatgctcttgtccttggggtcaatgactacgacaggcttagggaggcacaaaagtcctgaagcctcgtctacccagaggatttagaaagtggtgcggaatatcacttcagggtcgtgtcatggtctctggggagcacaagataagagagcatagaagactgccaagtaggagaagtggcccagaggccctagagaatgtgaccaaaggggatcttcgatgaggggctagtctgcggctcctaatctgtggctaaagtggggtgagctgctgtgtggggttacgtgaccagagtggcagtgagactaatgcccatgacccagaagctgtggctggctcggaaagccttcatagtaagggcgcagttaagacttggatttcctgccattacacacagaactgacagctcacaaagcactggatattcaggctcctgcttttgcttttctccccatatcggggtctgttagtatctataatatcgtggcctctgctgacctcaaatgatctccaccgagcagctaactctggcatcctagcctgttgtccacatgatgtcacctccatggccgtgaagccattaaccaaagacattcctcaagaaagcgcgccaaggcggtagaaggatcaggcaatgatcagtttccatgatcatattacggaattggctccaaggaccttcagaggtcgagtcctggagcgtctcctttagcattcgcctcagagataaccccaaaagtgttaaggtcaaagggaaaagccaagagggaagttaactgagttatcaggcacctatttagccacccgcacttccccgcccgccacccatccacccttaattagccctaatccgggcggtccaatcctccccgtcacaactgctgtcaagggctaaggtcccgccccgcttccataccggaccaatggccgggcccggggagagtcccttgagaggggcgggctcgggttccggccagtgggcggggcctccttgaggaccccgggctgggcgccgccgccggttcgtctactctttccttcagccgcctcctttcaaccttgtcaacccgtcggcgcggcctctggtgcagcggcggcggctcctgttcctgccgcagctctctccctttcttacctccccaccagatcccggagatcgcccgccatggctttac

SEQ ID NO: 9791 - DNA, 2300 bp, Homo sapien
agacctgaagattcaaggggaaacccatgacagtattgaggatgcccgcacagcccttcagctgtaccgaaagtatctggagctaagcaaaaatggcactgagcctgagtctttccacaaggtgctcaagggtctttatgagaagggcagaaagatggactggaaggtgcctgagcctgagggccaaacaagtcccaagagtaagacctgggatgggacaagggaaactggactgggtggattttgtattttgtttgtttgtgacagggtctcactctgtcacccaggctgaagtgcagtagcgtgattacagctcactgcagcctcgacttcctgggctcaagtgattctcccacctcagcctcccaagtacctgggacaacaggcacacaccaccacacccagctaatttttgtactttttgtagaaacaggattttgccatgttgcccaggctggtcttaaactcctgggctcaagcgatccacccaccttgggctcacaaagtgctgggattacaggcatgagcctgagcgcccccaattgggtggattttgattgcacatatggagaatagcacttaacagtttacaaagcacttcatcctcctaacattcagtaaaatacattttatcgaaactctccattaactataacttcctcttgcccaagtctaaaatgttcagggaaggtccatgcccttttttctcttgcatttttccttcataggaagtatgagaagatgctttttctccactcagcttgaatcatgcttttggttttgtctctgacagatgcagctgtcttctcctcagtgctggcgctctgactacccttcccaaagaaccacggccctctccctttactgttctatagccccagaactgggagatggcttcctaagttggctataccttgtccacttccagtactggacgtgctcagggtctagggtcacagatggtgctattaattgaactggaacacagcagaattgttgcaaaggttctaggagccagattcattccttcttcattctttgcaaaacagtggtacagacatggagtctagaattgacccagatggaaagtaattggtattcttaatatcctgggtgactaatatccaggcagagaagctcctggaaccataactgtaagttcctagctggctagggattgaagtcctggacagtgacagaggataccacagtagttcaagacttagcacaagtcaccaactgcttcagggatacctggaggggccagcaagtagagtgttggtggcccaagcaaaccagtgttgccaataccattgccaaaagggcctttggatcctggacaaagcttggctgccggcttcatttattcctgctgatggctgagaagcatctgtcttccatcccacttgcctgtcccaagttttgttccattttttaaaaatttgttgtaaactgcatgttttataaaataaaaataaaatatcgtttgttatttatctcattagagaactgctagtgtgggttctctggcttcagtcttcctctccttcctttgaaggtaaaggtccggaatccaaagttatggatatgaaagggtataattaggccgggcgcggtggctcacttctgtaatcctagcactttgggaggcagaggtgggtggaacacgaggtcaggagttaaagaccagcctgaccaagatggtgaaaccccgtctctactaaaaatacaaaaattagctgggagtggtggatggcgactgtaaccctagctgaggcagaaaattgcttcaacccgggaggcggaggttgcagtgagccgagatcacgccactgtatgccagcctgggcgatagggcgagactccgtctcaaaaaaaggggaaaaaggtataatttatgccttttctgggcaatgctgggtctttgctatagctgcccagtaccctaagtcagactgaagatgtacagtatggtttccgttaattgtgtaagccgacaaactacaggtcccaggatagcttgagacttgtagttgctcacaaagatgggtccggtgctgcggtgcttcctgggagatgtagtttcctgtgtattgaaacctggactgctcgctggccggcagcgcaccgttttgaaggtcctagcccacctgggctggctcacgcgcacgactagccgctcccatacagcacgcccggactctgtcgtcgcttaaggccactcctattctacggctgacccctggtggtcacgtggatctgttcgccacgcaagtctgggtccttcggcgattgaccgg

SEQ ID NO: 9792 - DNA, 2300 bp, Homo sapien
cctggacccaggaggaaggctctaggaaaggctgtggctactggaaagatttggggactctgagaatatccttgtcttgctcagacaatttctaccttaggtgaccatcaaatattccaagctagggctggaggactttgacttcaaacactacaataagaccttgtttgctggattagagccccacattcccaacgcctactgtaactgcatgatccaggtaagggttgggtattcctgtaacttgaacgtgcctgctgcttttcttcttccctatggctctcgaccctgctctttccaggtctcctcagccgtgttctctttaccatggtctcctctacaattctttcttgcctctacaactttcaagtctcctctgagctccaccggtttggtggactcactgcttcggtggactcctgcttctgggacattttctccaccagctcacttaacctccatatttctcctcacccccaggccagtttcctacatcagttcttctgcttttccctccaggtgctctatttcctggagcctgtacgctgtctaattcaaaaccacctttgccagaaggagttctgtctggcatgtgagctgggcttcctgtttcacatgttggacctctctcgtggtgacccttgccaggtcagtacttggagacacttaaaatggaaggggaaggaaggtggacacaaaagacaaaataacccctttccaccaacacatttccagggcaataattttcttcgggcattccgtactattcctgaggcctcagccctcggtctaatcctggctgactcagatgaggcctcaggcaagggcaatctggccaggctcattcagaggtggaatcgcttcattctcactcaactgcatcaagatatgcaggagctggaaataccacaggcttatcgaggtgctggaggcaggtatgaaatcaggatagaaatagttaaagccatcatgacaggcccctctgtgatttaaaaggtctcctaacttcctcaatgtgcatatatcatcctctccactcttagcagcttttgctcatcgggggactctgttattgggcagctcttcagctgtgagatggagaactgcagcctctgccgctgtggcagtgagaccgtgcgagcctcatccactctgcttttcacactctcctaccctgatggtagcaaaagtggtatacccttcagctcagttgggaaggctccccaaaatgtcctgtaatatcagggagagggtgttggggactaactgtgggtagaggggagaaccaggagtatagcatctaattttccctcagataaaactgggaagaactatgactttgctcaggtgctgaagcgaagcatctgcctggaccagaatacacaggcctggtgtgacacctgtgaaaagtaccagcccacggtgagtggactgttggactggactagagtcctggtcctgccatggagattcagccactatcccatgtggggctggctctgtcagcactgccatccagggatctctggtggagtgaggaatcccagtttgaagacgcagacccaggtccctgtccagactccttttcctgtacattccctgccattccttgtttgtttcttcctctcagattcagacccgcaacatccgccatctgccagatattcttgtcatcaattgtgaggtgaacagctcaaaagaggctgatttctggagaatgcaggctgaggtaaggactcagactagaaacaaggcttccggaataatttttcattttatcccccttctgacctccatatatgattacattcctgaagaactggatgtttttcttctgtgttcaggttgccttcaagatggcagtaaagaaacacggtggggaaatctccaagaacaaggaatttgctttggctgattggtaggtgctgtcttgggagttgtcaaaggattgaattgcccagtggttcctcttatcaagacctctttcggaacaaatttccaattcttctgacctgataggaaggaactagggagtccagagggtgtgctggtgtgtccctccattgaggagttgaagaacgtctggcttcctttctccattcgcatgaagatgaccaaaaacaaagggctggatgtttgcaattggactgatggggatgagatgcaggttgttgaaaaaccgggaagaggaaagggaataagggagagaaggtggggcagaaggtaaaggagggcaggggaaggtgaaacttagcagagggaaaaggaagagaataaggcctagtatttacctgttaggg

SEQ ID NO: 9793 - DNA, 2300 bp, Homo sapien
ccgaccccggcccactgaagtttctcctatctttttcctttactagtctttcttttgtttttagatcctgttggtaaccaaccaaattgatggaactatgctaggtgttagggaggattcaaagatagagaagctagggtccttgctgttaggaagtttagtatttggttggtgaagagaagacatagccatatcagaaattacgttctgttgttaaatgctgaaggaatgtcataagcatttagtgccagagctgtttggaggaaaaatgttattccaggctaaagtgaccaaggaaggtgtaatgaaagagctgggtattaagctggaaaggtgggatatcagttaagtagatagtaacagaggagaatatccaagatgagagaagagtgttagtaaagatctcaagaggcataaatgcaaaacacatatctgagggggactacatgagtataccagtctggccggagtagctgttggtattgggatgtagtgagcgattaaaattagaagtggccagattgcgaagctttgaacaccagtctataatagaggaagtaatacacagaaagcagcattctgcaagggttaatttggtagtggtgtgctggacagagtgaacatagggagaccagtgtggacgccatcacagttgtccatctgtgctgaagcagagtgatggcagtggaaatagaaaggaagcagcggatgctgagagtgctatgaatatagaaggttcaggacttggtggctgtttcaatgttgggataaatgagtgtgaagccaaagatgacaagacatccaacaaggttacctcttcctaaaatccctagataccctacagactcaaggagtcagacagtgaatttgacagcttcagccaggtcactgagtcaccagtaggacgagaagaggaaccacatctccacatggtttctaagaaataccgcaaggtgctgggggacatcagggcctgtgggatgtggggaaaggtaccctgggaaggaagtcatatgagaaaggattgaaggactcagtcaggaggccttcaactaccaccctggacccaggaggaaggctctaggaaaggctgtggctactggaaagatttggggactctgagaatatccttgtcttgctcagacaatttctaccttaggtgaccatcaaatattccaagctagggctggaggactttgacttcaaacactacaataagaccttgtttgctggattagagccccacattcccaacgcctactgtaactgcatgatccaggtaagggttgggtattcctgtaacttgaacgtgcctgctgcttttcttcttccctatggctctcgaccctgctctttccaggtctcctcagccgtgttctctttaccatggtctcctctacaattctttcttgcctctacaactttcaagtctcctctgagctccaccggtttggtggactcactgcttcggtggactcctgcttctgggacattttctccaccagctcacttaacctccatatttctcctcacccccaggccagtttcctacatcagttcttctgcttttccctccaggtgctctatttcctggagcctgtacgctgtctaattcaaaaccacctttgccagaaggagttctgtctggcatgtgagctgggcttcctgtttcacatgttggacctctctcgtggtgacccttgccaggtcagtacttggagacacttaaaatggaaggggaaggaaggtggacacaaaagacaaaataacccctttccaccaacacatttccagggcaataattttcttcgggcattccgtactattcctgaggcctcagccctcggtctaatcctggctgactcagatgaggcctcaggcaagggcaatctggccaggctcattcagaggtggaatcgcttcattctcactcaactgcatcaagatatgcaggagctggaaataccacaggcttatcgaggtgctggaggcaggtatgaaatcaggatagaaatagttaaagccatcatgacaggcccctctgtgatttaaaaggtctcctaacttcctcaatgtgcatatatcatcctctccactcttagcagcttttgctcatcgggggactctgttattgggcagctcttcagctgtgagatggagaactgcagcctctgccgctgtggcagtgagaccgtgcgagcctcatccactctgcttttcacactctcctaccctgatggtagcaaaagtggtatacccttcagctcagttgggaaggctccccaaaatgtcctgtaata

SEQ ID NO: 9794 - DNA, 2300 bp, Homo sapien
cccacctctacaggaaaaaaaaaattatctgggtttggtggccagtgcctgtagttacagctagttgggaggctgaagtgggaggatcgcttgagcccaggaggttgaggctacagtgagtgagagggccaatgcgcttaagcatgggcaacagagtgagatcctgtctcaaaaaaaaaaaaaaaaaaaggctgggcgcggtggctcacacctgtaatcccagaactttgggaggccgaggcaggcagatcaccatctaatattactgtattagaaacagtaattacagctgagctaaataatctatgtcatggatgctcttgtgtctcctcacagtatccttttttcttttctttttttttttcttttttttgagacggagtttcgctcttactgaccaggctggagtgcaatggtgccatctcggctcactgcaacctccgcctcccaggttcaaatgattctcctgcctcagcctcccaagtagctgggattacaggctcccgtcaccaggcccggctaattttgtatttttagtggagacggggtttctccatattggtcaggttggtctcgaactcccgacctcaggtgatccgcccacctcggcctcccaaagtgctgggattacaggcgtgagccactgcgcccggcagacatggattatttagcccaggttattagggatctgtaactctcatgggtctgttaagtctttctcaatttgagacctcaagatggagatttcttaaagtgtaggaactgtctatgtctctcagcatccacctttttcggagattctatatctaatgacctgcgaagtcagatcaaatcagtttgagagaccatctgtgtttttctcttggtctaggctctaggtaggatctctgactgggtataggaccccacccctctgagtcctagaaatttaaattcttggttcctttaatgaaggtctatttaccagcctttattgagagaaatgttatagaattgaatcctccatgaggaatgtctcccatcagagtccctttatgtggcctttagaaacagtaataacagctgagctaaagtgctctgagacatctcacaacctagacccatttcaaagtaattagagttcacaggacccacgaatccttcagaataacaagtcccaatttgccatgctcatccccctctgagggataacgtccagccagcctcaagagctaggggaatttgataaccaggggcatcttgttacccgggaatgttaccggggtctctggggagggaacaatcacggatgggagtttcagatggatgcctgtagaagatgcagccacttggactgtgtcaggagtccggctcccgcttccttttttttctctcccatatctggaaataataggaaatgccagcgagttttgggggcaacagggtcagaggtggcggagtggctcactagggcaccgcaggaagaggaggtagactaagccccgctgggaatacccaacagcgactcctagtgctttgccttgtgtgtcccttattttagagttcctaaagttatagaaagcataaaagtttggttttcaaacctagacgtaattttgttcaagaagactaaaaacagagttactttctaacgccacccaacaagtccggcgtctggctgcgtttgtcccaccggcgccccgtaacctctttttccggcgcgtgcgtcacacgctctctcctggggtcgccgtacctggctccttctgattggcttagatgcgcccggagcccttctgattggctaaaatatgccccgagcccttcttgattggaagaagcgcctcggaccccggtccttggcgccgtagtggttaggttgagccctaggcgtgggggagaactggggaaactggaatttcccgcggagctgacagcgcttgcgctccccctactcgttctaattccacgcgctccaaaatatccgccatggagaaatcttggtaatgacccattccccgtaagcatcccaggaacacatctgacccttgccctatccccctcctcaccgctgccgtgggagaattctagataaccgatttttctggttcccccagagaattctgggtaactagccgtttccgtcaccttcccctgcccccgccccaattgtgggtaactggccattattgttttcctctagagaatcctgggtagctattggagaggattctaggaaactgacttctcgttctccccaccgtccaatccacccgttttcacccccaattctgggagaaagcaccttaaatccctctacc

SEQ ID NO: 9795 - DNA, 2300 bp, Homo sapien
atgcagtggcaccatttccgttcactgcaacctccacccctgggactacaggcacaagccaccatcccggtctggatcctgaatttttaatcactgcattacactggatactgtacgccaggtatggtggctcatgcctgtaatcccagaactttggggggccgaggcaggaggatcgcttgagcttaagagttcaagaccagcctgggtaacgtggcaaaaccccacctctacaggaaaaaaaaaattatctgggtttggtggccagtgcctgtagttacagctagttgggaggctgaagtgggaggatcgcttgagcccaggaggttgaggctacagtgagtgagagggccaatgcgcttaagcatgggcaacagagtgagatcctgtctcaaaaaaaaaaaaaaaaaaaggctgggcgcggtggctcacacctgtaatcccagaactttgggaggccgaggcaggcagatcaccatctaatattactgtattagaaacagtaattacagctgagctaaataatctatgtcatggatgctcttgtgtctcctcacagtatccttttttcttttctttttttttttcttttttttgagacggagtttcgctcttactgaccaggctggagtgcaatggtgccatctcggctcactgcaacctccgcctcccaggttcaaatgattctcctgcctcagcctcccaagtagctgggattacaggctcccgtcaccaggcccggctaattttgtatttttagtggagacggggtttctccatattggtcaggttggtctcgaactcccgacctcaggtgatccgcccacctcggcctcccaaagtgctgggattacaggcgtgagccactgcgcccggcagacatggattatttagcccaggttattagggatctgtaactctcatgggtctgttaagtctttctcaatttgagacctcaagatggagatttcttaaagtgtaggaactgtctatgtctctcagcatccacctttttcggagattctatatctaatgacctgcgaagtcagatcaaatcagtttgagagaccatctgtgtttttctcttggtctaggctctaggtaggatctctgactgggtataggaccccacccctctgagtcctagaaatttaaattcttggttcctttaatgaaggtctatttaccagcctttattgagagaaatgttatagaattgaatcctccatgaggaatgtctcccatcagagtccctttatgtggcctttagaaacagtaataacagctgagctaaagtgctctgagacatctcacaacctagacccatttcaaagtaattagagttcacaggacccacgaatccttcagaataacaagtcccaatttgccatgctcatccccctctgagggataacgtccagccagcctcaagagctaggggaatttgataaccaggggcatcttgttacccgggaatgttaccggggtctctggggagggaacaatcacggatgggagtttcagatggatgcctgtagaagatgcagccacttggactgtgtcaggagtccggctcccgcttccttttttttctctcccatatctggaaataataggaaatgccagcgagttttgggggcaacagggtcagaggtggcggagtggctcactagggcaccgcaggaagaggaggtagactaagccccgctgggaatacccaacagcgactcctagtgctttgccttgtgtgtcccttattttagagttcctaaagttatagaaagcataaaagtttggttttcaaacctagacgtaattttgttcaagaagactaaaaacagagttactttctaacgccacccaacaagtccggcgtctggctgcgtttgtcccaccggcgccccgtaacctctttttccggcgcgtgcgtcacacgctctctcctggggtcgccgtacctggctccttctgattggcttagatgcgcccggagcccttctgattggctaaaatatgccccgagcccttcttgattggaagaagcgcctcggaccccggtccttggcgccgtagtggttaggttgagccctaggcgtgggggagaactggggaaactggaatttcccgcggagctgacagcgcttgcgctccccctactcgttctaattccacgcgctccaaaatatccgccatggagaaatcttggtaatgacccattccccgtaagcatcccaggaacacatctgacccttgccctatccccctcctcaccgctgccgtgggagaattctagataaccg

SEQ ID NO: 9796 - DNA, 2300 bp, Homo sapien
taacggtttaggcccagctgacgtcaagggctccttatagctccaggtcagttgtagccctggatgtagttcctgccacgcaacagtcccacaatctccccaccaacccttcttcctacccaactcctgcagcaccaggaagtgaaacaaagaggcagagccctgtgcctccaactcacccttgtccctctcatcccatcccccaggctctacttcctcctccttttcatctttctttcatctcttatcttttagggctcccagaatggggaccagagatgggaagaacataggagacgttgtacacaagtaaggtgaactccctatcctgccccctcccctttccttattccattggtgtccaccttattagggagagaggcaaaacagttctcacccaaactcagataattctctgatgctggaaatgtttaatctaaagggtagatttccatttttttttttttttttttgagacagagtcttgctctgtcacccaggctggagtgcagtggcgccatctcggctcactgcaacctctgcctcctggcttcaagcgattctcttgcctcagcctcccgagtagctgggactataggcgcccaccaccgtgctggctcatttttgtatttttagtagagacaggatttcaccatgatggccaggctggtctcgaactcctgacctcatgatccgcctgcctcggcctcccaaagtactgggattacaggcgtgagccactgtacccggcccttggtagatttaacttagaatcgtaatatttttttttcttctcttagctcatacctacagaatcataatatttgaaccagaagtgtcattgggcagttttgaatagctctaagggaagggagacctccattcaggacaagtttctcagaagaaaagggtcaacctcttgggggaggctttgggagccagctgtgtggtcaccgatggcctcattctgacgtcttcgaaattgttctgggaccctccactggggtcggggcagtcccggctttggaccaccttccactcccacgcccaacctcacactcttagctgtttcactcgatgttgcatcatggagggtgatgaaatcggtgtcagtggattttacccatggatgcaacaagctgaaggaccagccagagtcattgacagtgcaccttcgactacccagaactcctgggcttcctagccatggggtccaaagctgggactgccccgaccccagtggagggtcccagaacaatttggatgacgtcagaatgaggccatgggactaggtgctggaatgtctaagttgaacttccaggccttatttgcactagtcctgaaaaaaacatcatccaactcttatagagcctatgaaatcttgggccactagggttgaggagtcaggtggttcttagtcaataaccctcttcccacaagagcctttctaacctccactgtgaggcctgaaatggggagcaataagacctcatactggcttcccagttctccaagttccttcatgcgcattctctcccatgaaaccaggaccatccagttgaaataatgttgtttccaactgagaaaaagaagcccgtttattcctaatagggggcatcaggtaggaatcaaacttcattgcaaacagctcaccatcctattgggagatgaatggatgtttctctgttttgctttttcctcaagcaggaggaagtgaggaaattaggtttggggtggggtaggggtatagctttgagaggcaaaaagatcagggaaagatcaaacaggaaggaacttgagaccagattaatttaaatatttgttctcccttacccctcccaccccatccccgctgtgccccccatccccgccccttctatagctatttcgattcctggagagcattacacatgtgtcccatcccaggcctctagccacagcaaccacactactcatttcccctggaactgaggctgcatacctgggctccccacagagggggatgatgcagggaggggaatcccacctgctgtgagtcacctgctggtataaagggcgggccttacaatgcagggaccttaaaagactcagagacaaagggagaaaaacaacaggaagcagcttacaaactcggtgaacaactgagggaaccaaaccagagacgcgctgaacagagagaatcaggctcaaagcaagtggaagtgggcagagattccaccaggactggtgcaaggcgcagagccagccagatttgagaagaaggcaaaaagatgctggggagcagagctgtaatgctgctg

SEQ ID NO: 9797 - DNA, 2300 bp, Homo sapien
tgagccacccattgcacagcatttagatgtcttctagaatggagctcctccttcctatatggagggcagtttatatggtgtacttacctgaccaccaaaaagatttggctcctaaaaaagcttcaggtggccgggcatggtggttcacccctgtaatcccagcactttgggaggccaaggtgggcagatcacctgaggtcagaagttccagaccagcctggacaatatggtgaaaccccatctctactaaaaatacaaaaattagctgggcatggtagtgggcgcctgtaatcccagctagtcgggaggctgaggcaggagaatcccttcaactcgggaggcagagtttgcagtgagccgagatcgtgtcactgcactccagcctgggtgacagagcaagactccatctcaaaaaaagaaaaaaaaaaaaagaaaaaaaaaagcttcagagccagcagggatcatgctgtaataaatacttaacatcaacactgatctttaaatgctttagcacaatcaaatataaataacaaacacacacataaatgcaaaataaatgaattagggagatagatgaaataagattgtggaaatagtaatgtttgttaaagctggatggtgatccttgtactattcactctactctagtgtgtatttgaaaattaccattaggctggttatggtggctcatgcctgttaatcccggcattttggaaggctgaggcaggcggattacttgagctcaggagtttgagatctgcctgggcaacatggcaaaatcccatctctacaaaaaattagctggcatgatggcacactcctgtagtcccagctccttgaggggctgaggcagagaatggcttgaacctgagaggtcaaagctgcagtgagccaagatcatgccactgcactccagcctgggtgaccaagtgagaccctgtctcaaaaaaaaaaaaaaaaaaagaaagaaaattcccattaaagcacaaaggcccacttattgaagctattaaaatacaggttggggccggctgggcacagcggctcacgcctgtaatcccagcactttggaaggccgaggtaggcagatcacgagttcaggagatcgagaccatcctggctaacacggtgaaaccccatctctactaaaaatacaaaaaaaaaaatcagccgggcatggtggcgggagcctatagtcccagctactcgggaggctgaggcaggagaatggcatgagcccgggaggcggagcttgcagtgagccaaaatcacaccactgcactccagcctgggcaacagatcgagactccatctgaagaaaaaaaaaatacaggttgggaccacagtggctcatgcctgtaatcctagtactttgggagtccgaagtaggtggatcacctgaggtcaggagtttgagaccagcctggccaacatggcaaaaccccatctctactaaaaaatatacaaaaattagctgggcgtggtggtgggtgcctgtaatcccagctactcaggaggctgaggcagaagaatcacttgaaccagggggatggtggttgcaatgagccaagatcatgccacttcactccggcccaggcaaaagagtgagagtccatcttaaaaaaaaaaaaaaaaaaaaaaaaaaaatacagattaggcattcctaatctgaaaaatttggctccaaaatgctccagtgagcatttcctttgagtgtcatgtgggtgctcaaaaagttagattttggaccatttcagatttcagagttttggattagggatgctcgactggtaagtaatgcagatattccaaaatctggacaaatctgaaatccaaaatgcttggaatagcagatactcaactggtagcactccctggaagaatatgcaccaaactgatagcagtggttacttctggagaggaggggaaagaaccaagattagcagtaggatcaacatatattttaatgttttctgtatttttattacttgtataatttaaacattttaaattagtaataatgaacaatcatgaaactatggatgatttagtccagcaaaatatccaattgggaaccctcatccttctgacgcagagcccaaatggcgcagtgggaaatgctgcagaatcttgacagcccctttcaggatcagctgcaccagctttactcgcacagcctcctgcctgtggacattcgacagtacttggctgtctggattgaagaccagaactggtgaggccttcaggaagttgggggaatgaaaaaggtggttccttacttctgggcccccgggatcctg

SEQ ID NO: 9798 - DNA, 2300 bp, Homo sapien
aatggtttgtatgtttcggatttctcccctttctagggtactctgctccagacatgcgtggcctcagactcatcatgataccagttgagctgctactttgctacctcctgctgcaccctgtggatgccacttcatatggaaagcagacaaatgtcttgatgcactttcccttgtccttggaatcccagacaccctcctcagaccccttgtcctgccaatttctgcacccaaagtcactgcctggtttcagccacatggcccctctacccaagttcttggtaagcctggctctaaggaatgccctggaggaagctggttgtcaggctgatgtttgggctctacagctacagctctaccgccagggtggtgtgaatgctacacaggtcctcatccagcatcttcgagggctccagaaaggcagaagcacagagaggaacgtgtcagtggaagccctggcctctgctctgcagctgttagccagggagcagcaaagcacaggaagggtcgggcgctccctcccgacagaggactgtgagaatgagaaggagcaagctgtgcacaatgtagtccagctgctgccaggagtgggaaccttctacaacctgggcacagctttgtattatgctactcaaaactgcctgggcaaggccagggaacgaggccgagatggggccatagatctgggatatgaccttctgatgaccatggctgggatgtcaggggggcctatgggtctagcgatcagtgctgcacttaaacctgcattaaggtctggggttcagcagttgatccagtattaccaagatcagaaagacgcaaacatctctcagccggagaccaccaaggagggtttgagggccatctcagatgtgagtgacttggaagaaacaactactctggcttctttcatatcagaagtagtaagttcagctccctactgggggtgggccataatcaagagctatgacttagatcctggggctgggagtcttgagatataaaagaatgtggtaaccacagaattaataactgtactaccctgacaagctatatacatgtcttcaaaattttaatctgatttatccaggaggaaggctgtacagtaaaacgtaagaacgtaaatgtttgggtgttgaagtcacagggtttggtttcgaatctaggctccacttgttagagcctcggtgatcactgaatagtaacttctttcttgaactaagatcagttttgaagtttctaaaggagatagaatgattttaacctcaatgagttgccctgtaaatttaaaatgatacaatgaatctaaaatgcttatcacagtactttcaataaatagctattagccaggtgcggtggctcacgcctgtaatcccagcactgtgagaggctgaggcgggatgatcacctgaggtcaggagttcaagatcagcctgggcaacatggcgaaaccccgtctctacaataaatacaaaaaattatcctggcggagttatgcacgcttgtagtcccaactacctgggaggctgaggcgggagaatcacctgagcctgggaggtcgaggctgcagcgagccgagatcgcgccgctgcattccagcctgggtgacagagcgagaccatgtctcaaaaaataaaaataaaaaaaaattgttttcattacctcagccctcctcttcctatcccaaggcgtcgaaattccggtcccaccccttcccatggagcccttggcgtctccaggctcctcaagctagtttcggttccggggctcacgcgcgggttctcgaaaatcagctgtttcagtcttgggctagtccactaattggactcctcccctcgtagaaagtgcctacttgaacttctccaccaatcgctgaagctgcaggtgtggtttcggctcagcttgtcccgccctgcggaggggcggagttgcggcggcgccagtgagctcgcagtctgggaagggcttgactgaatggcagccagtgtcggggtggcggctgggaatgggggccgctccggacttccgctgccaactacaagggggcgggtccgaggggggttagccgaagttgtaggcggggcgcgaggttctagtacccgagctcatactagggacgggaagtcgcgaccagagccattggagggcgcggggactgcaaccctaatcaggtacgggccctgagagggtgtgctggggtaggggtgggggtgagagtgagagttcctccgagggaagggcgactggccccaggggttaccccctggagagggtagcttcggtccccagattgaaataggagc

SEQ ID NO: 9799 - DNA, 2300 bp, Homo sapien
gtgccactgcactctaccctgggcaacagagtgagactgtgtctccagaaaaaaaaaggaaaagaaaaagaaaaagaaaaaaaaaaaaagatatgggacaggactgcagggcctaaaaggggaaaggtcagtttgtcagtatgggtcaaaggtgagaaggacaaagtctgggctgggaagagatgcataaatatttgcaaatgttttgtccttcactgttttggaagccatcaactttctggtttccttgtgattctgggaaagggcagattaaaaacagcaacaacaacaataatagtaattcaggtcatgaagataccaaagcaaatgagatgtttggactgtttttttcctctgacttgtttctcctcaaaataggaggatcacccacatcctttaagagtgaagatgaggtgtgctcagggcaaccgaagtttccaagagctaagacactttctagctctggccagtcttggtgtctctttgtcctgagcctttctccacttcccaacctgagcactgcttccttccagcagggctgctctgctgtccccccatggtccaagctgtgctgctgctttgctgtgtcctgctgtccctggtgtctgcctttccaagaaatgctcagaatgagactctgaccctccagccatctttaacagagactgggcatccatcaaacatgctctccattatttggagaacatggagagccagattcctctcccagatcccaggatctgccaagatctcttacacacagccccctccctagcccctctgcctgagtacctgtccaacttagctctgagggtgcccttggaggaggtgggctgcccaactgaggcccatgttctgcagtttcagatgcgaggaaaggataccactgaaaccctcatccgtgagagtcaaaaagttcaatggggaggaaggcaataccaacatcattgtgacgaatctagtagtcccttagggaagtgtgaataaacccagcacccagctgcccatcctgggaaatgtatggatggtggcaaatatacccactggggtagctggcctaccaggtagctcagatggtgattgagtttgctgagaaaccatctcccatgatgcttggtgtcacagttcaaagttttgggtgtccacatcaccaagaactgcaggtatgagtcttgggagcatattgaagaattaggcaaaaagttgaagaagctctcaagatcatttaaattgtccatggacagtgacaatataatctatcaaatgttccacagctattctgaagtgctttgtgaggaaaatgatccaggaattgatcccggctcatttcagctattcaatatcacataagtaatgagtctcctttcccaggactgtattcaaggatggcacacagtaagtagttagaaatgttggagaccacttaggacagatgaatgctctttatttcacctcttcccttaaacacatatgtgaccagtgttagccttgcccctctccacttagtaggtgtcagctcccctccttttttttttttaagacggagtctcactctgtcacccaggctggagtgcagtagtgcgatcttggcttactgcaacctccacctcccgggttcaagcaattctcctgcctcagcctcctgagtagctgggactacagacgcccaccaccacgcctgggtgtatatatatatatatatatatatatatttttttttttttagtagagacagggtttcaccatattggccaggctggtctcgaactcctgaccttgtgatccgcccgccttggcctcccaaagtgctgggattacaggcgtgagccaccatgctcagccgctaatttaatttttaaaatgaagagaaatgagagtatcacaaacatctcatctttcctaattctgaatttccctggctcctatcatgagcttagagtgggaatgtggcagggacatacaggaaatgccaaagaacaggactgtaggcatagaggttgagtgtgtgacaaggggcacaaggtttgagcagccagtataaatgggcaaatatttgcagagattacatccttcactgatcataggggaaagcaaatatctcctttcctcatgggacacagaactaggcagaacaggatcaggaagcgatcaaacctaccaaggcagtctcacttctcaatgactggactgtgtggtaatttggggtccctatatatgggtggaaataaaacagaagtccctggtgacctgtaaatgggggagaccaagtgggagcaactggggtgcatttcctatttcct

SEQ ID NO: 9800 - DNA, 2300 bp, Homo sapien
gcaatgacaggggtggctggggaaagaggctgagtggtgtccacagaacaggtcatcctatccacttggttattaaaatcctcctctgctgaggtcaccctttggtgaacactcacatgggatacaaatatcttcagttttgaccactcagagaggtccatccacatacctcttccaagtccctgaccatccagccaaaccattggctaacagccgatgaatcagtatataatcgcacatctagccatttctcctgccatgcaaagtgcacaaccagatgcactgctcaaagttttgcccgctgggaagattccccttcaccgctgtccttcagggatgtcctagaaaggggctgtagtactgcagctgtccactttcggatggtgcctgcataccatgcagaaccatctgtgaaccaggccgtagtcttctctttctctgtcagctgatcatagggcactccctgtgaggccatcagtgcaggctgggaaagaaaaggcagggtggcaagagtggagaccatgggcatttgagccacttccccatgtaacttacttgtgccttcaggacctgctctagcccgatcacatatatgcaacttccatttgatgacagaatgcttctgtgcaagacccactttatggctagatggatcagaaagcacccagttcatgataggcagttcaggtcgcctggtgacttgatgacctatagtcaaacgttcagtttccatcaaagcccagtaacaggtcaagagctgtctctcaaaaggaaagtagttatcgccagaagatggcagggccttgctccaaaatcctagaggcctccactgtgattcacctatgggggccttccaaaggctccaaacagcatctctatctgtgactgacagctcaagcaccattggatctgccgggtcatatggcccaagtggcagagcagcttgcacagcagtctggacctgttgcagagccttctccttttctggaccccactcaaaactggcagccttttgagccacttgataaatgggcctgagtaacacacccaaatgaggaatatgttgcctccaaaatccaaataagcccacttggtgttgtgcctctttcttggttgtaggaggggccaaatgcagcaatttatccttcaccttagagggaataacccctgaattttagtcagacttatttcccatcctctagcacacaaatgtctcaccaataagtccagtgtgtttgctacttcttgctcactggatccaatcagcataatgtcatcaatgtaatggaccagtgtgatatcttgcagaagtgaaaagtgatcaaggtctctcaataagattatgacacaaagctggagagttgatatacccctaaggtaggacagtaaaggtatattgctggccttgccagctgaaggcaaagtgcttctggtaggccttatggacaagaatggagaaaaaggcatttgccaagtcaatggctgcataccaggcaccaggagatatgttaatttgctcaagcaatgaaaccacatctggtacagcagctgcaattggagtcaccacttggttaagcttacaatactccactgtcattctccaagatccatccgtcttctgcacaggccagatgggagagtcgaacagggatgtggtgggaatcatcaccgctgtgtctttcaagtccttgatggtggtactaatctctgctattcctccgggatgtgatactgtttttgatttatgatttttctaggtagaggcagctctaatggcttccatttggcctttcccaccataatagccctcaccctaccagtcagggagccaatgtgggggttctgccagctgctatgtatgtctgtgccaattatggattctggcacatgtggggaaaagcaagagagatcagattgttactgtgtctgtgtagaaagtagacataggagactccattttgttatgtactaagaaaaattcttctgccttgagattctgttaatctataaccttacccccaaccccgtgctctctgaaacatgtgctgtgtcaactcagagttgaatggattaagggcggtgcaagatgtgctttgttaaacagatgcttgaaggcagcatgctccttaagagtcatcaccactccctaatctcaagtacccagggacacaaaaactgcggaaggccgcagggacctctgcctaggaaagccaggtattgtccaaggtttctccccatgtgatagtctgaaatatggcctcgtgggaagggaaagacctgaccgtcccccagcccgacac

SEQ ID NO: 9801 - DNA, 2300 bp, Homo sapien
ggaaccctcaggtaaataaataatcttcaggagatagaaggtgctgagaggtgtcaagggctgggagatgggaaaacaatgagaaagtagacaggcaggttgagggagctgcatggagaaggacagaagagagtgagtgaggagggggcagctgggaacagctatagagaaaatacctagagggccaggttcgggtctgcattggaccagagaggcctcatagtaacctccttctcctacaggagctagtgacttttgccaaatacatcctgggcaaattttttgcactggctgcagtcaaccaaaaagcctttgtggagctgttgttctggaagaacacagctgtggttcgagagatgactgagggctatggctccctggatgacaggtgagcttgaagttggcaaagggtgggtgggggtaggggaagtttgatgcagagtcacagaatgtcaaagctgttaagagcttgcatgtcatttagcccactgtttctttccctattatgggtgagagaacaggctcaggaggtgaaatgctttacctaaagttatccaagagaggagcagggactggagcctaagtctagtgtgtatctagtttccttctccatcaccagcctccatagaggtagtcactgttgggagctgggtggttgcccagagggagtctgtgtgcgacctctcccaaaatgtgctgggaaaccatgaggatttgtagaaatgtttgtcctctttcccttagtatctcagcccctctcctttcacacttagtctctttttcccataatattctcagtccctagagtcagaatggtcagggttccattggcccaacctggaaaatctcttagtttgacttttaggttcttacgtggaaggaaagtgaggggaaggaggcacactgtaggcctctgctggctggcctctttcagttacctgccttgtccttcctgttcttttcagaactgatcagagaaggcctttggtctcctctttttgggccaagaacctatatgctccctttctcctttcaccattcaggtcttccagtcgcagagcacctacatggagccccgaagaagaggctcatcttcgggagctgtacctcgccaataaggacgtggaaggtgagaggccttgggatctggagagtttatgaggagggcagcttgagctgtgggaccttctttactgccttagtccttccccacgccagggcaggatgtggtggaagccatcttggcccacctgaatactgttcctcgaacacgcaagcagatcatccaccatctggtacagatgggactggctgacagtgtcaaggacttccaaaggtagagaggcacatgctctggaggctattgggatggggactcgtgatcacttcctgggcttcctcttccactgacaccttcctaatcaggaaaggaacccatattgtactgtggacgggggatcaggagttggagctgcagcggctttttgaggaattccgggactcagatggtgagtaagctggaaactcaggggacctttgagatgaaagccaagctatccatttattttggggctgccttttattcccaaggaaagattctcccatcccttctgttcacttactatatttgtaagtgtcatttttggatgaattgaggtaccctctttccagagacctctgatttattttactcatctctttccctgttacccttgggtattcacatgcttgctttttatagatgtcctgggtcatatcatgaagaatatcacagccaaacgctcacgggcccgaatagtggataaactcttggctctggggctggtggctgagcggcgggagctgtacaagaaacggcagaaaaagttggcatcctccatcttggtaacaatctgaccctagctctgctggcatgggctcacttcccttgaagtggtccttaggagcagtccacctggattcttcctgcctgaggctgttctgaccaggtccttccgagagagcaggcgcgggggggtgcggtggtcaggaacgaggagactccactaagttccttgtgttgccttcattttcattcccccaacccccaatgaattttagccaaatggagcggagtccctgaaagatttttgccaggaagatctggaagaagaggaaaacctgcctgaggaagacagcgaagaggaagaagaagggggctcagaagcagaacaagtccagggtagcttagtcctttcaaatgaaaaccttggtcaaagcctgcatcaggaaggtgaggactttggctgggagagatgtct

SEQ ID NO: 9802 - DNA, 2300 bp, Homo sapien
gaagcttttccatgtgtcttatttgatcctcatagcatctgcttattctgtagacctcttgagatagcactgcttttggcaaacctctgaactcaggaaatgggtcaggagttttgccatgacatcttatgctcactcacattatagcttttatccacactctagtgtaattacctttctacttcctgtctccaccactagagtaaaagctcctcaaagggaaggaaatatgctgttcactattgctttctattaccgatggatagcagataatgggcactctgtgaatgtccagttaattagttttgtaatagaaaagacactgatggggaaagccctctttagctctcttgacatcctaatacaattctttccccacagaacaaacaaaagaagagaaggaagaagaagaagaaggtcctagaccaggccattgtttctggtaatgtcccatctagcccagaagaagtggaggctgtgtggccagccctggctgagcagctacagtgctgtgcccaggtaggtggttacagaaaccctgtcttttttgagaatagtgctcagggtatacaatctgggttttccactccctccgctcccatagctttatccatctctagaattctgagctcagcatggactccgtggttccctttgatgcggcctcagaggtgccagtggaggagcagcgggcagaagctatggtacggatccaagactgtctcctggctggccaggccccacaggccctgactctcctgaggtctgctcggtaagaaccctgcctgctcatcctcttgggctttgggggaaggaggaggccatcactgcggtacagtgttctcagtcttcaaaagagagttgtctcatcaaggctctgggactgtataccaactgactcctggggcgttttgattggtttgttgggtttttttgtttctgaaaaacattaaaaaagcatagttaattgagaaaaaaataaagaaagcaaatcctcacttgacatcatcaataagtccttggtaattgcagctttgagtaaaatgacctacggcatgtttcttataacgttaagagaaaaaaaactggttttgttatacattgtttcacttaaagtggcagtatccaagaacctattgaagacattaagggcggacttaactttaattctagtagccaaagatatgcatcattaacattttgatgagtaaccatccagaggtttttttgctccgttacatgtaaaaatatcgtatataccttgttttacaaaaatgaaatactgtacatgctgatttatagtaatttttcacttctcagtatattatgagcatgatttctcatcagatatatttctgtaattgttaatggctttaaaacaccattgtgtgaatatgtacatttgttcaaccaggtgtcaaacatttagattgtttgcattttgttcttagctggtttttattgaattgtggcttatgaggaaaattttccctggagtctttgtttcatttgaggtaacagtttgcattctgtttctggccaacaaaagaaataagtctaaattccttcttctacttcgaattataaatttaaagccagatttcccctgggtaaagccttttttctatctgtgctccagggaggtgtggcctgaaggagatgtgtttggctctcaagacatttctccagaggaagagatccagttgctgaaacaaatcctctctgctccacttccccgtgagtctccacccttcacatctgtctccttccagctcttttctagcaccaacataacagagactcagtaatcctccctctgtctatagggcagcagggcccagaggaacgtggggcagaggaagaagaagaggaggaggaggaggaagaggaggagttgcaagtggtccaggtgtcggagaaagaatttaattttctggactacctgaaacggtgcgggctgagaggcctgagttggtcctagagtggcgattgtgcggctgtgaggatgagctatgtcttccttatgctgacatcctctccctccttgttttggtgcagctttgcatgttcaactgtcgttcgagcctatgtgctgctactaaggagctaccagcagaatagtgcccacactaaccattgcattgtgaagatgctgcaccggctggcccatgacctcaaaatggaagccctactttttcagctgtcagtcttctgcctcttcaatcgtctgcttagtgaccctgctgctggagcctacaaagtgaggggataacaaggaatggggttctggaagggtatgg

SEQ ID NO: 9803 - DNA, 2300 bp, Homo sapien
cctccccaagcctgagtattccttttctctttctacaggtgtactgggtaggcccaatcattggagggggtctgggcagcctcctgtacgactttcttctcttcccccggctcaagagtatttctgagagactgtctgtcctcaagggtgccaaacccgatgtctccaatggacaaccagaggtcacaggggaacctgttgaactgaacacccaggccctgtagaagctccagctgaatagagggagtagaaagcttctgagtttacgtggaggggtttagccagcccctagatgaagaaagagactgtggggagggtcatgtacttctttattttttaacttatgtatgtggttgttttttttttttttttccttttgctgtgtgaaatctttcaagttgcattcatgagctggttggtgcaaacttcccttcctccccatcccaccacccttcgccgtgtgtgctgattgtgcatatgaatgtgagtgtggctgtgtctgagttttggggcatgagagctaaggaagcaaaaagaggtgccatcctatacctcccttcctcgacccagtatggtgagtactgggtaaccgacaccttaagtttctggcctttaccctgctgccagtcaagtgtgtggctcttgatttctgagggaacagagaagcagggagttactcctcacacgaggcagatggagagaagtggaggagacaaggcttccaagggttaggagaagggactcaagggaggtgggtggtgaaaacggagtattagccccagatcaggatgtaggtgtaccgaagaattggggggaagttaatgggaatatatagcctacttatcttagggatgcttgccccagggacttgggtggggaagtagctctgagaaaagtgaacactaggatttagctgttctgtaaagccacgtaaacctgtctacatccgctggctggttgtgttcattctgacataatggatctcttcagaggtcctgggccaaagagcttccaacctaaatagagcttgggcaagcctagaatctagaaaaattaagcagcttaactggtcagcctgacatccactgttgtggctgcctggcagatggtatttaagccccacaattgttccctaaggccaacacaggaaatctgattcctggagcaaataaatgaacgggtggtagtagggggcatgaggggagaggctttgactctgttctaatttatttagagcaaatcaaaacactcctcaaatggcatctttctgcttttatcactagttccgtgttttttttcttgttttgtgtctgtgtattttcatttctctgtcatccgtcctttcatcttgaagcaaatctcttctaactccctcataccccagaaattgattccttctattcaaatgcttaataattcaggagattattatttgtttgagccctatcttctttttttttttgagagggggtcttactatgttgaccaggttggagtgcaatggatattcacaggcacgatcatcgcacactacagtctagaaatcctgggctcaagcgatcttcctgcttcagcctccccagtagctgggattacagggggccagagcacagccctattttcttttccttttggcaagatcatctcagcagaggccagaagagaccctcaactgttcaatgaatatttacggttgctttcttccttttatgagcctcttgcatactttgaaagctttaaatttatacctataatacaacggacatcccctatcccagaagaccattcctccctgtacttcagctctttacttcctcccaaataaaacctaacttttctaactaactatttaagacttggaatagtccgcttgactagaagaaggggaagaatgtttgtaaattcacctctaatcggactttgattctactataattcagcagaaaattcatagcgctgtgatttttagatcgacctcacataaaacagtccctgcactcgcttcccttttccttccttcttcaccaatctccgccccagttcgctcggagtcacgtggaccagcccggctcgccccgcctcgctcttcgcgcaggcggggaccggtccagctgagcctggtggcggaaaggctgcggccccgcgccagagggccggtggctcctccgggcttctgaggacccgcagggagcgggtgagtgagtgtgtggcgagagggcgctaagcggacacggggatcctttcgaagctatgggggcattctcgggaaacgctgagtcccttttcccgccacccggttt

SEQ ID NO: 9804 - DNA, 2300 bp, Homo sapien
accactcgactccagcatgggtgacagggtgaaaccctgtctaaaaaaaaaaaaaaaaaaaagtaatatctcagtttatactcccaccagcagttgtaactggttcttttttttttttttgagacggagtttcgctcttgttgcccaggctagagtacaatggcgtgatctcggctcaccacaacctctgcctcccgggttccaacgattctcctgcctcaacctcccgagtagctgggattacaggtacccaccaccatggccagctaatttttcgtatttttagtagagacggggtttcattatgttggtcaggctggtctcgaactcctgacctcaggtgatccacccgcgttggcctcccaaagtgctgagattacaggcgtgagccaccgcacccagctggttctgtcactttttatcctcacctaattggaccagagtatctgtggccaaaatctctgctcttaacaccatgatgtgctaccctctctctttatcctgtccaggggaacttttctggaggcagtgtgaaccctgcatgcttcctgaggccagcagtggtgactgggatctgggagcattactgggtgagatgcactgagggttacagggccttaagtcaggagactgatgaggcttctagaatataggagattccaatgacttctagtggactgtttctcttctatgtaattgagagctccaaaccctttgggtgctctctgacctgttctcagcaactcttcctgccagtggataggttagatggaccctctaccttcactataactctctttctgtccatccccaagctgggtattatgaggagaaagcacagcccctgatctgtgttccttctctctccccacaggtgtactgggtaggacccatgctgggcaccattcttgcaggcctcacctcgaatttctgctctctggtgcttcatgagaaaagtttgtggccggtatgacttgccactatgtggagatggtagaacctatcagtatgtcccattctaccttctccatcaccacacaaccccacgcctaggtcccaagtccctcaccaagcccgagcacaactgaacctctttccccaaactttccttccccatattatccttttccctctctttgatcggctgtttccccagatctgatcccagcacacccatacctttccctggggatcaaggcttagggtgtgctgatcatggctgtattaaaggacattagaccttcccattgcttcatagccatgactgtttccttcctttcagtacttcttgctatgaccatgtgagttaggaaagatgaaatacaagctgattctaaggtttaactacgagtccctttcttattcctatccctccaaccccactcccagcccatgcagggatgatagtgtcttctctctgtcggtccctgtagtttaaaaagccaggcctagggtttgaaaagggaggtgctgtcatggactgggggtagggaacccgggctcagagaaagccagacgcagcagaactattttgtcccagagctgcagggtccacagattccagcccaaactagccaatgggagaaaggcttctaatccctgggaactaaagaattctctttagttatccaacttccctgctgaaccccactccttaccactccccccaacccttacccctggcagactcagaggaggctgaggcccccaggagctcagccccaaatgccatgaagtgagctcagcttgatggaccttccaaagagagctgaagagtattctaatgttgatgtcaatcaggacaatgaaccccaattttgacacacacagaagggcagactcttccagtcctgctgttcttcacccccacttctcgtagtctctcttgctgtgaccccaatcccaccctcactgccatggctctctcggctcatctcccagttgagaaaggcgggaaaatccagcatttttaccatgtaggggaggggacttagccctccacagctgtgaaggggttaagaggctgggcctgctacctcagcctgcccctcccagggattaagagtcctctataaaggggactgtccacccagacaaggccatgggggtagcagggacccaggcactgtgaccatcccccctgccatgtgggaactgcgatcagcctccttttggagggccatattcgctgagttctttgccaccctcttctatgtcttctttgggctggggtcctcactgcgctgggctcctggacccctgcatgttctgcaggtggctatggcatttggcttggccct

SEQ ID NO: 9805 - DNA, 2300 bp, Homo sapien
aaaaaaataataaaataaaataaataaataaaagaaatgagaaagccttaaggccaaggatgacagtggcctgaactagggccatgtgcatcattcaaggcagttaccactctgggagaggaggaagaatttttggttagttatttaggcttttaaatatctaggccagaagccaggtgtggtggctcacacctgtaatcccagcactttgggaagctaaggtgggtggatcacttgaggtcaggagttcgagaccagcctggccaacatggtgaaaccctgtctctactaaaaatacaaaaattaggccaggtgcagtggctcacgtctgtaatcccagcactttgggaggctgagatgggtggatcacctgaggtcaggagtttgagaccagcctgaccaatatggtgaaacccgtctctactaaaaatacaaaaattagccggacgtagtggcatgcgcctgtagtcccagctactcaggaggctgagacaagagaattgcttgaacccgggaggcggaggttacagtgagccaaggttgcgccactgcactccagcctgggcaacagagtgagactcagtctcaaaaaaaaattagccaggtgtggttggtgggcatctgtaattccagctactcaggaggctgagacaggaaaattgcttgaactccagaggcagaggctgcagttagccaagatcaaaccactgcactccagcctgggtgatagagtgacactccgtctcagaatatacattttaaaaatatatatctaaaatccttttttgaggggtaggaggatggaggtgggatgtatgttgctattgcactggccagcagaaccttgagaagtggactgattaaaaaaatgtaggcctggcatagtggctaacacctgtaatcacagcactttgggaggcaaaggtgggaggatggcttgagcccgagaattcgagaacaacttggtcaacaaagcgaaacccccgtttctacaaaaaagttaacggggcatggtgcgtgcacatgtggtcccagctacatgggaggctgaagcaggaagatcgcttgtgcctcggagatgaaggttgcagtgagctgtgtttgcgccactgtgctgcatgcagcctgggtgacagaatgagaccctgtctcaaaaaataaaataaaatggaatgcagatcgaaatgttcaatataggctgtccataatctcctacctcataccctgaaccaaaatattgctactcttggttaagttcagaaaactgaatgctgagttaaaccatccgttcctagccttgaacatacaaaaccaacattaacagtatttatgtatttactattaattataaacaactgtgaattacccaatggttgctatttgccaatatatatctagattaattattattattttttgagatggagtcttgctctgtcaccaggctggagtgcagtggcagaatctcggctcactgcaacctcccactccctggttcaagcgattctcctgcctcagcctcccgggtagctgggattacaggcgcgcgccaccacgcccggctaatttttgtacttttggtagaggcggggtttcaccatattggccaggatggtcttgatctcctgacctcgtgatccgcctgcctcggcctcccaaagtgctgagattgcaggcgtgagccaccgcgcccggcctagattattctcacttaattattactaaggtctgtatataatttctattttataaattagaacactaaggctcagaaaagtggagtgagttgcccaaactcacacagtgaagccgggatcaaagctaattacagtactgtctaattttaaaatctatacttctaagcatctggctacactatatctctaaaagttttacgtagttcaaatgtgagcagcgttcgtctacgcagaaaaactgaataagcagcattaaccgcgggcagaaacagaacagaaaccactaccttggcggccgcccgcccccgggcgtcgcctacgtcataacactgcgcggccgcccctcgcgcaccacgtgctaggggagcgggcgggcagatggctgtgtctgtaagcgggaggcgtgcccggttcatccaaggcgcaagatggcgctgctttttgcacgttctttgcgcttgtgccgctggggagccaaacgattgggagttgcctccacagaggcccagagaggtaggattatctctttttactcttttacctccagaatggctgccgtctattattcccagaccccactccgagaagcaactccaaccctct

SEQ ID NO: 9806 - DNA, 2300 bp, Homo sapien
acctctgcttccatgcatagatcttcttcactacccaaccagttcctattagtggaagagtgctgggagaaagagagtaaggaactcattagagtataaagctaattcaaagaggcagaaataggaaaaaaaggaagcaaattacttctgggtaatgtttagaaattccctaacagatggtatttttctcttgaatagatcaaaacgtttcagataaatcatatttctatgaaacaaggataagattcgtctgttacgtatgaaaaaaactaatgcaggattgagtttacgttaagtattgagacccagaactctgcctcttgggcaaagccaagcataaagcagcaagccctcccagaattagacggctttccacggacaggagaacagatacagcagacacagaatgactacagaaggcgaaaacaagcaaaaacaaatgtcactccatctggttttaagccaaataagccctccaaccctaaccaaggcaaaggagaactgcctttccacagaacacacctgactggtttcagtacttgttttcccacgagtacccttgaaactcattttaatccaaaaatgaaaactatgggacaagcacggtggctcatgcctgtaatcccagcacttgtgggaggctgaggcgggcggatcatctgaggtcaggagtttgagaccagcctgaccgatatggcgaaaccacatctttactaaatacaaaaaattagctgggcgaggtagcaggcgcctgtaatcccagctactagggaggctgaggcaggagaatcgcatgaacccaggaggcggaggttgcagtgagtcgagattgcgccattgcactccagctagggcaacaagagcaaaacttcgtctcaaaaacaaacaaacaaaaactagtattttgtgatacagccagaactatcacaaggaaaagactcccagtactgtatcataatacttccacataaaatacctcctttagggatggggtcatttctcccgggataattcaattcaatgcttaatttttgagaagggctgcatgaaggagagacttgtagttaaaaaaaaaaaacgggtctaatttctggttctggtacttactagctgggttaccttatgcgagaattcttaatttcctagtcttagtttcctcaccttcaaattgagactaataactactttgtaggtctctggtaagagggagagagaaactaagcggttggaacaccatgggcactcaataatagctatcatttacataatgagtccctactaaatatggatgctgggttaggcgctgccgagatacaaggtgaaagttctagctgcaaatggcaaaagtcctgaatgttcttggatttcaaaatgctttttgtatatcgcctcttttctgcccgtgaggaggacaagggcaaacaattaaaataggaaaaatgtggggagcacttcatggtttataaaacgtttttctgcgtgccaacttattttaatgtcttaactttccagatttgaaaacaagtcctacaccaaataaatggtagagggacacaaactggaacccaggcttcctaaccgccagagcgaccttcccgccgcccaatgcctccctgaggtgctggtcggctgcttctgcccggggtacccagcagtcatcctactctccactcagcaccaccgcacgtcggccgcgcgccacgctacccgccgggttactgggcgctggtttggccttcggaggtcgaggctctctgagtgacctcctgaactgggctcactcttacttagcctcctctctcgaggcagcaccctcctctctacacgacaactccatcattcgcagccccacggtgttcccggggagcgcctcccgcccccaccggcttcgcctcagcttgtcctcgcctttcccgccctcagcatccgcggatacccgcgctcgccgggcccacgcggaagcatccgcagactgtcgcaaggtcccaccgtcttgctctcattgggcaaccttaccctttccccgcctcaatgtttttgcttcctcagtgattggacctgggcattgtccattccagctcccaggcaccgccctctctccacccactagaaagccacccgggttctccttcatccccaacgctcctcacctagcccctgtcctgagggtgcccctaaccctggagccagctttaaaggggcaggccccttctcctgccccagccccagccccacccaccgggcccacattctccgtcttccaggtccagcgctccctcacagaactcccccgcaccttg

SEQ ID NO: 9807 - DNA, 2300 bp, Homo sapien
aagcccctcagcctgagaatcggctgcttgggtaaataatcaggctctgcaattgcctgctcctggggcacagccaatacctggcattcccgctgttcaggcggtaattcagcctgacaccatccatccaggccaggttcagctacgccctgctacataggaaagtttttcttttaaattcctcaaagattttaaggaatcagtgaaacaatatggcaccaactctccttttgtccattccacattaaaagccttagcagaagataaacgtttggtaccctatgattgggaaattttggcaaaatcagtcttatctaaatcccaatatttacaattcaggacttggtgggttgatgctgtccaggaacgcattcgtcttaatcagggctctaatcctcttgttaacgttacggctgaccagttactgggaatgggtcaatgggctgcaatccgacaccaaactatactaaatgatgaggttattgaacaactgcgaaaatgttgcttagatgcttgggacaaaattcaagatgatggtaaagtatgcccatctttcacagccgtcagacagggacaacatgagccctacccagactttattgctcatcttcaagacgcagcagaaaaggctattcctgatagccacggccaaagacttgttgtagaacttatggcttatgaacaagcaaatccagattgtcaggcggctattcgccccgtcaaaggtaaaattccaccaggtggtgatatactcacctcctacattaaagcctgtgaaggggtgggaggaactctccatacagcaatgattatggcacaagctatggcctctattcgaatgcctggacaattctctggccaatgcttcatatgcggccagaatggacatgcaaaaagaaattgccctcggcgtgcaggtcgccatcctttacatcaccaacaacaacaacaaaaaacttttcagcaacaagatgccccaccttctactgtatgcccacgatgccaaaagggtcttcactgggcatctcaatgccatttcagatttgatattgatggccatcctttacggccttttaaaaatcagggaaacaggatgaggggccggccccaggcccctctaaacaatggggcattcgtcaactctcagccccgatgtagggaccagccccacagggtcggtaggtctctccctgtgtgcagcgatgagagagtgtagaaataaagacacaagacaaagagacaagagaaaaggcagctgggcccgggggaccactaccaccaatgcgcggacaccggtagtggccccgaatgtctggctgcgctgttatttattggatacaaggcagaaggggcagggtaaagaatgtgagtcacctccaatgataggtaaggtcacgtgggtcacgtgtccactggacagggggcccttccctgcctggcagctgaggcagagagggagaggaagcagagagagagacagcttacatcattatttctgcatatcagggactattagtattttcactaatttactactgctatctggaaggcagagccaggtgtacaggatggaacatgaaggcagactaggagtgcgactagtgaagcacagcatcacagggagacggttaggcctcccgataacttcgggcaagcctgactgatgtcaggccctccacaagaggtggaggagcagagtcttctctaaactcccctggggaaagggagacctcccccccccccgcttcccggtctgctaagtagcgggtgttgttccttgacacctttgctaccgctggaccacgatccccctgataacgggcgtcttcccagacgctggcgtcaccgctagacgaaggagccctctggtggccctgtccgggcataacagaaggctcgcactcttgtcttctggtcacacctcactatgtcccctcagctcctatctctgtatggcgtggtttttcctaggctatgattatagagcgaggattatcataatattggaataaaaagtaattgctacaaactaatgattaatgatattcatatataatcatatctaagatctatatctggtataactattcttgttttatattttattatactggaacagctcgtgtcctctgtctcttgcctcggtgcctgggtggcttgccgcccacatcaaataaataaataaataaataagctgggacaagtggcatgagcttagaatgtcccaggcaaacaaggaaatacggtcattctagcaataatgacaaatattcaccaatagggaatttgttaaataatta

SEQ ID NO: 9808 - DNA, 2300 bp, Homo sapien
aaatatatatatatatatatatgggccgggcgcggtggctcactcctgtaatcccagcactttgggaggccaaggcgggcagatcacctgaggtcgggagtttgagaccagtctggccaacaagactactaaaaatacaaaaaaattagccgggcatggtggcgcatgcctatagtctcagctactcgggaggctgaggcaggagaatcgcttgaacccgggacgcagaggttgcggtgagccaagatagcaccactgcactctagcctgggcaacagagcaagactctgtctcagaaaaaaaaaaagatatcactgagtgatgccttcatttatttatttactgcatttggctgctgtgtttccagtctcagttgcaattcccacactgaggctctcccacccttcctgtgtcccctgagctgagcaggcacttcctgtcctattggaaatgaaagttagagattgggggtagggtatgtatatttactctgcagaatactaatactgtctgttccattatcatagcaaaaaagtgacacggaaactagaatagagaccagaacttcatttgagggagggtttgggcttaatatttgttgtcacaaaacagacagggttaatttatatctcaagaaactacttaggatggcagcaaggtggccttatgaagggatttgaaggctttcatttaacatccctattgcacttggattggtaggggttactggatatcattcttaagtttttggtttcctttcttgttaaggttacgcctacaaagacattctttggaaactagtagaggtaagtgttgcaactctattaggttcttgactctgaaatttgtattccttcctaagaattttgtgtttttattctgttgaagcatatgcttcttaagtattttttttttttaaacagctcaaagacaactcaaagcagacatcccaactgtagacttcaatttagacataaactccaggtttggtgagttactgtaattgtttcagtttcatggatcttaaagatgaggaaatagcagggtaaagtgttaaataagatagcctgcaattgttagagaaataacaaggcaccaagtttcatgatatagtccagtctgataattccttcttaagtatgaactcattcctcggagaatctgaaataggagtgaggggcatcagcccattggtatgacccaagagaaacacatctaaggatctgaaactagttataccccatactctgttttgcttagctctgctctttggtgtgttcctctgtttgttcctttgtacattaagatcactataaatgggccaggggtggtggctcatgcctgtaatcccagcactttgggaggttgagtgggtggatcacttgaggtcaggagttcgagaccagcctggccaagatggcgaaaccccgtccctactaaaaaatacaaaaatcagctgggtgtggtggtggtcacctgtaatcccagctactcgagaggctgaggcaggagaattgcggaaggtggaggttgcagtgagccggatccgggattgcaccactgcacttcagcctgggtgacagactaaaactctgtctcaaaaaaaaaaaaaaaaaatcactgtaagtgtaaagtaggggaagccctgagcttatctcacacactctaactctgtttttttttttttttttttttgcgtgttctccaaggcaatgtctcaggagcccctttaaaatcaagcttgaaatcttatagctgagatctaagggtggaaataaagccctcattgtctttatatgagaatcggaacttgttcatagaggaaaggggataaatttgaaaggggttagacctaagaactcttctttctagctttaactcctgagactatgaaaaacaaacaaaaaaaaacatcttgggcattaggacccagtggaagtgcctctgcctcattcagactctgttaacttctctcagtgacgtaaaggagcagcccgagctcattctctgcccgcagccccccttcatctctctcctcctgctccttttctcctcctttctcctccccctcccttttttcctccctccctctccccctttccctcgctcccctcctccctccctccccgtctttcttaccccctccctttctctctctctctctctctcgctcgttccctaacattaaagagaaaatgctgctatccgtgacttccaggcccgggatttcgacttttggctacaatagaaacaacaagaaggtagggaaaagcgcttttttggtatctagctacttcttt

SEQ ID NO: 9809 - DNA, 2300 bp, Homo sapien
cccaccctgccacaccctgggagaaaaaactagactttggcttcagaaagcacagatgtgacccaggcttactaaagagacaactccacagccctgggaacacacccttgagccaaacttggttgaagactaggtcttccctggcaagttccggaagaatggacttactgacttttatcaactcttctcactgccaaggccaacagcatctgaggtatagctttttgggagtacctgctttcttgcctcctggaggatattttctgtcctgggcttcatggcccctctcttccctgttacacattgctgtgctcagagcctttgcagctgcgacctagttgaatccacataggctccttccacacggtggaagatctgctgcttcactcacagaccaggagttctcaatcagaggtggttttgtccctcaggcctttggcaacatctagagacagttttgattgccacgcctggaggtgggatgtgtgtgctactggcatctagtggctgctaaacatcctacactgcataggatagtccccactacccccagccaagaattatctgactccaggggtcaatattgccaagactgggaaacactgatatagacagtgttgtccctgcctcctgggttagggtaaattttcaccccaaccctggacaaacagtgccttttgacactcatgcaactgttggggaaggactggactgggatccttgaattctccccagactttgacttttgataactctgcatatagcaagagtgattcttgaaagagctgtggctccatgctgaatgcacacatgtactcagagggattcaggtgggcattgttctggtgtgtgctgtgcaatggtgggaaaggacaaagctctctaaactgtccagagcaacctgccctgccccggtgtgcttggaccctttgcccagggaaccaggacatcagaaataatgttccttctgtggaaggacaacggggagctagggtagcaaagagcaataaattccaactctttatgaggtcaggagtcctttaaaaaagcctatgtcttggtctttaactgtccccttctgcaagatgtgactctatacacatggagacagattgaagaaagacttcacccatcttctaggaaataaaatcctgctcttgtcttctcccagtcactcccttatgcactgaaaggagaatttgactcccttgcacttcaaggccaggtgcctctccactagacagtcagacaaaggcaaataatggaggatagagagacaggtgttcattaggctggccatagggagaggaagggggtgacagcaggggaaaagaaactgtagtatcagttgtcacaagtagagctcggcccagctttccctcccttcccagccaccctagaattgagagtcccagtgcccctagtgtcgactttctatgtacatcctaggggtgagggagtgcggggcaatgggtaggatataaagcgtaaaggacaaattgccgcagtcttctaattgatgcttccaaactcaggaagggcttatccagtgtaaaatagccccaagcccagcaaccttctagagggctctggctgggcagatagcttttgtttttgagtctccagccctcagtcaaggaaaatataccatagctgctttcttgtcagtggcctttgagagaaagagaaaacaaatctagaattctgttcatctgatagaccgggggagctttgctatggtaggaggtttaggaagggcctttcacgcatagaaaccattgttgatattgccactcccctctcctctgcctcacagaactcctgattctgtcttctttctctctctatatatatattttaaaatgtttaaatggctctaattttttgttttgaattttgaatttaccttttggagttcttctcatgtgaatctacttgttagattgtattaatgagtgtttctggtttgggcatgggaagtgatgggggcctgaagttattttgcagtggctaatggcactgaggaatttcttttttggtgcatttggtttacactcatttcctctcctaattgttagttcatttgtaacagtgggtgagtgtttggaggaaaggagggagaagaaaggagggatactgtttctcccatgaaatagtctaattggttgggttgatggcagaaggaaacataggggagccttccagctcacagccaagggttgggctcttaaacactatgcctagtgttttctgaatgctgtcttcatggagcccagctcttactctctttgtactttaca

SEQ ID NO: 9810 - DNA, 2300 bp, Homo sapien
ccttaatctttctccatctatttcaaggctgaaaactgttctggccaagcgaactgggcggtctgaagtagagatggaagggccagaggaatgcctgggacggaggcgcagttctcggatcatggaggagaccagtggcatggaagaagaggaagaagaggagtctatagcagctgtccctggccgcaggggtcgaagagatggagaggtactggcccaagatcaaggaaagtgggagttagaaaataaattcctctttcttgaatctgataacctcctttttcataatgcccatgtgtttctccctaggttgatgccacagcatctagcatcccagagctagagcgccagatagaaaaactcagcaaggtattgtgcttctaacctcccaagagttggagatatgggctgggcaagaattgatcagcttcttttttaaactgaattttaatttttattcttttgagatggggtttctgttacccaggctggagtgcagtggcacgatcatggctcactgcagcctcagcctcctgggcttaggtgattctcccaagtagctgggactacaggcaggagccaccatgcctggctaatttttgtgtttttgtagagacagtttccatatgttaccaaggctggttctgaactcctgggctctagcaatccacctgccttggcctcccaaagtgctgggattacaggcgtgagccaccgctcccaaacttaatcaccttctgaattaggcccagatggcatcacttttatagagggactgagagccattgcctttctctgatatactggatgaattcaccactgtcactctggaaatgtgtttattcatcttcattttcattgtctacccagcgtcagcttttctttcgcaaaaagctgcttcactcatcccagatgcttcgggcggtctccctgggtcaggaccgctacagacgtcgctactgggtattgccgtatttggctggtatctttgtagaaggaacagaggggaacttaggtaggtgtgcctgtgggagtgtggattctgagtcctatcaaacaagaattaaataattccttttccttagtagtcttgggcttctttcattttctgataatatagcgtaatggttaagagcacagattttagagtaaagctgcctacccacctgctctgccatttccagctgtatgattctgtttcttcatttgtgaagttgagataataatagtgtatgtacttcataaggctactgagaggattaaaatgagttaagtctcttagaataatacttaacccgtagttgtttcgcaataaatgttagcttatgattgtgctgctgctgctgattacttgggagaatagtgtttcttccccagatactgtgttcattggcatataagctcttcccagtggaatctcaaaaaagggggactaagtccaagagaaaaagaaagtataggtcctaagtttatataccctcttacttttcccttgtatgtcagcatatggcttaactctttacttctctttacagttcctgaggaggtgataaagaaggaaactgactccttaaaagtggcagcccatgcgtcactcaaccctgccctcttctctatgaagatggagttagctggctccaacaccactgccagttctcctgcccgggcccgaggccgacctcgaaaaactaagcccgggtctatgcaacctaggcatcttaagtcccctgtcaggggtcaggattcagaacagccccaggcccagcttcagcctgaggctcagcttcatgctcctgcccagccccagcctcagcttcagcttcagcttcagtcccataaggggttcctggagcaagaaggctcccctttgtcactgggtcagagccagcatgacctcagccagtcagccttcctgtcttggctgagccagactcagagccatagctccctgttgagcagctcagtcctcacacctgatagcagtccgggaaaactagacccagctccatcacaacccccggaggagccagagcctgatgaggcagaatccagccctgatcctcaagcactctggtttaacatctcagcccagatgccctgcaatgctgcccccacaccgccccctgcagtttctgaggaccaacccactccctcccctcagcagcttgcctcctccaagccagtaagtagccagaattagtagtatgcacttgatttcatcttgccacaggcaccattgcctgggtgtggagctgctgcctgaagttgagggaacctataaacatgaaaacatcctcatt

SEQ ID NO: 9811 - DNA, 2300 bp, Homo sapien
cccagcagttcaagaccagcctgggcaacatggcgagacctcatctctacaaaaaatacgaaaattagctgggtgtggtggcatgtacctgtagtcccagctatttgagagactgaggtgggagaattgcttgggcttaggaggtcgaggctgcagtaagcagagatcatgccactgcactccagcttgggtgacagagtgagaccctatctcaaaaaaaaaaaaaaaattacataaaaattaaaggaagaacctcttgtagacatgcaaattgtcatcttctgttatgtttaacagaactctctactcacttttctctctctagcccctgcctgacttctcacgagtccctggtctgacattgcccagtggagccttctcagactgcttgaccattgtggagttcctgcatagctttggcaaggtgctgggctttgatcctgccaaagatgtgcctagcctgggggtcctgcaggagggactcctgtgtcaaggtgacagcttgggtgaggtgcaagacctgctggtcaggctgctgaaggctgcactccatgatcctggctttccctcctactgtcaggtgagtgcaagtccctcccaaagtaaccaggacaagtaaaggagatgtaactacttagtgtttctcttttccttatatttttccatttctttttcttcctgactcctctccttattttatttttctttattttttccttttcttttgtggtcttctttcgtattctgtcttaacccccatagttctcttctgatgtattttcctcttgcacattcacccaacttggttgtgcatctttccctactcacccccattatgctgtcctccacacagtccctaaagatcttgggggagaaggtgtctgagatcccactgacaagagacaatgtgtcagagatcctgcgctgcttccttatggcatatggagtagagccagccctctgtgaccgcctgcgcacccagccttttcaggcccagccaccccagcagaaggctgctgtcctggccttccttgtgcatgagctcaatggctccaccctcatcatcaagtgagaggctgggagtggggatggtcattgtatcccttgcatcagaatggggtggaggacttgtagccttccagaagtcctcagaaatgtgtgttcactgccatgttctgaagatgctggaatgacttgggactgaattgcagtgccctccctgggagagcctaagccttctgccattcacccaatctgggttctaggctggaactcctttttcagctgcagcccctttacccttgagcctcctttccctttttttgtgctgccacttcatcctattccctattcccctgcagtgagattgacaagactctggagagtatgtccagctacaggaaaaacaagtggattgttgaaggccggctccggaggtagggaccagacagagagtagagcctcagagaggagagaagtggggcgggtgaagcatagccagggttttggcttgaaatgtgatgctttagccccttccctgggtttgggaccttaccagggcccaggatggtttagagtcaaggtatttcttttgtggcactatcatgttcctcaccagtttcccgtaattttttttttttgagatggagtcttcctctgtcgcctaggctggaatgcgatagcgcaatcttggctcactgccacctccgcctcccaggttcaagcgattcttctgcctcagcctcccaagtagctgggattacaggcccatgccaccacacctggctgatttttgtatttttagtagagacagggtttcaccatgttggccaggctggtctcgaactcctgacctcaggtgatccgcctgtcttggcctcccaaagtgctggaattacaggtgtgagccaccacacttggccttcccttaatctttctccatctatttcaaggctgaaaactgttctggccaagcgaactgggcggtctgaagtagagatggaagggccagaggaatgcctgggacggaggcgcagttctcggatcatggaggagaccagtggcatggaagaagaggaagaagaggagtctatagcagctgtccctggccgcaggggtcgaagagatggagaggtactggcccaagatcaaggaaagtgggagttagaaaataaattcctctttcttgaatctgataacctcctttttcataatgcccatgtgtttctccctaggttgatgccacagcatctagcatcccagagctagagcgccagatagaaaaactcagcaaggtattg

SEQ ID NO: 9812 - DNA, 2300 bp, Homo sapien
ttattctgtaccttccctcacacagtacttaggtaggagaagggtaagtaggtggaggggaggggtcattgcccctggaagattccaggtgacataaccttgtttaaccgccagtattttttttccctctctctcccctcctgcagaaatggaggcaaacgaccattttaactttactggccttccccctgcacctgctgcctcaggactgaaaccctctccttcctcaggggagggcctctacactaacgggtctcccatgaacttcccccagcaagggaaaagtgagtgtgagggctgcttggcctggggagggaatgggcatcatccctttagggcagattcatggggggatattttgctctactttgctgctggagagaaatcaacttctaagaacaagttctagggttttttggaaacattttttgtattgatttaaggttggaagagattagaaaaacccactggctttttcatcttagcctgttcttctgtcagccctgttcccctggctgctgacagagcagtgaagtggctactgctgctgataacccatgagagagataaagtgctagccttctaagaagctgtttttagaggttagggaagctacactgggccaggactgagagttgaatgaaggttgcagtgtatttattgccttttagtttgtacatcagagaaaggcagatgctagaagtacttattccaccttctgtccttggatggaaggtagggacaagggaaagtttaatgcttacctagttcccccagagagaagttcataattccatatggaggtgttgctgccaggattgggtcttttcctggatttggcttaccagttgctctgtaccatgactcgccaggtacctctgtaatcttgcttgggtttcaagtcctttatacttggaagcagagagaagcccacatgcttccctcctttcttgtagcagaaaaatcctgctacttctccctccgatcctctcgaagagggttgcagatggtagaagctcctttatttcattggattccaccctaccctcaagcttccttaatatcttggttctttttgattgattgtcctccatcccagaggttgccattgatgatgagagctgaattctacagcacacaaagtgccccccctaccccgccagctggcatattaccttccaatgcctatagggaagggccaagcccagccttctgagctgggttcttgtcgctgtggtgactgcaaattctattcttagcccagcacaaagtgctggatctgcatgtgccagtgaggtggaggttgttccttttggtaccactgtggggccaaataggcactggggaaagggggcccctagcgaattcagtcatgcccctccaagggaagaaatcccctagggaatgagagtagggcagaatgcaagtcactgtagggagtctgcaaacagtttcatttaattaaaaacaaaaaaaaaggccaggcgtggtggctcacgcctgtaatcccagcactttgggaggccgaggcaggtggatcacgaggtcaagagatgagaccatcctggccaacacggtaaaaccccgtctctactgaaaatacaaaaattagccgggcgtggtgatgggcgcctgtggtcccagctactcgggaggctgaggcaggagaatcacttgaaccagggaggcagaggttgccgtgggtcgagattgcaccactgcactccagcctggtgacatagcgagattccgtctcaaaacaaacaaacaaaaaataaaccaaaaaaaagccagcagtaagcagcagcaaccagctctgctggtggctctcatggtaggcctggagagctctctagccccctactcagcctcagcagcagttgctaaacctacatccaggagcctctgggcttggtgttctccagagacccaaaaactaaatatagcaggggaggaatcccccttccctttaccatgtctttttctagtcagtgctattactttgagtttgttttggtaaagttgcttgcctacatatctgtaactgaccttttctttctttctctgccaggtttgaatggggatgtgaatgttaatggcttatctactgtatctcacactactacttcagggattttgaactctgctccccactcctccagcacctcacacctccatcaccccagcgtggcctacgactgtctctggaactactcacagtacccatctgccaatcctggcagcaacctcaaggacccaccccttctctcccagttctcggggggacaatacccactcaa

SEQ ID NO: 9813 - DNA, 2300 bp, Homo sapien
gccgcccttgaggcctcagttttatgcctttcttcacctgccttaattttttatttggggatagagaggcatttcttagcagaagtttgccagagccctcctttctccagaaggaaggaaacctctaccctgagtgtgacctctacttactcagggacttgaggtcagcaggctgttggaggagtatttttttttccccaaggtgacctgtaaatctgttgttttgacagggaggagagaagggttttggtttccacctgcctattccctccactggtaatctacttatctcgagagaggaagagaaacccccttagccttctgtgtctgtggcccacacactctgtgagcctttgctaaagctagcttccttcttatcctctctgagccatttgtagtgggggggtggaggggtggagtctttccccaaaattcaggaagagcccacccctctgtggagtaaggaaatccaatgtagactgatggatctcaccccccaactctgcccatttttcagatctctttcctcctcagacccccagaggaaaacgtatttgttgacaccccaacttgccagagtttcatcatccccactctgttgcttttccagaatattcagcagcctgagctttgcacagtttaggcaactgtttctagaactgcattgcattgaattaaatgggaattatcttcaaggctgcaaagtgttgagttgcaaggaaaggaaacctggtttcctttcttgtcatattttatccactgtttgacattgaagaagtcattgaacctctttgggtcttaatttcttcatttgatgaaggagagaaggttgaactagaatttttttttttttttttttttgagatagagtctccctctgtcacccaggctggagtgcaatggcgcgatctcagttcactgcaacctccacctcccaggttcaagcgattctcttgcctcggcctcctgagtagctgagattacaggggcacgccaccacacccagctaatttttgtatttttagtagagaccgggtttcatcatgttggtcaggctggtcttgaactcctgacatcatgatccacctgcctcggcctcccaaagtgctgggattacagccgtgagccaccgcgtccggcctgaactagaaattctctaagctctaacatcatatgacactgttcttcatcctggtgccctgcagtggacattttaggtgacagccaaactctagtcctctgctagattttacttttctgagttttcacacagttatgtagccctgtcagaaaaaaattcccagaaccatagaatgggtggacatttgtggcatctttttgctgattagttttcagcttatcctttacttctctgactgcatttaggctacactcaggtctttgctgtctggttccagagccgaaccttctttcccccacgcacaggaatctttcctttccggtgaccagggccctgcagatgtcgccaggaaagtggtgatccaggcaggaccaggctgcactgaagggacagaggtgagtgggtggctgactcttgcctctccccatccctttactgaatcgcgacctgagtgactaacctttctatttccacgtttccattaccctacctgggaaataactgcccccgaaattcccctgactcttacccctaccagcctgttagagaagtggcacctgcctttgggcctagacgtttggtctagtcttttaagttaaccttgggactgtggcatgcctttcagtttgccctgtgtgaagcaggaccactgcctccatgagatgcgggtgcagagggagctgccaggtgggcaaggtggccagagttgcaggaggcacagcggcgctaggacccaggtccgggtcggaaagatgggctggcgggctttaggaccctgtggcggaggccgcgtggggagactctctcccggccgaggcttctccgccccctccggctccgactcactcctcccccgccggccatgttggctcctctcgggccccgcggttgagccgcgtccccctcccccttcccgaaccccggaccccagaccccctccccagcgggcgtctccacccgttctggcgcccggagcgcggccatgtgaaccgcttgtaccccggggagagacgagccccgagcccggctggacgccgctgcctcaggtttgtggggtctgtggccaggggcctgagggggagggagccccgctttcatccgaggcttccctcggggaacagaagctccagagccggcttgagccttgccggggcgggaa

SEQ ID NO: 9814 - DNA, 2300 bp, Homo sapien
gaaagttgatatccctccgcttcttactctttttttttttctcccccatcatacaggtgaatatgaccatctcccagaacaggccttctatatggtgggacccattgaagaagctgtggcaaaagctgataagctggctgaagagcattcatcgtgaggggtctttgtcctctgtactgtctctctccttgcccctaacccaaaaagcttcatttttctgtgtaggctgcacaagagccttgattgaagatatattctttctgaacagtatttaaggtttccaataaaatgtacacccctcagaatttgtctgattctcttggttctgacaacatagtcaacactgaagggttatgtatttaattttagttttagagacacggtgtctggctgtgttgccaagactggtctctaactcctgggctcgagatctcccacctcagtctcctgagtagctggggctacaggtgtatgtagtctcacatcaccagcactgttttcaacaattagatttttagagtggctataagaagcagtttcagcatgaagtgggccatgtatgtttgaaattggtccttaaaaatagccattctcttttgttgatggacaaccgtacctcttgtgaggggtttcctgtgggtagtgtgatcttagtagggcctcagttttgggccttttgttcaatacaaattgatttttttttttttttggcctctattccatgtggcacatccctacttcttggttaaaaataggacttttttgaagggcatattgggaaaaactcgttttagaaataacttatttccaggggttaatctgagtttaatgaattaaattttcaagaaatagtgatgaagaatactgatctttgttaaaatggaatcaaaagggttctctacatcttggttaggccttcatgtcttcagaaagtgtacttaactacttcctgacattttgggcaagcctaaataaaagttgcttgtgattccttgaggctatgcagaggcatataataccataaggcctagtccaccctctgtgaagatccccttatgaaagtccagaaaagataatcttacaagggaatagcaattttcagagttgctggcttgggcttctaaactaatgaagttaggttattttcccttcattttagccgactgagaggtgcaggggtagaagatatattttaccatttcaatttaaaagaagcgtgcaaggtcagattgggttcctcttgtgttcttttccgggaccagacccatccgactgccctctcgcggtagcactggagactctgcaagaactctgatcccattttcaaatccatgaaggccatttgctgggatgtggctctcagttaaagactgtttacagaccagctggggcttttgtcctggggaggagcctgtatctataagctccacccgctgagtccatcaagttaggtagaagctgggcggggacaagctgagctccaattcagaggcccctgggggctgaaggttggggagggctttttggcgcggggccaggggtggagtaggggcctctaagcttccttccatctgcctgtgacgtccttggcagcagcctctcccgcagtctctcctgtgtcatgatctggacagaaggtggagcccctgagctgcttgtgctggtagtttgctcccagaaaagctgggatttggggaaatgctgagttatgggggtgtggacacttcctctaggtcctgactctggagtgggtaagaagctggtagaaaaagccctagggtacaggtcagccctttctgctttgttttctcacgtcacccgatacagacctgggaactgaaatcctaaaggtcttttgcatccctccaccccttcccccaacatgttcacgtccttcagcgtttatcgagaaccttctccctctcagtagctgcaactatttgtttccttccccctttgccggcctcttctaccatgccactggagtgtcaacacagctctctaaccttcctccatatttctcctggtctgccctgtcctcgcctcctccctctctccacccagagaaagccccgcccttccctcctccctccccaccccagtctgtcacacagggacatcaccctacagcagttcaggctgtgtggttcgcaggaagcatacactggctttttgattcttgctagttcccagctcacagtttgggaggatccaacaccaacctttacgtgaagtggaggcccaaggacagtgaggagctgggtggtcccagcctggagctgtgccagcctgacatgggt

SEQ ID NO: 9815 - DNA, 2300 bp, Homo sapien
aggagagcaggcggctgcggttgctgcagccttcagtctccacccggactacgccatgttggggtttgtgggtcgggtggccgctgctccggcctccggggccttgcggagactcaccccttcagcgtcgctgcccccagctcagctcttactgcgggccgctccgacggcggtccatcctggtaagtgcttttctctaggagctaacgttccattttgccgccccatgaccttgagccggggaacgatggtagctcgggcctaagggatccgtggtgttaaaaggatgcctggagccgcgtcttgctctctaatggctggagaacaagaatgggacacccataggaggtttcttcgacccagctctgtcccattttgtataaagtcctttgtgtgacggaaaaggtgcgggcaggtgcgttgaccttccggttgaataggggtactgaactctcgaaaaatggggtcttgtgcatgcggatgggaaggctgtgcaggcgctttatcgatcgctgcgcggccttccctcttggacacgcgttccgtacaagcggaaagaggcctgacttcggctgagttttcctctccttgtgtgttaagtcctggcttccgatgacctttaactggcctgaccccagctccttccaatatcttttgtctgttagtcagggactatgcggcgcaaacatctccttcgccaaaagcaggcgccgccaccgggcgcatcgtggcggtcattggcgcagtggtggacgtccagtttgatgagggactaccaccaattctaaatgccctggaagtgcaaggcagggagaccagactggttttggaggtggcccagcatttgggtaagtagagtttgttaggaatagtaaagaccttgtgtagcccaaatatccccaaaaccaagctgtctgccttctatgatgattttatcaaaatgactttcgttcttctgagtttgctgaagccacatttaggtactgagaaggagtcttggtcgatttaggtcttgataccaatttatccttatgtataaccctgcgatgcctgtatctaacaggtgagagcacagtaaggactattgctatggatggtacagaaggcttggttagaggccagaaagtactggattctggtgcaccaatcaaaattcctgttggtcctgagactttgggcagaatcatgaatgtcattggagaacctattgatgaaagaggtcccatcaaaaccaaacagtaagttgctcttattgcatctatgcacaaaggaacttctgttatttgcagttttacacattaaggtgacatgttctcctaaagcagaatttttcttctgatacgttcgattattaaaatcacacagtgcagtttcacctgaagaaattaggatgcagaatttctgattgacaaaagcctactacttgaggtttttttttttgagagggagtttcgctctcgactcactgcaacctccacctcctgggttcaagtgattctcctgtctcagcctcctgagtagctgggattacaggtgcatgccatcatgcccggctaatttttgtatttttagtacagatggggtttcaccatgttggccaggctggtctcgaactcctgattttgggtgattccccccccacctcggccccccaaagtgctgggataacaggcatgagccactgcgcctggctagttgagtatttttaagactcggtcttatggcttaggtttaggagtctccaaaacttgtaggtttttgtatttgctattgctatgtgagggaatgctgttaggttaaggctcagtaaaatgaaaaatttatgacagttaaagtcagggaatgggattattgtttcctaagataataattttctttattgcagaaagttgggttagatcctagatgatagtttatctgatttatgtaagaaaggggaggtaagactgtggttcctcaggtaaagggatggacttgagagttgatagggagggatatataagattatcatttgctttcaacaaggtgaatagatactatcctctcttctacctttacagatttgctcccattcatgctgaggctccagagttcatggaaatgagtgttgagcaggaaattctggtgactggtatcaaggttgtcgatctgctagctccctatgccaagggtggcaaaattggtatgttattaaggggtacatattttccaaacctaatatgggaggaaaaactcatacaatgttatgagtggatattgacatctattcctcactgatgagtacgttctgactttcgttc

SEQ ID NO: 9816 - DNA, 2300 bp, Homo sapien
gactaatttttttgtatttttagtagaggccgggtttcatcttgttggccagcctggtctcaggtgatctacaggccttggcctcccaaagtgcagggattacaggtgtaagccaccacacccagccaaaatcctatgttttgatgcagtccactgaaattagttttgatcccactccaccatggaatgatttcctagttgccaaacccaaacccagaggatttttttcagccctaatttttttttcttcttttttatttttctttttttgttgagacagggtctcacaacgtcagccagcatggagtacaatggtgcaatcttagctctctgcaacctctacctcctgggctcaagccatattcccatctcagcttccccagtagctgggactactggcacatgccacacctggctaattgtgtgtctgtgtgtgtgtgtgtgtgtgtgtttatttttttacatattttttagagacaaggtttcaccacgttgcccaggctggtattgaactcctgggctcaagttatccacccacctcggcttcccaaagtgttgggattactgggctggccgtgcccagcccagccctttttacttattttattatttatttatttatttattttttattattatttttgagacggagtctcgctctgtcaccaggctggagtgcagtggcacgatctcagctcattgaaacctccgccttccaggttcacgccattctcctgcctcagcctcctgagtagctgggactacaggcgcccgccaccacgcccagctaatttttgtatttttagtagagacggggtttcaccatgttggccaggatggtctagatcgcttgacctcatgatctgcccacctcggcctcccagagtgctgggattacaggcgtgagccaccgtgcccagcctattttattttatatatttattttatttttttagagagtctcactctgtcgcccaagctggagtgcagtggcgctatctcggctcactgcaagctccgcctctcggatttacgccattctcctgcctcagcctcccaagtagctgggactacaggcgcccgccaccacgcccggctaattttttgtattgttagtagagaccgggtttcactgtgttagtcaggatggtctcgatctcctgacctcgtgatccgcccgccttggcctcccatagtgctgggattacaggcgtgagccaccgcgcccagctaatttttgtatttttagtagagacggggtttcaccatgttagctaggctggtctcgaactcctgacctcaggtgatccacctgcctcggcctccgaaagtactgggattacaggcgtgagccaccgctcccagcctaccctaagaatttctattcacatttcatagctgaggtctctcagcttccttcaaggtggacaattctgtatctctaggtgacccaattttatcccctcgtctttcgtgcacccagtttatgctaaccaggaaccatcacattattgcattgtttgttcacctggaccttaaaaggaaggttcttagtcttatttatcttattattgagtctcctcaatgccctgctaaagtactggttacattagtttatttcattttaataggtttaaatgataaagatcctgtctaggttgctaatctgtgcaatcgcctgggagcttgcaatctcactacttcgagagaaaaaccttattttggctctaaagagggctcctgacttcgccacgctcaccttcagtggtgcttcaccgcactaccacttccctaaccaccgcccctatggctgtcacctagatcaaggacctatctaaggagaaagcccaaggacaggcaaagacaggccacgcactttcaacaggaactcggcccctttcctaaacgtagttcctctgattaccctgtccaacggacgtcgctatgatccaattaagttttgaggctcagagtgacgccctctaacctcacactgtccaataaaaaaaggagtttcagattagcaccagttttgaccaatggatgagaagatcagcgtgtattaacctgtagaagcagcacagagaatgatgagcagccagttcacccaatggacctgcctactgcagcgtaggcctcgcctcaacggcaggagagcaggcggctgcggttgctgcagccttcagtctccacccggactacgccatgttggggtttgtgggtcgggtggccgctgctccggcctccggggccttgcggagactcaccccttcagcgtcgctgcccccagctcagctctt

SEQ ID NO: 9817 - DNA, 2300 bp, Homo sapien
ggattattagtagagacagggtttcaccatgttggccaggctagttttgaactcctgatctcaggcgatcctcccgcctcagcctcccaaagtgctaggattacaggcgtgagccaccgtgcccggcttttgagacacttgtctacagaaaagttcgtggtgcaatcttggctcactgcatccccaatggcccaggctcaagtgatcttcccacctcagcttccagagtagttgggattacaagaacatgccaccacacccagctatttttttgtcaagatggggtttcgcaggccgggcgtggtgactcctgcctataatcccagctctttgggaggccgaggcaggctggagtccgagaccagcctagccaacatggtgaaaacccagctctactaaaaataaaattagctgggtacgtggagtgcgcctataatcccagctagtcaggaggctgaggcaggataatcgattgaacctggagggtggaagttgcactgggcaacagggcaacactccgtctccaaaaaaaaaaaaaaaaaaaaaaaaaagggagtttcaccacattgcccaggctggtctcaagcaatctgcccgcctcagtctcccagagtgctgtgattaaaggcaggtgggagccaccgtgccggcctgtataatgcgtttcaaggctgggcagtaagccagtgaatcattaattcccaaaactgaagtataaattttttgaagaaaaacaagtttttttaaaatgttttcccccctgaagctaagaactacacatcgtaatacattatgcgtatctattatcgcactttccatcaagtttttgtctcatgtttgtctcccctagcctgtgagctctctgagctcagcaatcatctgaaatattaatctttgtatcaccagcactttaactgcctgcaacacaggtcctgaatatctgacaaagaaacactaaaatacatagtgtttctacattatgacaaatacagaagctgtgagggaatgaaaactgccaaaatgcagaagttcaaagatttaggaggacaacacatttagttttatttcaatcaaatcacacaacactttcttttccaactgctgcaaagtgcatctacaatatgctattacagatccacttttaaaaggtttcctgtgacattacagcaagcctcttttttcaaacagaggaataatcccaaattcttcctcaaataaactccattccagtaaatggtaaatacataaaaattacagtaagccagacacttaaaaggacagccaagaagtcttccaacagtttattagaaagaatgtagacatttaaaaaaatccccactgtcatgaacataaattgaggttttcagcccgggtataagctgaatcaaaaaaaggaaataaaaaatccaatagtgtattaaacatttttcactcatttgccatactgacagtgcaaatacaaatctggactaaatgtacagactctcaagcaacaatgtacagctttcttcgtcctccatgctaagagatgtaaaagcttaagggtcaaacaataccaattgtataggcttcaaaaaccatctaagttagggcattctctagttttagctaagatacacctggaacactgacaagtcatcacttacatagaataatgtgaagtaaattttttgaaaaataaattttagtggaacaatcctgaaggataacaccagaagaatagcaggttaccagtaaggtgtcagccaatttgttccagtcacttttgaatccatgttctataatctaaaatttattctctttccctaagctgagagcttcctatcatgtcagtatctatgttatgaagaaaaggagacttaggtgagatgtttttatttatcgcaactgctgcattaattgcctaggacctcaacagcttcatgaaagtctgggaaatgttcatgcataaggttattgccttagctgacttaaaattgccccatacaatggtacatatcaacccttagtgaagccttttaaaaaacaaacaggttgaaaaatgggttaaagtaggcaaatacagcatatctgcctttagagctatcaactcaggaattctctcaattatgaaatcttgcagagaagttatttttctttctcaaaatccaggtgatgacaatattccttactccagatctggcatttctgaaagaatttttaaaaatattagtatatagtacaagtgaataatctaccaattttactgtcttaaaggaaaagcaaccaaaaatcgaaatacatagttgcccaatgaatta

SEQ ID NO: 9818 - DNA, 2300 bp, Homo sapien
attctcctgcctcagcctctggagcagctgggattacaggcacatgccaccatgcctggctaatttttgtgtttttagtaaagaccatgttggtcaggctggtctcaaactcctgacctcaggtgttccacctgcctcggcctcccaaagtgctgggattacaggcatgagccactgcgcccggccaaggcttcccttatctaagaatagaatctttaaaccattctgtggttatatcatttttagttaaagtttttaaggttttattctgtttatcgtgtgcaggaaagaaaaaaatggtaccaggttaaactttaaactttattgttgtgcagattatttcagtaggaaatagaagggaaaaaaaaatttttttttaaatgaaacttaaagggggttggggcagttggatagtttgaagtttttagtagtcaagggcatgtttcagagtccagagaaaatttaggtaaagaaatgagaaaggtgagaaatgacaagctattttctatcatgtagtgatgctggaaagataaatggtatgatggtccttttgtttttaggattccaagcataaaagaacggacagatcaattttatgttgtttacgaaaaggagaatctggccagtcatggccaaggttaacaaaagaaagggcaaaggtaggtttcattttccttttttgaaaagtttgatatttttattttaggtaataaaagatgtacttatttgatgtaaggaatatggctgtgtttttgtttcacagctaagtataaagcctcatgttcatgttttttgtctactcagttttaatacgaagtgtgatcagaatatcagttattaactggtgtagaatcttttgtacttaagagacagactttgcataaattactcagctatcacatgggaggggacaaagcttggtgaaaaaataatcaactgaaaatagttcttactagtaaatttgttttcaaaaggtatgtttaacaattttcagtgttttttttcccccaaaacagggtctctctttgtcacccaggctggagtgcagtggcacgatcttggctcactgcagcctcagtttcccaggctccaagtgatcctccctcctcagtcccccaagtagctgggactgtaggggcatgccacaacacctggctaatttttgtattttttgtagaaaggggtatcacagtgttgcccagcttggtcttgaacttctgggctcaagcagtctccccacctcagcctcccaaagtgctgggactacaggcatgagccacgacaccagcctagtctttttttttaggtagtctcatgccactcatgccagagtgcactggtgtgaacatggctcactgtagcctccacctgggcttaagcgatcctcccacccacctcacctctccaaatagctaggattgtaggaatgtgccaccacgcccaggaaatttgtttttttgttttttccccagatacaggatccactattgctcaggctgtctcgaactcctgaaggattacacaactagtctttccaccttggccacccaaagtgttggggttacaggtgtgagccacctcatttagcttagtctattctttgtgtgctaattacatgccctcctaaaaatacaaagtcacagttcaaaaaatattgttttgccaggcaccagtagcatgtgcctgttgtagttaaaagctactctggagggtgaagtgggagaaatacttgcgcccaagtctgggttgcattgccatatgtcaggtaaccacgctaagttaacatcagtacggtgttgtcccaggaagcggggaccaccaggttgcctgaagagggtaaacaagacccttggtcagaaacggagctggtcaaaactcacatattgatcaatagtgggattgcacctgtgaatgcttgctgcactccagcctgggcaacatagcaagacctggtctctttagaagaaaagaaaacgtagtcttaaggttcatgccaaatgcaaattagcctaatcttagggtgatatttgtattgatttatagcttaattggcttagtgtcgacttcaataattggaaagactgggaagatgattcagatgaagacatgtctaattttgatcgtttctctgaggtaagttcctttaaatggacctctccccattcgaagcacacggtacctgtctatgtagtcaatttaatatggttttgggcacctaatggtattcatgatgcatgttattttatttttaagaccattttgcagtcatagtaaatagatgttaacaatggcaattttaa

SEQ ID NO: 9819 - DNA, 2300 bp, Homo sapien
aaaaaaaaaaatttagcctgacattcagtgccaccattatttggttgtgacctattttttcttttcttttttttttttttttttttttttttacacagagtctcactgtcaccaagctggagtacagtggtacaatctagactcgctgcaacctgcgtcttccgggttcaagagattctcccacctaagactcctgagtacctgggattataggcacaccacgcccagctaatttttgtatttttagtagagatggggttttgccatgttggccagtctggtcttgaactcctgacctcgtgatccgcccgcctcggcctcccaaagtattgggattacaggcgtcagctactgctcctggccaaatattttgtatttttagtagggacgggggtttcaccatgttagccaagctggtcttgaactcctgatctccagtaatccactggcctcggcctcccaaagtgttgggattacaggcgtgaaccagtgcgccaagttaacttccttttttttttttttttttttttgagacccagactcactctgtcgcccaggctgaagtgcagtggcgcgatctcggctcactgcaacctccgcctcccgggttcaagcgattctcctgtctcgctctcccgagtagctgggactagaggcgtgtgccaccacacccggctgatttttttttatttttagtagagacggggtttcaccatgttagccaggatgggctcaatctcctgacctcgtgatctgcccgcctctgcctcccgaagtgctgggattacaggcgtgagccaccgcgcccggccccttccctttttttttttttttttgacacagggtctcactctgtcgcccaagttggagtgctcactgcaacctccgcctcccgggttcggggttcgagctatcctcccgcctcatactagctagtatttggcattacaggcaagtgccaccacgccctgctaattagtatttttagtagagatggggtttcaccatgttgggtgggctggtcctgaactcctgacctcaggtgatccgcccaccgaacttcccaaagtactgggattataggcgtgagccacgggcgccccgcccaatttccctttttaatggcatttgagctagggtccaggtttcgtagctcccactacctgtcctgcacaacacagacactaaataccttagtgcttattatgaagccccgttcttcagaaaggttttatagcactttcgttaaacctccttcctgttcaaaatgcagcgcactagagtatttttccccaatccaccgttaagcggcttcttcttaagcaggactgttttgggtctcttggttgctacccctactacaccctactaatatgttgcacaaagcgacggggaaccccttctcccccaaacgatgtgcgtggaaacacacaatgtcctactctctccattcccagaaacctagactctcccctcaaatacctttcctggctcatctacagcactaaggtctcaaggtaggggcaaaagcccgccccaattggcaaatgctcctcctccgccaagaacctcgaatttccgctgtccctggacagagcctccaaccttcagaaaaatggcgaggtggacccaggcccttgattctgaagtgagcccttttccacagcacaggctttttacaggtttttgtggtggaatgatgactcagtgagctgatttactccctcaagagtaaccaacgcgccatttcagttctccaggatcccgactccgtgtccctccgcctcagccttgcctcccactgtcaacgcaaccgtttctcagagaaatcgccgaaggcgcatggcagggcagttgggccactaacggttttctaacgcgagaagacagagcgggaggagaggcgggaacgcgtagggactagcagggggcggagtgggggtggggtggcggacgaagggcggggccggcgccaggaaggatcgcgaaggagctgggaggccccgccctttccgtagatatctctagaaagccgcgccggagcccaaaaacaaggactgcgcacgcgcggcggcaaggcccgggcattttgctgcgtcaccagccgccgcccggcctcaccacccctcgtttgcacgcacgcacgttcattctccgtcctcgcgccccttttcctacactttcctcttctccccgaccggaggagccgctctttccgcgcggtgcattctggggcccgaggtcgagcccgccgctgccgccgtcgcctgagggaagcgagaagaggccgcgaccggaga

SEQ ID NO: 9820 - DNA, 2300 bp, Homo sapien
tcgcgccactgcactccagcctgggtgacagcgagactccgtctcaaaaaaaaaaaaaaaaaaaaggtggccacagtcgtcttaaagctattaaatcaggccaggcatagtggctcacacctgtaatcccagcactttgggaggctgaggcaggcggataacctacggtcaggagtccgggcggggaggcgggtacctataatcccagctactctggaggctgagacgagaatcgcttgaacccgggaggccgaggttgcagtaagccgagatcgcgccactgcactccagcctgggcgacagagcgagactccgcctcaaaaaataaataaatgttgactggtttagctaattcaggtacagcaaatatttgttgagttcttttgtagggctgtgggaagatatgggaggcttttcattaacacaacactgattttacattctacttttcaaaaatacagttgtacaaagcatggtttaaggtggggtcccagacacctagaataaataagcttagaatatccaagaagtgccaggggcggtagttcacgcctgtaatcccagcactttgggaggccgaggcaggcggatcacctgaagtcaggaggagaccagcctggccaacatggagaaagcccgtctctactaaaaatacaaaaaatagactggcgtggtggcgcatgcctgtaatcccagctacccgggaggctgaggcaggagaatcgcttgacccgggaaggggaggttgcagtgagccgagatcgtgcctttgcaccccagcctgggcaataaaagtgagactgtcccaaaaacaaaacaaacaggctgggcatggtggctcacgcctgtaatcccagtagtttgggaggccgaggcaggcggattacctgaggtcaggagttcaagaccagcctggccaacatggtgaaacccgtctctactaaaaataaaaaattagccgggggtggtggcacacacctgtaatcccagctactcgggaggctgaggcgggacaactgcttgagccctggaggcggagattgcagtgagccgagatcgtgccactgcactctagcctggccgacagagcgactcaaaaaaaaaaaaaaaaaaatccaagaagtgcccaaaatagcaagcaaaggaattgtatatgtgcctatgttctttttttctgggaaggagaatctgcagctttataatttcaacatcggctaaattgtcgtgaacctaaaacaatcaaaagggccggaatctatttaaagagtttattcaagggcagtgtgaggatggaccaaccagaaaacctccaaagaatggagtcagccttcagaagtagagaagttacgatttcatttatttagggagacagaggagtttttagctggattacgttatccatacaaggttggaacataattacagaatttggttacaagaagtgttttttttggggggggggcgggggtacagctaacattgttttacgaagagtttaacacgcatgagttgctgtcatctggtgacatcgtttgagtctctctagtcattgaacagaacaagaaaaatcgaattaaatttataatctgaactgaagttatatgtgacccatcacatctctcaagttttaaaatgggtttttttgttgttgttgatggggggggagagggtccagcagcttttaaatgttttcacatcgtgtgttccaaaaataactggttagcctaagtcacttccaccctccaatgttgtgaatgcagtctctagcattcgctatttaatgtcttcttcctgcactatttgagaaatcgcgaggtcgacttaataccgcagtcgccacttcgcggaccggagggcggagtctgcttagttctgaggactgcgtgggtccgcgcagagagctcctgctaggcctgcgcgtcccgttctaaattcttaccctttagtccttgtcaccacccccgccgtgggaacggcctgacagtcactcgtcaaaggaagtggctgccggcagctcttgacccggaatcggatcctagtcccaccccctccgctccaggcttccttctgcaacaggcgtgggtcacgctctcgctcggtctttctgccgccatcttggttccgcgttccctgcacagtaagtactttctgtgccgctactgtctatccgcagccatccgcctttctttcgggctaagccgccccggggactgagagttaaggagagttggaggctttactgggccacagggttcctactcgcccctgggcctccggacaaaatggggtctgcggttggt

SEQ ID NO: 9821 - DNA, 2300 bp, Homo sapien
gtatgcttttaaaaagagacttttttttttttttttttttttgagacggagtctcactctgtggcccaggctagagtgcagtggcgccatctcggctcactacaaactccacctcccaggttcgcgccattctcctgtctcagcctcgtgagtagctgggattacaggtgcgtgccatcatgcccagctaattttttgtatttttagtagagatggggtttcaccgtgttagccaggatggtctcgatctcctgacctcgtgatccacccgcctcggcctcccaaagtgctgggattacaggcgtgagccaccacgcccggcctcaaaaagagacattttcagctttcattatcattttataaatatgtctagcattgaagtgccttaactcctgggctcaagggatcctcgtgcctcagcttctggagtagctgggactacagatatgcgccaccttgccaggcttacgttttattttgttgtggagacggggtcttgccatcttacccaggctggtctctaattcctgagttaagcagttcacctgccttggcctcccaaactgctgagattacaggtgtgagccacggcgcccagccaatgtttagttcttaaagacagcaaaaatatacccaaggactactgacttccccttttcttgatttgccaattcagtcacatattagaactgtagaaacaaaggggcaaagaaatggcttctatcttcaaaattgccaacttaagaaacacgctagccgggtgtggtggctcacacctgtaatcccagcattttaggaggcagagtgggcagatcacttgaggccaggagttcaagaccagcctgggcaacatggcaaaaccccgtctctacaaaaaatacaaaaattaactgggtgtggtgttgtgtgcctgtagttccagctactcgggaggctgaggtgggagaatcgtttatgcccaggaggcggaggctgcagtgagccataatcaccccactgtactctagcctgggcaacagagccagaccctgtctcaaaaaaaaaaaaggaaaaaaaaatacatccttccttggctagtcattactacagagagaggaaaaagtaagtgggcttgctggggaagaaagaaaaattgtgaatatgtacttttgtctaaggaaattggctatttctggtccttctgaaggtaaatggactaaaggactgcattgaaaatcttccagatcatgtatttattaggtagaaattgattatgtctacaatttaatagtaacaaactttttaagttttatgtaaagattacatgggataattttatgagatagactgtttctttttccttccaattagagtgtgagtgtgtgtgtgtatatatacacacagactaatttaatcttccaaacaatcctatcaagcagctactatttttcccattttacagatcaggaaactgacatgaatatatatataggttaattgcctaaactgacctaatagatttagacaaaggagtcttatttcagagtctgtctttaatgactccacaatattgcctctcctatttgaggaggatttcagaatttcccattcctggtaaaccccactatctcacttaattttaattcaccaatcctaatcctcatttcactacgctaaggatttcagaaatgttaaagtagctttcaaagcattttaaattttcactgcttcccttaaaaggcggccacaccaggtatggtggctcacacctgtaatcctagcactatgggaggccgaagcgggtggattgcctgagctcaggagttcgagaccagcctgggcaacacggtgaaacaggagaagttttgtggcaggagaattgccagaatccgggaggtggaggttgcagtaagctgagatcgcgccactgcactccagcctgggtgacagcgagactccgtctcaaaaaaaaaaaaaaaaaaaaggtggccacagtcgtcttaaagctattaaatcaggccaggcatagtggctcacacctgtaatcccagcactttgggaggctgaggcaggcggataacctacggtcaggagtccgggcggggaggcgggtacctataatcccagctactctggaggctgagacgagaatcgcttgaacccgggaggccgaggttgcagtaagccgagatcgcgccactgcactccagcctgggcgacagagcgagactccgcctcaaaaaataaataaatgttgactggtttagctaattcaggtacagcaaatatttgttgagttcttttgtagggctgtgggaaga

SEQ ID NO: 9822 - DNA, 2300 bp, Homo sapien
agaagccatctccataagataaaagtgctagacaaggctagaggtagtggctcacacaagtaatcccagcactttaggaggccaaagcaggtggatcacttgaggccaggagtttgagaccagcctggccaacatagtgaaaccctgtctctactaaaaatacaaaagttagctgggtgtggcagtgcacacctgtaatcctagctatttgggaggctgaggcatgagaattgcttgagcctgggtgaccaaggttgcagtgagccatgattgtgccactgcattccaacctgggcgacacagcgagactctgtctcaaaaaaataagtaaaataaaataaaactatgtttttcatgtgacatgttattcatgtgactgcccactctagcccacaattgccataaggtatcattacacagtaagagtgattggcagatctccacatcaatagcagatgggttcccttcatacttgtaaagctctccatgattctgcaagcttcctataattcatattttcttatacctgggtgttctatttgagagactaaatatatgaacagcagccagaccatatataaaaacagaactctgacccacaatctacagcaacctgctggggaaaccaacccccttatctataataaacagcacaggaagcaagcttgctacaagtcagacttgtataaagtcaaactgctatctctaatgatgatcctggaggccaaacaacaacccctgtagcaatgggcccaaatgccttaactagtatcctacagcttccttaacagcttccaacataggtccaaccaaagaaagccaaacacccacccctaaaccaatcacataccgcatcctactactagttagcccaggtacagcttctccatgccaacagcctccaatcaaagaataccttgacggcttcccttttttataaagctttcctactcctctgcctgcctttgagtcctgtcaaatgcaagtgatgatggctgactcccttgctatagtaagctctgaataaatagcctatgcttttctcatttggttatttatttccacatattggatctagtaattcatgaaattccatgaagaactaatttccaaaacttttttttttttagacacggtctttctctgttgcccagactggagtgcagtggcactatcatggctcacaacagcctggacctcccaagctcgagagattgattgccccctccccccactccccgcccccaacccttcagcctctagggtagctgggactacaggcgcacgcaactacatctggctagttgtgtgtgggtgcgtgtgtgtagacagagatctcacaatgttgccccaaccggtctcgaactcctggcctcaagcgatcctcctgccttggcctcccaaagtgctgacgttacaagcatgagccaccgcacctgcctacaaacgtttttaaaagatactggtgtcggccaggcgtggtggctcacacctgtaatcccagcactttgggaggctgaggcgggcggatcacgaggtcgggagatcgagaccatcctggctaacacgatgaaaccccgtctctactaaaaataaaaaaataaaaaaataaaaaaaaattagccgggcgtggtggctggcgcctgtagtcccagctactagggaggctgaggcaggagaatggcgtgaacccgggaggcggagcttgcagtgagccgagatcgcgccactgcactccagcctgggcaacagagcgagactctgtctcaaaaaaaaaaaaaaaaagatactggtgttatttctaaaacatccaaaaagttcacgtggagcatcctttttacttcatcttaataacctaaatcaatatgctataggtctcacatttccggagaagatcctcttcctggaatggacgcggccttctgcccacaagagcggtggccctagtgcccgaacgcgtgggcagatcgcaaactgctgcgtctcccgcagcccccgcgcgcaccaagtgggaactacaattcccggcggccccggcggactgcgggccgccgggtcagacagccgacctcggccataagcgcctgcgcagtcgcggggccgccggccgtgctgttcccgccaattcctgtggtaatccttaccgtggcgagttccgcgctcaatggagacgtttgaccccaccgagctgcccgagctgcttaaactttattaccggaggctctttccctactctcagtactatcgctggctcaactacggtggaggtgatggaggcgaggaatgggttcgggagcgga

SEQ ID NO: 9823 - DNA, 2300 bp, Homo sapien
accaactaggatggctaaaataaaaaagataatatggccaggcacggtggctcatgcctgtaatcccagcactttgggaggccgaggtgagtggatcacttgaggtcaggagtttgagaccagcctggtcaacatggcgaaaactcgtctctactaaaaatacaaaaattagctgggtgtggtggcatgcacctgtaatcccagctactcaggaggctgaggcaggagaatcacttgaacccaggaggaagaggttgcagtaaggtgagattgcaccactgtcctccagcctgggtgacagagtgagactccctctcaaaaaaaaaaaaaaaaaaaaaaagataataagtgttggtgagcatgtggagaatttggaaccctcatatgaagctggtgagattgtaaaatggtgcagcctctttggaaaacagtttgggaattcctcaaaatgttaaaaatagagttatcatttgacccagcaatttcactcttagggtacatatatccaagagaattgaaggcccatgtccacacaaaaaatctgtatgtaaatattcgtttcagcattattcataataacacaaaaaagcagaaacaacccaaatgtttatcagttgatggatgcataaacaaaacgtggaatagccacacaatggaatatgattcagacattaaaatgaagtactgataaatagatgaaccttgaaaacattatgctaaacagaagaagccagtcacaaaggtcacatattgtgtgattccatttatatgaagtgtccagaataggcaaatccacaaacatggaaagtagattactggttgccaggagtggggtgtgggaggaaagaatgggaggtgactgctaaggagtatggggttcttttgggataataaaagtattctgaaactagatagtgatgattgttgcacaaccttgtgaatatactaaaacccattgaatcgtacacttcaaaagagtgaatggtatgatatgtgaattatgcctcaataaagctgttacttaaaaaaaaaatatatatatatatatatacacacacacacacacacacacacacacacacacacaaccctaggtccagggctcaagctatgaaacagctgcagttctttcagaaaggtgactgagccagccccagcttgcagcagctgatctcaggttggcagtcttaagaagtgggctttgctaaaatcaacctgccctctgaccccattccagcaggggatttgcattgtaatattccagtttaaattagaggatgggaccaggcacggtggtacacgcctgtaatcctagaactttaggaagctgaggcaggcagatcgtttgagcccaggagttcgagaccagtgtgggcaagctggtgaaaccccatctctacaaaaaacaaacaaacaaacaaacaaacaaaaaaactcaaaattagttgggcatggtggcgtgcacctttagtcccagctactctggaggctgaggtgggaggatcacttgagcctgggaggtcgaggctgcagtgagcccagattgtgctactgcactccagcctgagtgacagagggaaaccctgtctcagtaattaaatagagggctgggtgcgtcagctcatgtgtaatcccagcactttgggaagtcaaggcaggtggatcacttgaggccaggagctcgagaccagcctggccaacttggtaaaaccccatctctactaaaaatacaaaaatttttacaggcgcctgtaaccccagctactccagaggctgaggcaggagaattgcttgaacccgggaggtggaggttgcagtgagccgagatcatgccactgcactccagcctgggtgacagagcgagactctgtctcaaaaaaaaaaaaaaaaaattagaggatgggggctgaggagcatacaagactctctggtcagggcagctcttttctttctttctgtttttcattttggtagtaacagatctgattctgcagctgatcaaggatgacactggtgagaaccctatgagggagtgaagcagcctggactcttaccacaagagggaggtgttataagagcaatgcagaggttggagtgggcagcagttggggcaggaggaagccgactgctgcctggtctgcaaagaagtcctttcaagtctctaggactggactcttcctaagcaagtccggtatgtaggtgggtaagggtggttgtgtgtgtgtgtgtgtgtgtgtgtgtgtgtgtgtgtgtgtgtgtaggggatatgggatatggtctgtttggagacaggttttgat

SEQ ID NO: 9824 - DNA, 2300 bp, Homo sapien
tagagtgatggtgaggagaaatgccagtgatccaaaaggaccaagagcaattatcttcttcacttttgtaaactgcctagtgtacatacatgaaaaacccatttttttgcttctaattttttttttttttttttgatatggggtttcactctgttgcccagggtggaatgcagtggtgtgatcatggttcaagcaattcctcagcctcccaagtagctgggacaataggtgcgcaccaccacacccggctaatttttaattttttttttttaaagatggggtctccctatgttgcctaggctggtcttgaactcctgggctcaagcactttgggagcccagcctcccaaagtactgtgattatacaggtgtgagccactgtgcctggccctctacttcttaaaagagaaaataatctggggttaggctgaaacagaaactatctggcaaaattcagtaaacccagccaggagaacatctaatgtaacttatataacatttatgtgacattaacacctttttacaagtgtgaaatattgacaaatctattgaaatagatggttttgacactgttgggctttcatgttcatcatggttcacatttgctcagggcagagagatattacaaggcatcatttgaatgaaagagacttctttaatgtcaagatctttatcttgggtgggtaggttagcgttcagaatttatgtttttacaaaatatgagattaaggtatttaaggaacaaaaaaggaattgatttgaggacgaaatattccaaagcatcaatatgattgagaataatatacctggtcatatattaaattcatgaatgagttttccaacctcactttttcttttttttttctttttttttgagtcaaggtctggctctgtcacccaggctgcagtacagtggtttaatcattcctcactgcagccttgaactcctgggctcaagtgatcctcctgcctcagcctcccaggtacctgggacttcaggcacgtgccaccatgcctgactaaaaaatatatctgtttaaaaatatatgttgtagagacaagggtcttactgtattgcccaggctgatctcaaactcctgggctgaagtgatgctccctccttggcctccaaaagtgctgggattacagtcatgagccaccgtgcctggccaattttcttttcttttccttttcctttccttttcttttcttttcttttctttttgtaggcaaaagaaagagagatcagactgttactgtgtctatgtagaaaggaaagacataagagactccattttgaaaaagacctgtactttaaacagttgctttgctgagatgttgttaatttgtagctttgccccagccactttgacccaaccactttgatccaatctggagctcacaaaaacatgtgttgtatgaaatcaaggtttaagggatccagggctgtgcaggacgtgccttgttaacaaaatgtttacaagcagtatacttggtaaaagtcatcgctattctctagtctcaataaaccaggggcacaatgcactgcggaaagccacagggacctctgcccttgaaagcggggtattgtccaaggttttgccccatgtgatagtctgaaatatggcctcatgggatgagaaagacctgaccgtcccccagcccgacacccgtaaagggtctgtgctgaggtggattagtaaaagaggaaagcctcttgcagttgagatagaggaaggccactgtctcctgcctgcccctgggaactgaatgtctcggtataaaacccgattgtacatttgttcaattctgagatgagagaaaaaccgccctatggtgggaggcaagacatgtttgcagcaatgctgccttgtttttctttactccgctgagatgtttgggtggagagaaacaaatctggcctacgtgcacatccaggcatagtaccttcccttgaacttaattatgacatagattcttttgctcacatgttttttgctgaccttctccttattatcaccctgctctcctactacattcctttttgctgaaataatgaaaataataatcaataaaagctgagggaactcagagaccggtgccggtgcaggtccttggtatgctgagcgccgttcccctgggcccactgttgtttctctatactttgtctctgtgtcttatttcttttctcagtctctcgtcccacccaactagaaatacccacagttgtggaggggaaagtcaccccttcacttttcttttcttttctttctttttccttccttcctttttctttctttt

SEQ ID NO: 9825 - DNA, 2300 bp, Homo sapien
tcaggactctggtgatattaggaggaaagaaccacattttgctgcttaggaagggagacccaatcacagataatggcatcccacttccttgggctctgagcttcatggcccacctgtcaacctgaagaatccacacttgtggaaggtcttgagcaactgggggtgggtgagcccacacctgctcttcctcctgtctacctcatcagggtgtgtcttggacctcagcagtctatgctctcccactggagggaaatggcctggcagaggagagggctcctctcctctgagatacctgtgtgcatggggtggggatggggagtgcagctaccaacctgacctatcagaccttaggggccagcttggcaaggaatgctgtcatctgagagagggaggcatttctagccctgggaagaagagccttctatgtggtcctacctccctcacaccccccaccctcatggactgtgtgtttagtttgaggccaggggaacactgccagcatagaggcccaggaggtgctgagtcaggcccaggcctgtgctggggcagttctgagttatccttatgctaagtcagacccaactcctggacctcacctgtgtcctcaaggactgggatacccaatgccccggacctgctcagtcttgagtgacatggtctgacctgtttcagccaagacttctctgttcattcacccaggaggcagacagagactgggagattgttcccagatcccgcataggaggtgctctgcctcaggttggttatgaagtaggtgtggtttgctttctaccatttcccacctccatcccctataagctttaggtctgctctttgggggtgggttcataatctggccccctcccctactttgttaaggaacggccaaaccctgcggggctttcccagggtgacacctgctttatgtgattccacgctggtcagacttggcaaatggtggatcacagagatacatcctttgtcccttcacactagagaactttgtggtcccatttctgtgtcagactcgctaagccatgaaggtgtgagctaggaccaggctcatcccaaggaatggtgaccctagatgttgatccaaagaaccacagaggctccagcatcattccctgcatcttatgcaattctgggtgtggcccctcactactcacacctctggtttccttatttcctttcctttaccaccttacctcttagctttctgtaaattatttgctaaattgcctagaatctctgtttctcctccaagtcccgaccctgagaattttctatgtctctggccccagttctctgctcctcctatatctcatcccctcttacagtcaaggcctctgcccagacaattccctcagctgcccagtgaactcatgatccctcctcatcatcttgcccagggctgcttactggtgacctgagtatgacccccacagggtgtcaggcctgagtcccccaggtctttctgctttctggtggctaagcttcacatgccagcctcccctataggagggccctgctgcctctagcctcaggacaatggaggtacatccaccctaggagaaatccattgcttttcatcctctctcatgatggagacttacctaagaattccagagagctgatgacctgcgacttgtttctcttggggtttggaaggtacagaaccaatgttgtttgttttacattaataaatttgtcttgagtattttccctgaaaataaacttatttacatacctgcactcacgacaaatgattttgatccctggagaccaaaatccccaggctgggttgggggcagggtggggacaggatttctaggggagctgtctggggtgagtcctcatctttcatttgcctgccttacaccgcctgggtgagccaccactcatcaccaacattacaagtggattatttccaattcttggcagctttacccatcagggcagggggagagagggaggcagctaccagggctgtcagaggtgacaaggcttcaggttggacttgaatttcttgcatctgggctaattgctgtggtgatgcatccacctataaaaattacagcgtggctcacccagggacctagatttgttgcaagctgtgggaggaaggagagttcttcttccaggtggtttcctgcagactgcctgctagggctcagaggaccagcttcttccctgctgtctcctgagcccagtccctcttggccatcacattccccttgccctatggcggccctcacagacctctcatttatgtatcgctggttcaagaactgcaatct

SEQ ID NO: 9826 - DNA, 2300 bp, Homo sapien
atttagcccttttacatttaaggttaatattgttatgtgtgaatttgatcctgtcattatgatgttagctggttattttgctcgttagttgatgcagtttcttcctagcatcaatggtctttacaatttggcatgtttttgcagtggctggtactggttgtttctttccatgtttagtgcttccttcaggagctcttgtaaggcaggcctggcggtgacaaaatctctcagcattagtttgtctgtaaagaattttatttctccttcacttatgaagcttagtttggctggatatgaaattctgagttgaaaattcttttctctaagaatgttgaacattggcccccactctcttctggcttgtagagtttctgctgagagatccactgttagtttgatgggcttccctttgtaggtaacctgacctttctctctggctgcccttaacattttttccttcatttcaaccttcgtgaatatgacaattatatgtcttagggttcctcttcttgaagagtatctttgtggtgttctctgtatttcccaaatttgaatgttggcctgccttgctagattggggaagttctcctggataataacctgaagagtattttccaacttggtttcattctgcccgtcactttcaggtacagcagtcaaacgtaggtttggttttttcacatagttccatatttcttggaggctttgttcacttctttttctcttttttctccaaacttctcttctcactttatttcattaatttgatctccaatcactgatattctttcttccacttgagcaaattggctattgaagcttatgcatgcatcctgtagttctcatgccatggttttcggctccatcaggtcatttaaggacttatctacactgtttattctagttagccattcatctaatctttttttcaagactgttagcttccttgtgatgggttccaacatcctcctttagctcagagaattttgttactctgaccttctgaagcctacttctgtcaactcatcaaagtcattcttcatccagcttttttctgttgctggcaaggagctgtgatcctttggaggagaagaggcactctggttttttgaattttcagattttctgctctggtatctccccatctttgtggttttatctacctttggtgtttgatgttggcgacctacagatggggttttggtgtggatgtcctttttgttgattttgagctatttctttctgtttgttagttttccttcaaacagtttcctcagctgcaggtctgttggagtttgctggaggtccactccagtccctgtttgcctgggtatcaccagcagaggctgcagaacagcaaatattgcagaacagcaaatattgttgcctgatccttcctctggaaacttcgtcccagaggggcacccacctgtatgagatgtcagtcggcccctactgggaggtgtctcccagttagtctacacagggttcagggacccatttgagaaggcagtctgtctgttctaagagctcaaacaccatgctgggagaaccactgctctcttcagtgctgtcagacagggatgtttaagtctgcagaggtttctgctgccttttgttcagttatgcactgctcccagaggtggagtctatagaggcagaaagccttgccttgctgcagtgggcttcgcccagtttgagctgcccagctgctttgctttcctactcaagcctcagcaatggtgagcaaccctcctcctgccaggctgctgccttgcaggttgatctcagactactgcactagcagtgagcaaagctctgtgggaatgggacccaccaaaccaggcacaggatataatctcctggtgtgccatttgctaagaccattggaaaagtgcagtatttgagcaggagtgtcttgtttttccaggtacagtctgtcacggcttcccttgtctaggaaagggaaatcccctgacctcttacacttcctgggtaaggcaatgccctgccttgcttcggctcaccctctgtgggctgcacgcactgtccaaccagtcccagtgagatgaaccaggtacctcagctggaaatgcagaaatcacccattttctgcatcagtcacactgggagctgcagaccggagctgttcctatttgcccatcctctccctgctttctttacctctgaggttggattctccctgtgggatcctgcaatccttctgccccaaaaaactattatagcaggagggaacctgttcctgctcactctttgccttctccttctcatcctagaca

SEQ ID NO: 9827 - DNA, 2300 bp, Homo sapien
tgaccttttcaaaaaaccagctcctggattcattgattttttgaagggttttctgtgtctctatctccttcagttctgctcttagttatttcttgccttctgttagcttttgaatttgtttgttctcgcttctctagttcttttcattgtgatgttagggtgtcgatttcttgtctttcctgctttctcttgtgggcatttagtgctataaatttccttctacacactgctgtaaatgtgtcccagagattctggtacattgtgtctttgttctcattggtttcaaagaacatctttatttctgccttcatttcgttatgtacccagtagtgattcagaagcaggttgtttagtttccatgtcgttgtgtggttttgagtgagtttcttagtcctgagttctaatttgattgcagtgtggtctgagagacagtttgttgtgatttctgttcttttacatttggtgaggagtgctttacttccaactatgtggtcaattttggaataagtgtgatgtggtgctgagaagaatgtatattctgttgatttggggtggagagttctgtagatgtctattaggtccgcttggtgcagagctgagttcaagtcctggatatcctttttaaccttctgtctcattgatctgtctaatattgacagtggagtgttaaaatctcccattattattggggagtctaagtctctttgtaggtttctaaggacttgctttatgaatctgggtgctcctgtattgggtacatatatatttaggatagttagctcttcttgttgaattgatccctttactgttatgtaatggccttctttgtctcttttgatctttggtggtttaaaatctgtgttatcagagagtaggattgcaatccctgctttttttttctttttttgctttctatttgcttggtggatcttcctccatccctttattttgagcctatgtgtgtctctgcatgtgagatgggtttcctgaatacagcacactgatgggtcttgattctttatctaatttgccagtctgtgtcttttaattggggcatttagcccttttacatttaaggttaatattgttatgtgtgaatttgatcctgtcattatgatgttagctggttattttgctcgttagttgatgcagtttcttcctagcatcaatggtctttacaatttggcatgtttttgcagtggctggtactggttgtttctttccatgtttagtgcttccttcaggagctcttgtaaggcaggcctggcggtgacaaaatctctcagcattagtttgtctgtaaagaattttatttctccttcacttatgaagcttagtttggctggatatgaaattctgagttgaaaattcttttctctaagaatgttgaacattggcccccactctcttctggcttgtagagtttctgctgagagatccactgttagtttgatgggcttccctttgtaggtaacctgacctttctctctggctgcccttaacattttttccttcatttcaaccttcgtgaatatgacaattatatgtcttagggttcctcttcttgaagagtatctttgtggtgttctctgtatttcccaaatttgaatgttggcctgccttgctagattggggaagttctcctggataataacctgaagagtattttccaacttggtttcattctgcccgtcactttcaggtacagcagtcaaacgtaggtttggttttttcacatagttccatatttcttggaggctttgttcacttctttttctcttttttctccaaacttctcttctcactttatttcattaatttgatctccaatcactgatattctttcttccacttgagcaaattggctattgaagcttatgcatgcatcctgtagttctcatgccatggttttcggctccatcaggtcatttaaggacttatctacactgtttattctagttagccattcatctaatctttttttcaagactgttagcttccttgtgatgggttccaacatcctcctttagctcagagaattttgttactctgaccttctgaagcctacttctgtcaactcatcaaagtcattcttcatccagcttttttctgttgctggcaaggagctgtgatcctttggaggagaagaggcactctggttttttgaattttcagattttctgctctggtatctccccatctttgtggttttatctacctttggtgtttgatgttggcgacctacagatggggttttggtgtggatgtcctttttgttgattttgagctatttctttctg

SEQ ID NO: 9828 - DNA, 2300 bp, Homo sapien
cagcctcccaaagtgccaagattacaagcatgagccacctagcctagcccattattttttttttttttttttttttttaggagatgggatctagctctctagatcccatcacccaggcttcagtgcagcagggtgatcatggctcactgcagccttgaattcctagtctcaagcgatcctcccacctcggcctcccaaatacagactgtaccaccacaactggctattttattttttgtagagatgggggtctcatcttgttgcccaggctggtctcaaactcctgggctcaagcagtcttcccacttcggcctcccaaaatgctgggattactggtgtgagctactgcaccggccatgatagattttgtgatcttggagtgatctgatatgtaagtggaaggtttaagaaaactacaaaactacaaaatgaaaaatattcccttccatggagataaatggtgctgatggttgcacagcagtgtaaatgcacttagcgccactgaattgtacacttaaaaatggttaacgtggtaaaccttacatatattttaccataataaaagaatcagtgagcaaacttttaaaaaatgttctctttgagtggataaagaaaatgtggtgtgtgtgtgtgtatatatatatatatatatatgggaatattactcagccatgaaaggaaatgaagtacggatgcatgctccaaagtgaatgaaccttgaaaacatgctaagtggaaaaaaaaaaacacagacactgaatgtcacatatgatatggttccctttctattaagtatccagaataggtaaatccacagggacaggaagcagaaggttggtggtggggggaataggattgactgcttaatggttatggggttttctttgcgggtaatgaagatgtttagcacgtagacagaggtggtgtttgcacaatgtgcatgtctaaatgccattaaatcacacattttaaaatggttaattttatgctatgggaatttcacctcgacttaatatatactcaatcccgtccagccgacacacctttggctcaggcctaggccactctgccatctgccaagtgtggcttgtgtaacagacaacttctctgggcctcaaagagggtgaagaaatccatcctccccacaggggtatctccagaatccaacgagatgaagtgaggtgaaagcgctctgaagggcaggaagctctgctgacacaaaatgtttacccataacacgtggcttagagtcccttaccctctagcttggcgggagagagaagtctgctctccctaccccacgccccatcccctgctcatcccctgccagccacccaccacacccttcacgcagagaagtatagagccacagggggagggcgccattctctctctccctccctactcaggaatctccctgaagctttgacaaagcccccttgacaccccgcattcaatcttatttttatttttttttattaactctgtcacctaggctggagtgcagtgacctgatctcagctcactgcaacctccgcctcctgggctcaagcgattctcctgcctcagcctctcaaaatgctggaattacaggcgtgagccaccatgcccagccattcaatcttttctttcccagattctcacctccaatcacaagatgaaggcagggagctcacagccctgtgaggggctggggagaatggcaggggtgggccagagttattaaaagcccaactgatgttcagatttattttgaccctcccctatacccccacatccaatttcactctagtaggaatcaagacaggggagagagggattccaagctgacttagggagaggaaaatacatacatacgtaaagcatttgccacaggccccacctgagctaagcactttccctccctcaacagctcctttaattctcaaagcatcccttttagtagataatagaccccactttgcagaggagagcactgaggctgaggaaagaggtaaattcattcagcgggtgagggaggagctgggattttaatgctggcagtatgacctccccgccactggcacaccgggtcttttgctgggacatcccctgtaaccggattgggggaatgcaggaaaaaccccatccctccctacagagcctcagcagtgacagctacttcccggatgagaagggcggccgtgaagccagcagggaagccagccccacagccaagggccccccagcctcctcacagctccccatagcctggacctgccggccctccctccaggaccgaggggctcccaagggaaact

SEQ ID NO: 9829 - DNA, 2300 bp, Homo sapien
cagaggtcaaagaatgcccccaccccagagcctagaccctttttccagtgagtcatctctttgacttttcaaaattatctatctatagggcttaaaactggggacacttttgcagagtctaggggctttctctgggtcatgaaagctacaagagttggttctgctcagacttggtgggagttaggcttataggctgagatgagacaattgctttgcaagtaggaacattaagtgcagaaagattgctctctagtgggactgacaaaaattgcagtactggggactccagaaaaaaatgaagacaaatgttaagttagattcctgtgtttgtacttgaagaatgtgtgaagggatcctgaccctccctttcctgttgtaaaacagttgatgcctaaagagatctggtccacaagaccttgactaaattcctggccctttcttctccatttaactttgtatatgtttgttattgtgactatatggtgatttactttaaaaagacttcagtataagtggtatatactttcacctgcgtcttttggatgatttgttttcatgtgaagtttattggggtcaaccctccagagatggctggggcagttggttagaaagactgtataggcccaggcccttgcaagcccagcagccctctgtctccagagtcatgctggaggtctggacctgctggctgtgtgatattccactttagggagactcagtcaccttgcacaactgtgagagctgggcctgccactgaaacattgtgtcaacctctaagtgaccctttcactagatggtaaagtgagatgcctcatccccaaactataagaacagttctatggctgtttttgtatctcctggctaacaaatgttacatgtttggcagcatttggtatagtgcttgctttcagtatagtctgccaccagttaatgaggttgtggaaaggaggacacacaatctcccaaattcatcaagagaatggacaattgctgaatggccaaactggcttagatctgttggcaacattcagtgtgtcccttcctttccacttatccatcaaggaattactgaatcctaccatgcgcctgtcctgggagtttgtccttggctgcaagctattttcaggcagtgactgggatgggatgggagagaggatgaaactgaagggtcttggagcctaagagcttcctctgtactgagggagggagggcgacatgacgaagacttctaatgtctttggtggtggtgggtggggcaggcagtgtaggtggttttcgtttgatgacaattcttgggcagaagcatttgaaaagatgatttgggagaagggtggggaggaagagtgatcgagttctacacagagttggggagggcaggcttcaggaagcaggcctggggtgccaaagtacagtgagatccggtgactttcttcatttggccacctagatggaaggagggacagcagtggattatcagaagggtccagtagtagcggtctagccctcaagtgctccttcattcattcaagcaggcttaatgtattaagcacttattgtgccaggaagtgtggtaagggtcagtgtggacctgcggccgtgtgcaaagccacagatccctgccttcaggaagcccacagcctagtggaggagatatatagtaatcaaacaatcttacaacattttgtaaaatgcccatagtagatgttctgaggagaagcttttggaactgtgagcgtagaacaggggaggtgaagagagtttggatagggtttttcactcttcaggcaccaagtcccgcgcacagtggatgggcgcttagaaaaagccagcctggggacttggaagcccctgcacccctcgcgcaggtcctggacccggccccgccgtgggggggcgctgcctcctcccgggcggcggggggcgctgcggccgggcggcggggggcgctgcctcctccgggacggcggggggcgctgcgggccgggcggcgggggcggcccgggccgtcgcggcgagccgcgcggcggatggagagtctggccgcggccggcggcgccgcctcctcgtcgggccgggcacggcgggccggggcctttgtgtgaagcggcggcggcgatggtgctcggggcgccgcagagccgggtaagcgcggccaggccgagggctgcccctggccgaagcccgaccttcggcccggcatttatctcgctcttgctggggtccctcttgcccgctcccttcggccggacccatcctccccgcccgcgcgccgaccccggccggccccgccgcccctcgct

SEQ ID NO: 9830 - DNA, 2300 bp, Homo sapien
gtggggcaggaccctctctggaatggaggttttatgacctaagtcaaataacgtaggtcagatttttttttttttttttttttttttttttgagctggagtctctctgtcaacaggctggagtgcagtggcgtgaccttggctcactgaaacctccgccccctgggttcaagccattctcctgccttagcctcctgagtagctgggattacaggggtgtgccaccacgcccagctaatttttgtatttttagtacagacagggtttcaccttgttggtcaggctggtctcaaattcctgaccttgtgatccacctgcctcggcctcccaaagtgctaggattacaggcgtgagccactgtgcccggccttttttttttttttttttttttaggaagttgtattttgggctttttaactagcttgttttttaattagattattgcctttagggtggagccctttaataaaaagggggaagaaaacataggttttagggcctcatatttaaatgggtaaagcaggcatagctggaaggcagaatacagaacccccctaatcaaggatctcatttttatattgaatcctaggccccccaaaagagggaaatgtcatgggacgagatgtgtggcatttttatcgagtgccccactgtaaagatgctcccccaaggctggcaggcagcccagtgccgattagcccactctgtgcttagtcttttttttttttttttttttgaggtggagtcttgctctgttgcccaggctggagtgcaatggcgtgatctcggctcaatgcaatctctgtctcgtgggttcaagcgattctcctgcctcagcctcccaagtagctgagattacaggcaccagccactatgctcagctaattttttgtatttttagtagagatggggtttcaacatgttggccaggctggtctcgaacttctgaccccaagtgatccgcccgcctcggcctcccaaagtgctgggattacaggcgtgagccaccatgcctggcgtgcttagcctatttttaatgggagtttcatcctcaatggtgagtgctttcattgtctttaggtgccccagaccatgtttttaaaaatttaaatgcacgaagaaataagtagccctgtatagtagtaatactttgttgtgaataactgtcataagtcatctctaaaactgtattttttatctagttattatatatgactagctatatgtctagttttttaaataatacaaagtaatttatttttggcatcctcaaaaaccaaagagattaggtaatgtagtgtagaagagagcagagctttagacctgagaagaatctgcccatgactcgtgaaactccacaacgaaagtaggagaccccaaaaaaggggtgagtgtcatcttttctgaatttttttttttttttagatggagtcttgctctgccaccaggctggagtgcagtggtgcaatctcggctcagcctcccgagtagctaggattacaggcacgcgccaccatgaccagctaatttttgtatttttagtagagacagcgtttcaccatgttggccaggatggtctcgatctcttgacctcgtgatccgcccgcctcggcctcccaaagtgctgggattacaagcgtgagccactgcactcggccggtcagataatttttttggccagtttttacatagagtaattttaggttttatggctggctttggggcaaaggggttctggtttttatagctggtcttgggggagaatggaaccgagtgacaagaggacaagagagggtcagagaaaaacttctgcttctgaggcggctattgaggccttcattttggagtattgtcctctaagccccagcagtgtcaaactgtacacaaaccatacacagcagccagctcgggtgctgttaggaaatggtctcactgctgggtctgtggggtatgtgtgtgtctgggtgtgtggctactgtctgcatcctcctcccccctacagcctccccgcctcccctccagccaccctgggattggtgactctcagcccctcccctcagctcccctagaccctcccagagcctttatcagggagctgggactgagtgactgcagccttcctagatcccctccactcggtttctctctttgcaggagcaccggcagcaccagtgtgtgaggggagcaggcagcggtcctagccagttccttgatcctgccagaccacccagcccccggcacagagctgctccacaggtaggcaagtgggagaatgctggatggaccagagctggcaccagg

SEQ ID NO: 9831 - DNA, 2300 bp, Homo sapien
ctggtttcgagctcttggcctgaagtgatcggcccggctcagcctctcaaagtgttaggattacaggcgtgagccactgcacccagcctagaattttttttttttttttgccagttttattgaagtacgatttacataacaatataatttgccagttttaagtgtacaaatttgctgagttttgacaaatggagacagttgtataaccactaccacaatcaggatatagaccatttctgtaaccccaaaaagttccctcttgccccttccatggtctagaaatgttaatgggggaaaaaggaaggtgatttaggagtcaaagtagaggaagactaatacgctctggttgcttcagttttgcctagaaagcaggagattagaaaatcccagctgacttggatgtgtatttcatatcttgttaatttaggctgacccactggctccagtttgcctgggactttcctagttttaacactcaaattcccatgtccagagaaccccactgtgtcccacaggcggatcagtacagttggttgccctagctgtgatgttcatgtcattgttcttacacctgagagtgccatctcattttagagtcacttttctcgtgagtaagcacatagtaggcactcagttgactgaatgggtggacatgcaggtaaaccccagatggctgcagattcctggcctagagaacatgagacttgggttttggtgccagctctgccaggtttgcagtggtgtgaccctggaaaagtggttttctcactctagatctgtttcctccactggtaaataggtgatatttgtcacttctgcctctaggacatggatactgctccacctacacatagcattatgttttgatgtcacttccactcagctttctctcttttccttgcccccctccaccttcaaatatatgtagtagatcaataaattatgtaaaggcaggttgataatagaactgctgatgtgccaggcttacgcagagtgcttctgtgagagccatagagtttggaccttgcaccaagcagccatagctgagagttggagaatcaagtctctcttcagttaagtgtctataattacctaatttgttctttctgcatgcctgggagagaggatggtaggcagagggggcttgctgtttttaggaattttcctggctggatgaaggggtacttcttatctatcagagggagctattacattagctcagggtcttactcagtatcctagtgctgacgaattaaaattagaaacttcagaacttgggctgcaacttttggcaaacttagggagctgcattctgttcctggttctgccatgcactagcatggaactgtgggcacattgtgtaacctctctgagtctggtgtttgttcctagttttccattttaatggagtatctgtattgccttcctcggggtggtgctattcagtgaggcaatgcaagggggagttcaatgaaactgggacatctatacacatgtgaggtattattactaatcactttaatctttgggtctctatgatagggtctgattcatgggggaagggaagtggagaagaatttggggattttgtctgcttagctctccaagtaatctcattaacatcccctgactcccgataagataggaagagtaggtatgagggaggtactgtttttttgctaggaagacactctttgtaaagacgtgtctcgccatgttgcctaggctggtctcgaactcctgggctcaagtgatcctcccgccttggcctcccaaagtgctgggagtataggcatgagcaaccgcacttggccctacctgtccttgacaaaattcctgacttctctttgggaaatattttccttggctataaattccattcttccagctttcatttccaaatttgggagacaatggagcaagaaccctcctttagttaagcctctcagctaacgccagccagataccctttcctacctagagggagcttgagtgtctccctctggggcttcaggcctgtgaagggttaagtgagccacaccctcagcaggaacagtctggactttgtgctgatcagccatctccggcctctcctggtttgactggcacagggagcctgggctggaagaggcagcaaaagggaaaatcagaagagtggacactggcaagaggagggcagcctttttcccagcttccttgcaccatggacagctcccattaagccacctctccatcctggggccaggactcttatgccccattcctgtcaaattgagatttcatccaccattctccaagga

SEQ ID NO: 9832 - DNA, 2300 bp, Homo sapien
acccaggctggagtgaagtggcatgatctcggctcactgcaacctctgcctcctgggctcaagcaattcttctgtctcagactcctaagtagctgggattacaggaacctgccaccatgctgggctaatttttgtatttttattagagatagggttttgctgtgttggccaggctggtctcgaacttctggcctcaagtgatcctcccacctcaacctcccaaaagtgctgggattacaggcatgagccaccatgcccagcccattttgactttttttttttttctcttttgagacagagtcttgctctgtcacccagtctggagtgcaatggggcgatcttggctcactgcagcctccgcctcctgggttcaagggattctcctgcctcagcctcctgagtagctgggcttacagccacctaccaccatgcctggctaatttttgtatttttagtagagacggggttttgccatgttggccaggctggtctcgaactcctgacctcagttgatccacccgcctcggactcccaaagtgttaggattacagacctgagccaccatgcccggcccattttgacttttaaaaaggtccttgttttagaccaggtgcagtagcttactcctgtaatttcagtaatttgggaggccaaggtgggataatcacttgaggccaggagtttgaggtcagcctgggcaacatagcaagatattgtctctacaaaaagtaattaaaaaaaattaagccagacatagtggctcatgcctgtagtcccagctacttgggagattgaagtgggaggatcatttgatcctgggagttcgaggctgcagtgagctgtggttacaccactgcattccagaagggttacagaaggagaccttgtctcaataacaacaacaacaacaacaacaacaatgaaacaaacaaatagctgggcatggtggtgcatccctgtagcccaacctatctaggaagctgaggtgggaagatggtttaagtccaggaattcaaggttacactgagctgtgatggtgctgttgcactccagcttgggtgtcagagaatgaccctgtctctaaaaacattaaaaaaaaaaattcttgttttgaaagcttgaaccttccccaggagatgcccccttccttgaattcctcaattcatttggctctatcatctgtagttttcctacccatcaccatcagatcctcttaaaaaaaaagtttcaatttctactaacagtttctgaacacctggatctctgctgggccctgtgttaaatcattgaatgggaagcagctaatccatataaataactccggctttggagtcagtaggatttaggttgggatcacagaccagatgaactatgaaatcttgggcaggttcctgtggctgtcttggctttggcttcttaaatggagagaattatatttgtctcacaagatgataagaggaataaatgaatctttcttaatcctaacattaattttacttccaaaaataaaaatcctatgaatacatttttaaaagctaatgtttatgcttataaaatattgacacacacttttttgtgacttctattttaaatcctttaggactttggagaaccacacttttgtcagtcgactttaaaaatcgtcctatcagggtcctactcataaagcgatctcaattgtaggcgtctcataacagaaaggtcgtgataaaaagtaaccgaaagaaaacggaaggaacttcagacagcttctatggaaataccgagtttggtcaaggaggcctctcccattccgattttctattggttaaacttaccatcaatcacaccagttgtaaataaactgaagacggaagcatgttgttagcggggtgggatcttcctgtcgccactgctagggtgagaacccattttccaataggctgaaagctgcttttcccgccctctctcttcagttgctaaggggcgggactcatagggcccttggagggctgggtgctcgaagccctgcccatcccattggttgataggggcgggtttcgtagaggataggctgctgtcgttgcccgttcggagttagttgctggggtaaggcacgtgaggaggaggtggcttgaggcaaccatggcgggaggaatgaaagtggcggtctcgccggcagttggtcccgggccctggggctcgggagtcgggggcggtgggacagtgcggctactcttgatcctctccggctgcttggtctacggcacaggtaccgcccgggcagcagctgccaagggggcaggtgccgagggggttat

SEQ ID NO: 9833 - DNA, 2300 bp, Homo sapien
ctcacacacgggttcgcacccggacccccgctggctcccctaggggagtgggcaggccccttctgcggaatttctcttccctcgtccctctctggccgagcaccccctctcccaggacccgggagcggagagctcaaaatcggctcctccctccccctctttcccggatcaggaccgggacccgggcgccccgcgcccagtaggttgccgctcacttgctcacgccctactccgcctcctccttgggcgggcgtctccctccagatcctaaggctcagcgccgccccaagggggccggggtgggagggaggggggcgcctcgagcagaggctgcgtgggcggaggatgtgcgtcacggggagcgtgggctgggggagggagggggcacgtggaaacccggggccagcggctggcagcccgggatccaaaataacctgaggtggggggggaggggtcgcccacaccccgtacggggtcgggagcgtccccaggggagcccgtctagccgcaccctccagttgcggggcgggggactgggagacgggactctgctcgttcccaccacccccactgtgtttggcgcttaataggttggagaagaggacctgagcaactgaaatcctcccaccaacaacgcgctccttctccccggaccccacaaggcggaaaggtctcctcgctaggccacattgtaaaaccagccccggtccacggcctccacgccccgccatgccccaccccagcccctcagaagtgcggacagagaggcggggcggggctgagattccggactaggggaaacctcacctgtggccagtccgctcgctttccccggcccccaccccccctcctttccctggggcttagagtctatgggccgggcccttagagcccccgcctcccccaacagccctcccagccgtgggcgggagtgcaatgcgaaccagatggggctaggagaaaccaaagggggagacggtggtgggttgcagaggcgggggctaagctccttcaaggcgctcctccttccagctccgccgcaggaagtcacgtcgtaggctcccgacctcttactcatcttccactagactctcgggcgaggtccctaatagacggccccaggaagggtatcgtctttgtcacacaaaattcccaggcagggcctcatcctcagcaaacagaggacaagtggaggaatccctgcctgacctacgcgctgacaaaagccgacgcgtctaatcaacacgcgcacctaagtggtggcgtgcagcataaccctcccattcctgtttcccaaactttccaggctagcatggaggcctgggtttctgagagcgaccccctcagattattccattggggctgaggaggggcgcggggatatctaggagatccctgcagagccccacgctctcaggcccgccttaagtgcacactatacgggagtcagatgcacgcacaggagaagccgcacagcccagccttcgctaacttttcccggctcactgctaacattcacacgtccagcaccacaaggcctgagtatgggcaacgggcgtccccgtagttgtttaggcgcgtgtgcacgtccgtgcgcttctgtgtctttgtgtacttgtgcgtggttgtgaaactcctctctcagctcggaggggtgggggagagaaggaatgtcgccggcggggcgctcacgtgggtacgtgggcgccaagagggccggctgtgcatccggcgtgggcggcacagaacgacctcgccccgcccgctgggtccccaagcccgccctgcacagccgggcctcggtcacctcggtccccaattcggcgccccggctctgaatccccgcccccgcctcctgctccacaccccctccccccccgtctccgcctctcccagtctctaagccgcggcgtctccgcggccgagaggccccagcgcccgcctccccggcccccgcccccacccccgcccccggctctgcccacgccctccgcccgccagcccggcagccagcgcagctccgggcctcgctccctgtgcgtcctgcgggggcggaggcgcggagaggcggcaagcgcagccggggagggtgggggggcagaggcacagacagaggcgcggaggctcggagagagaagacgtggagggagggacagagcctggacagcggtggacacggcatcgtgcgcggggaagagggcagcacgcagcaggcgccgagcgccgggcaccgagaagggcagcccgggtgatctccggccgtccatgcacagagcgccttcccccacagccgagcagcc

SEQ ID NO: 9834 - DNA, 2300 bp, Homo sapien
actctgttgaagtaggtataactattattctcatttgagggattgacacctgattgtgaacctcctaaatggagtcatacccaagccagatttgcctctaaattctgttttttccccttacatcacagtgttcccattggtatagtcagttacagagggagtaatatatactatttttctaccagtacttgctcctcgccttcctaccccctaaaaggagccaaagtcagagatcacatttactcttttccctcctcctctccaagtctttggggacttgtagctctgacacccttagatggtgaaacctggcttcacctactgtctgtggatgtctgcaggcagagtgggcactcgggagcacatacaaagcacgtgtgccgtgaacacgtatgtgcacacaccttgatcctagcatggcttgttggacaagccaatggacagagtccctgcctgccacctccacccctgctctcccttctcttccattcactgtcctgcagacacagcaaacacatacgcacatacaccctcaatatccttttggcagtaacatgacccccaaatctggggacttctatgtaggatggagacccttctcctttcctcatacctggtttattatgaaccataaaaatagtgcctgacagttactgtgtgtcaggcattgttctaagccttcagatgttttactgcattttattctcacattatgggttaagacttatttgctccattttacagatgacgagaatgaatcacagagtaaattgctcagggttgtgtggttagcagcattagcaggatttgaacccaagcagcctgtatccacagtccagtcttttaactgctatattttgctgtgttcaaaccctctgctgcctggctgggtccacacacgtgcactcatgtacagacctgcggggtagcaagggatggaggaggaggagctggttctggaaatcaattcaggcaccagggggcagcataggcctagctttggcccctcagcccagcccctgctatgggagggaggaggggagtagaaacttcctcccaccgcccctcagacaccacctcttccacacaccggggctctcaggtgtccgggagtaaaggcctctctggatcccttggtctcctccagctcctcccccagcaaaaactgcagaaccctccactagttatgttgatgactcagaagttgagcaagactgtgtgtgtgtgtgtgtgtgtgtgtgtgtgtgtgtgtgtgtggtgttgtgattgcaatgggctctgtttgtgagcctgcctgcacgtgtgtgtgtgtgtgtgtgtgtgtgtgtgtgtagtcttgtggtcagggaagttgtgcatgtgtgtgtttgtttcttggcgtgtctcagtgtttaccccagaaacatataggaacttggcagataggaacacagcagattcgtattcaaacttgccccttgtgaatctgcaggcagcagctccggcttgtgctggttcccaccacagtctcaggaggggtgccctgtgaggagagagcaaagaccagcttcagtccaagggactcctagagtcttccagaattctgagctgagggttcccctcccccactccctcccgtcagtggtcacgagaccgacctctaaggcgttccctgccggaagggagggggacctaggagttggctggcatcgagctccctggcggctttttagggtcctccactggagggagcgcagagtccagagggatttacttttcctgaggccctggggagcccagtcccttgtgggtccaaaccccagcccttggcagagtttgagtttgggagccaggcagttaggggtggcaaatctctgtttgatattgggtgactttctggagaaaagctgatgcttttgagggggacagagtaagtgggggtcagcctccccccaagcctggctccaaggcctggaccccagtcctgatcccccacgtgttcccccactcggcacaggaggcacacatattcaccccactttcttcctcttcctcctccagcccactttctcttctctgtgtcgtcagagctccagggagggacctgggtagaaggagaagccggaaacagcgggctggggcagccactgcttacactgaagagggaggacgggagaggagtgtgtgtgtgtgtgtgtgtgtgtgtgtgtatgtatgtgtgtgctttatcttatttttctttttggtggtggtggtggaaggggggaggtgctagcagggccagccttgaactcgctggacagagctacagacctatgggg

SEQ ID NO: 9835 - DNA, 2300 bp, Homo sapien
gtggagagcatcaagtttccttttactttttaccttcctgtactttttttaaccactaggtattatcttttctttctttcttttttttttaacaatataaagttaataaaaatacacattcacattcaggagacagcaggggatgggaggttgcaagtgagaagtgcatgctgactgaggccaggttttggaaagccatgactgaagaggagttcacatttgactggtctatagacacccactagaggttccccagcaaggaagagacaccgggaaagcagtttttggaagattcacctgacagatgggtagggggagggaggaaagccccttcaagccctcaggctacatgtggttgctccagataccgttttcctctcaaagctgtcaagctgtctaaagtctgtttcgacctgatttcacttggatcccaatactgggaggggccctgggaggaacctcgtaggcatttggtgagtccgcatagtgcgtctcacattgtgttgggccatgggagctggataaaaggagaaataagaccccgttcctgcctggagcaactctctggcagtggaaatggaggaaatctgagatatacttcagaggaaaaaaatgacaagcctggagcacaggctggcaagattggatataggaaggaaaggcccccttgagttggcataaagtctgaggtttctagcccaggagactaaaggcaggtggccaccgcgctgagcaaagccggctggaagaagctaaaggttgagctcactgtcattaggaggcaagtccttcgtgctgctcctgtttctgccaaggacagactggagtggggacttttccgtaactagaacgtaaaagggggaacagtccctcctctccagcgtcaatttttggcagccgacgtcgtctgccccgctccttgaactctgacatgcagacacctagaaagtcagacactaaggtaacagccataaaacgccgcccagaagggggcagtgaccaaaagcacgttcactggcccctgggaaccgcctggcgcctgccttctgcaaagtatcattcccgtgtgggctgagcctggggacaaaggtccggcgctcagcagacacctccttggaacccgaggcctggaaacgaaggtccagagtccctcatcttattccaaatcctggcgctcggaatctaaaaccctaacttgatggcaagccagtcagaaggtattaaaaaaaaaaaaaaaaaaaaaaacagaaaaataaatgagccccgacttcttgggcgaaagggggtggcctttcctcaaccccacccgctggtgactcacctccctccaaaccagggcctgcccctcccgcgcctagggctgggcgagcagggcgggcgggtactaaggtgggctccatccccgagccccacgcgggcggacaagctccggcgtgtcccctcgggtgtccctgtttactccgagcccgggagcgaggtgggggcgggtcctcgcggtccctccccaaccccgccccctccttcgcaggccccaatcccagtccggtcttccaaagtctccaaatcaaagctcagcctttccctgcaccttccccgcggactggcggtccctgtccccaccccgggcagaggaggcaccttcagggttcccctagaaaatcgagcctcggcccagaccactgagtcccggacgcccccggagggagcctgaaatcctagagtatgacactgagtttcaaaggggagccgctcagctctccgcccactgcccaatcccaccctcgaccccttctgctctctggagcaccagggaggagggcccagccaggggagagggcgccccaggccccaaactagccagcgagtccccgggaccctcactcttggaccgctttccagaactccgaaccctgtcgcgggtccgcgtcgccctcccccgggcagcgcgtcaaatcggcgcatgcgcactcactggattgccgcgtagctctttctccccccacccaccaaccttttttctttccccgccccttccctccctccctcctcaacccgtcccctccctctcccccatcagcccccccctcggcacttcagtccggggaacagcggtgcgagctccaggcccatgcactgaggaggcggaaacaaggggagcccccagagctccatcaagccccctccaaaggctcccctacccggtccacgccccccaccccccctccccgcctcctcccaattgtgcatttttgcagccggaggcggctccgagatggggctgtgagcttcgcccggggagg

SEQ ID NO: 9836 - DNA, 2300 bp, Homo sapien
accagttccagtgctccattaccaaacggtgcatcccccgggtctgggtctgcgaccgggacaatgactgtgtggatggcagtgatgagcccgccaactgcagtgagttgcctggcctggagcccagcttccctccccagtgtctgctgctcacaccaccccgacgtgtgaccccctcagtggctgctccctcactctccccaccctcccggcacactcctggaaggagtctcatcctcaccccatgcccacccgcttgcagcccagatgacctgtggtgtggacgagttccgctgcaaggattcgggccgctgcatcccagcgcgttggaagtgtgacggagaggatgactgtggggatggctcggatgagcccaaggaagagtgtggtgagccgagaccccactccaggaggaagacagtctacctgggtgggaggcatggcacccctggcaggtggagggctgggggccgcctgcttaccggtctcagcgtggccctgctgctgggcttcctgggcctgctgtggggctggggaaggaggcctggctggagctcacttccccacatccacccgtgccccatgtctcccagtttccctatccctgcccctgcccacgcctcatccacacatacctgtgtggagttttccctgcccaccctatgggatctgttcatctccttcccaaggcagctgcccacacacacacccccaaccatgtctcctgtccccaaacctccttatagaccccacgtctcaaaacaccgcctgggctccccgcggctgacccttcccaagctgggatgcccaccctccctgccaggccagcctgaccatgcctgcttggaccctaatgtctgccccagccctttccctgactgccctgacacttgcctcctccagatgaacgcacctgtgagccataccagttccgctgcaagaacaaccgctgcgtgcccggccgctggcagtgcgactacgacaacgattgcggtgacaactccgatgaagagagctgcagtacgtccccacccacccagccccgcatgagcccctcccaggcctggcccttgtctcgcggccctcctgccacaggccgcgccagagctggtggccacctcccagggtgggggcaggagccgccctcctcacccatcccactccatgtcgtgtatttgagtttgtgccatttcacctcatctcatgtttctctccattttcacactgtcctctcggggttgcagaggtaggtgtctctgatgtgcccgtgctcccaccatacccccacctctgtcccagagccccccatccctgtgctgtgcctctacccatcatccttgattgacctctccccaaaccctggtgcttgtctcagtggtcttgcccccgctcccctccccaaacacagtctgttctgagggcaaggccagggacctgtgtcctctctggtgtctgtcccatggggtaagtgcgagcccgcctgtgcccagctgttccataggagcagccagtgggctctgccaggactggctcggcctctgggtcagtcagctgtggccttcagagacacggggatgggccttgggctcgggactgtggcactactgaggcctggagtccttgtgcccaccctcctgggcctgtctccccctgtccttcccagcccctcggccctgctccgagagtgagttctcctgtgccaacggccgctgcatcgcggggcgctggaaatgcgatggagaccacgactgcgcggacggctcggacgaggtgggcagggagatgagaaggaagcagatggcctcagaggagttcaggcagggcttggggagtgccgagaggtgaccggctgcctgtgcccatgcccacagaaagactgcaccccccgctgtgacatggaccagttccagtgcaagagcggccactgcatccccctgcgctggcgctgtgacgcagacgccgactgcatggacggcagcgacgaggaggcctgcggcactggcggtgcgccccttggcttggtctccctgggtcctccctctgctgcccaccccgccacatggcccagtcattcactcattctttctcttctgtattcattcttcatgcaacaaatatttattaagcatttaccatgtaccaggcactgccataggtgttagggacgtagtagtaaacaagacacagggcccctgaatacacatttttgtgcgggttgtgcccagctcaatgccccctagtctaggggaccagttgagctgaaatccagcaaaccctgagggctgtgcccatctaggccc

SEQ ID NO: 9837 - DNA, 2300 bp, Homo sapien
catcggtgcatctggtgccccccgggagccactgatctctgcctgtcacctcaagatcctgggcagagcgacaagggacccccgctgcagcttggaaggcatacccctccagtcagcatcccccactccgcctgtcaggacctgctaggagaaggtccaccaggaggcagtttctcaaactacccacccgggaggcaggtgggaagccctcaccttggcctgagagatgggaagaaccagggacagaggctgagaaccagggacagaagctgataccgaatgagaggcagaaacccagaggcggagagacagggggacagaggcaaagacccagagacagggcgagtagtgtgcatgtgtgtgtttgcacttgtgtttgtgcgagcgcgcacacatgtgtgtgtgtaactggagagagaacaggtggcctgagactgtagctaaaggaggagagatgcagtgggttcggcccccagaagaccaggaccctggtaatgggcttctgtcctggacagcctacgcctaggtgtgcccactgttcccacctactactgaagcagcccccgtgcctggaacgtgggctcagggttctggctcaaggccttttggccttgagcctgaacatttctgccccttcctgcctctctcctctccacccccaccccggcacccaggttcctgcctcctggcttctgcctgtctccctgggtgtctctgaatctgcctcgtcctctcagcaccggtccttttcctgactcgtgtgtgtggctgtcacgtcccatatctatctgtccatttctttgtatgtgcccccacttgtcttctgggctgccagtgacagcatacacctgtgtatgtctcagtgtgtgtgtccacctctgtgggtgtttgctctctgccaagacaaagagagggtgagcgcactgagcaactgtctgggtgtgctcgtctgggtgcaggtgtgctcacctctgttgctgtgctcctctgtgtgttggggtgccgctaggtgtgcgcctgtctctgtatttcgctctgtgtgccctgtccccgtgaaggcatctgcgtgcatccctggggtgggctctcaagggatgtgtctgtctctcagtctctttgcttgtccctatctctgtctaggtgttggtcataccacaacctcagccacagcctcagtgcatagcaacagctgacagctgaaaccacccgggcaggagagagagaggcagtggggaggagggaaccgaggaagaaacagagaagaggatgggggcagagagctggggctggggacagagacaaggacagagatagggaatggggacaaggatctagaagagctggtggtgaaagatgggacggcgggaggggaggaacagagactgcaccaagaggccaggcaggcggcgctgagagggatttcctgcccagcccccatgcagaggcgcactgggcctcgtgggggtcagtggtgggggccaggggcaaaggtgaacagccggtctagccgaggggtcctgagaccgcagaggtgcggtgaggcggggacggggcggagggcgccgtttgtcagccctattgacagacgtgatggggtttccgtccgtgatcaatgattctcatctccgggccgaatgagccgcggggcgcccatccatccccgtcagcatcgcgcggcggcagccgcccgaggccccgcccgtccccacctcggcccctgccctgcgcctgccccgacacaccttggccctgaacagggcagaggcccggggcttggagagcgtcgtccggctgggctccgcggcgcccccactccaggtgcacgggcccggagcccagagccccacgccctgccccgttcctcctgggcgcacagacgcggcctctcgggggaccagtgcctgagcccctcgaccccctccgcttcgcacctgggccaggggcgtgtccggggcgtgccggtgtgaaagtcaccttcggtgcccccagctgggcgggagggggcgcgcggggcgcggccgggattggagcgccgcggagccccgccccccgcccgcggagtcagacccaactttctcccccgcccgcgccccgcccccagcgccggctccgcgcctcgcgcccagtccgcgggccgcgccgccgctcccgccgctcccgccgctcccgccgctcccgcagccgccccgccgcccgcccggagccccgcgtccctaggcctggctcccgcctgcccgagacccgcccagcctgccccgctcagccgccagagaagatgcggctgctcccggaatggttcc

SEQ ID NO: 9838 - DNA, 2300 bp, Homo sapien
ccaggtgggaacggctggaattaacaaattcgcccatctgggccttagtttccccacttgtaaagctacagtaaaatagtgtgtggtggggattctatgaggcttttcctgtgaacatgctgctgtgctggatagtcctcccctcttcctctgcctcctcctcttcttcctcatacagctggacatctgagagcagagttaggtgtgtcttcctgtcattgcacttgtcacactttgttacctgttcacctcttggtatcctagcagccagtgagctcttcatgtatctccagggctatggaatgcctggcatagagtaacattgctacataaggcaatgattcgcaaaaccactgcttaacaggctggtccaagtgcagtgatgtttacttgatcataatcagttacattatgataattgatcataatcagttacaggtttctttgtttcttcttcactcccactgcttcacttgactggcctttaaaaaacaatttttttggcctggcgtggtggttcacacctgtaatcccagaactttgggaggccaaggcaggcggatcacctgaggtcaggagttcaagatcagcctgaccaacatggtgaaaccccgtctctactaaaaaatataaaaattagctggacgtggtggtgggcgcctgtaatcccagctactcaggaggctgaggcagggagaattgtttgaacccagaggcagaggttgcagtgagtgaagatcatgccactgcactccagcctgggtgacagaatgagactccgtctcaaaaacaaaaaacaaaaaaaattttttttgaagacagtcttgctctcttgctcaggctggagtgcagtggcttgatcatggctcaccttgaactcccgggctcaagtgaccctcctgcctcaaccttcccagtagctgggactgcatgcacataccaccatgcctaggtaatttaaaatttttccttttgtagagatagggtctcactatgttgaccaggctggtttagaactcctggcctcaagagattctcctgccttggcctcccaaagtgctgggattacaggcatgagccaccatgcccagccaaaaatttttttttaattaaaaaaaaaaacttggcttatcagaatcactgaggagaggtttagttgtgtgacagcataagtgggcaaatgtctactctttgagatccattgaattagaacctctgaagacagaccccacactcatatttatatcatattttctaacccattctgatgctgaggtttgggaacctactcctggaggggttgatgaatcccattcccaagggtttcttccggatgaagtcaggctaaaaggaagatcccttccagtctcaaagatctatagccctggggaaaaaaggagagcccaccgactcctgggacatcaagaggtggacaggtaacaaaatgggacaagtgaacaacaggaggggtgccttcctctgctcccagatgtctgaggagaaagaggagatgccatgtaggaggcaggtctgtgggtcagaggaagaggggaggacaatctgtcacagcgcatgttcacaggaaaagcctcattgaatcctcaccacacagtattttcttgtggctttaccagggaggaaactgaagcccacacaagctaatgcactagtcccagagccggaacttgaattcaggtcttccgacccttctaaaccacggtgctttccagtgttccatagctctttatcttgtgtgggggtctagatctcctggagtctaataatgctagctagatattcagtaggcaccctataaacgtttgtcttgacaacaagcagagagaaaaccctgaaaagcttcaagatagtaaggagagggggcggcactggacctctgtttttgttttttgtttttttccccccaggcaagggcctctaaccctggggctacagacgggaatcataaagaaaaaagcggtgagtgggcgaactacaattcccaaaaggccacaaaggggccaccactacgcatgcgtagatccctcccgttagctttggcgcctcagcgagctcttctcgcgcatgcgttctccgaacggtcttcttccgacagcttgctgccctagaccagagttggtggctggacctcctgcgacttccgagttgcgatgctgtacttctctttgttttgggcggctcgggtaagaatggggctccaaacgctgggtaatcagtggaaaggaagctcttctcctaccttagttcctagtcacaaactctggggttctcttggcttttcc

SEQ ID NO: 9839 - DNA, 2300 bp, Homo sapien
tgcagtgatgtttacttgatcataatcagttacattatgataattgatcataatcagttacaggtttctttgtttcttcttcactcccactgcttcacttgactggcctttaaaaaacaatttttttggcctggcgtggtggttcacacctgtaatcccagaactttgggaggccaaggcaggcggatcacctgaggtcaggagttcaagatcagcctgaccaacatggtgaaaccccgtctctactaaaaaatataaaaattagctggacgtggtggtgggcgcctgtaatcccagctactcaggaggctgaggcagggagaattgtttgaacccagaggcagaggttgcagtgagtgaagatcatgccactgcactccagcctgggtgacagaatgagactccgtctcaaaaacaaaaaacaaaaaaaattttttttgaagacagtcttgctctcttgctcaggctggagtgcagtggcttgatcatggctcaccttgaactcccgggctcaagtgaccctcctgcctcaaccttcccagtagctgggactgcatgcacataccaccatgcctaggtaatttaaaatttttccttttgtagagatagggtctcactatgttgaccaggctggtttagaactcctggcctcaagagattctcctgccttggcctcccaaagtgctgggattacaggcatgagccaccatgcccagccaaaaatttttttttaattaaaaaaaaaaacttggcttatcagaatcactgaggagaggtttagttgtgtgacagcataagtgggcaaatgtctactctttgagatccattgaattagaacctctgaagacagaccccacactcatatttatatcatattttctaacccattctgatgctgaggtttgggaacctactcctggaggggttgatgaatcccattcccaagggtttcttccggatgaagtcaggctaaaaggaagatcccttccagtctcaaagatctatagccctggggaaaaaaggagagcccaccgactcctgggacatcaagaggtggacaggtaacaaaatgggacaagtgaacaacaggaggggtgccttcctctgctcccagatgtctgaggagaaagaggagatgccatgtaggaggcaggtctgtgggtcagaggaagaggggaggacaatctgtcacagcgcatgttcacaggaaaagcctcattgaatcctcaccacacagtattttcttgtggctttaccagggaggaaactgaagcccacacaagctaatgcactagtcccagagccggaacttgaattcaggtcttccgacccttctaaaccacggtgctttccagtgttccatagctctttatcttgtgtgggggtctagatctcctggagtctaataatgctagctagatattcagtaggcaccctataaacgtttgtcttgacaacaagcagagagaaaaccctgaaaagcttcaagatagtaaggagagggggcggcactggacctctgtttttgttttttgtttttttccccccaggcaagggcctctaaccctggggctacagacgggaatcataaagaaaaaagcggtgagtgggcgaactacaattcccaaaaggccacaaaggggccaccactacgcatgcgtagatccctcccgttagctttggcgcctcagcgagctcttctcgcgcatgcgttctccgaacggtcttcttccgacagcttgctgccctagaccagagttggtggctggacctcctgcgacttccgagttgcgatgctgtacttctctttgttttgggcggctcgggtaagaatggggctccaaacgctgggtaatcagtggaaaggaagctcttctcctaccttagttcctagtcacaaactctggggttctcttggcttttccatgcacgtggattggggcctcagggagcggacgtgtaactggggaatccccaagacccctgggcgcgcgtggagttaactgcgagcctgtcctcattctggcgatcagacgccccagggcctcgtgaccgcccatttcacgtggcattaggggagaggacagccccggatgccccgcggacccggtgctggcaaatgagcggagttttcggcctggtctcacaagctgagcctttccggccagctctgagccctgcagatgatgcaaccgagcttcactgcttgcatcaggcaggggtcccggcggcagtgagggctggaaggaggtggaacgggtagggggctaagtaaggggaaagggtattggcttactctc

SEQ ID NO: 9840 - DNA, 2300 bp, Homo sapien
ggcgcctgtaatcccagctactcaggaggctgaggcagggagaattgtttgaacccagaggcagaggttgcagtgagtgaagatcatgccactgcactccagcctgggtgacagaatgagactccgtctcaaaaacaaaaaacaaaaaaaattttttttgaagacagtcttgctctcttgctcaggctggagtgcagtggcttgatcatggctcaccttgaactcccgggctcaagtgaccctcctgcctcaaccttcccagtagctgggactgcatgcacataccaccatgcctaggtaatttaaaatttttccttttgtagagatagggtctcactatgttgaccaggctggtttagaactcctggcctcaagagattctcctgccttggcctcccaaagtgctgggattacaggcatgagccaccatgcccagccaaaaatttttttttaattaaaaaaaaaaacttggcttatcagaatcactgaggagaggtttagttgtgtgacagcataagtgggcaaatgtctactctttgagatccattgaattagaacctctgaagacagaccccacactcatatttatatcatattttctaacccattctgatgctgaggtttgggaacctactcctggaggggttgatgaatcccattcccaagggtttcttccggatgaagtcaggctaaaaggaagatcccttccagtctcaaagatctatagccctggggaaaaaaggagagcccaccgactcctgggacatcaagaggtggacaggtaacaaaatgggacaagtgaacaacaggaggggtgccttcctctgctcccagatgtctgaggagaaagaggagatgccatgtaggaggcaggtctgtgggtcagaggaagaggggaggacaatctgtcacagcgcatgttcacaggaaaagcctcattgaatcctcaccacacagtattttcttgtggctttaccagggaggaaactgaagcccacacaagctaatgcactagtcccagagccggaacttgaattcaggtcttccgacccttctaaaccacggtgctttccagtgttccatagctctttatcttgtgtgggggtctagatctcctggagtctaataatgctagctagatattcagtaggcaccctataaacgtttgtcttgacaacaagcagagagaaaaccctgaaaagcttcaagatagtaaggagagggggcggcactggacctctgtttttgttttttgtttttttccccccaggcaagggcctctaaccctggggctacagacgggaatcataaagaaaaaagcggtgagtgggcgaactacaattcccaaaaggccacaaaggggccaccactacgcatgcgtagatccctcccgttagctttggcgcctcagcgagctcttctcgcgcatgcgttctccgaacggtcttcttccgacagcttgctgccctagaccagagttggtggctggacctcctgcgacttccgagttgcgatgctgtacttctctttgttttgggcggctcgggtaagaatggggctccaaacgctgggtaatcagtggaaaggaagctcttctcctaccttagttcctagtcacaaactctggggttctcttggcttttccatgcacgtggattggggcctcagggagcggacgtgtaactggggaatccccaagacccctgggcgcgcgtggagttaactgcgagcctgtcctcattctggcgatcagacgccccagggcctcgtgaccgcccatttcacgtggcattaggggagaggacagccccggatgccccgcggacccggtgctggcaaatgagcggagttttcggcctggtctcacaagctgagcctttccggccagctctgagccctgcagatgatgcaaccgagcttcactgcttgcatcaggcaggggtcccggcggcagtgagggctggaaggaggtggaacgggtagggggctaagtaaggggaaagggtattggcttactctcgggcagatccccacccccaccactcccacacagctcttcctcacggactgctaaaggtctcccctcccacctgcattgctctacaatctgtggcctcagcccttgccaactctgcctcttcccccgctgactggggtatcagtttatggtgccctgcaggaagaccctcttgttcctgtgggtgggaaggttctggaatctcagttgccctctctggagttggggagacataggcttttggaggacaagctttgcagagtggttcatggagtgaggtggt

SEQ ID NO: 9841 - DNA, 2300 bp, Homo sapien
gtcttcttccgacagcttgctgccctagaccagagttggtggctggacctcctgcgacttccgagttgcgatgctgtacttctctttgttttgggcggctcgggtaagaatggggctccaaacgctgggtaatcagtggaaaggaagctcttctcctaccttagttcctagtcacaaactctggggttctcttggcttttccatgcacgtggattggggcctcagggagcggacgtgtaactggggaatccccaagacccctgggcgcgcgtggagttaactgcgagcctgtcctcattctggcgatcagacgccccagggcctcgtgaccgcccatttcacgtggcattaggggagaggacagccccggatgccccgcggacccggtgctggcaaatgagcggagttttcggcctggtctcacaagctgagcctttccggccagctctgagccctgcagatgatgcaaccgagcttcactgcttgcatcaggcaggggtcccggcggcagtgagggctggaaggaggtggaacgggtagggggctaagtaaggggaaagggtattggcttactctcgggcagatccccacccccaccactcccacacagctcttcctcacggactgctaaaggtctcccctcccacctgcattgctctacaatctgtggcctcagcccttgccaactctgcctcttcccccgctgactggggtatcagtttatggtgccctgcaggaagaccctcttgttcctgtgggtgggaaggttctggaatctcagttgccctctctggagttggggagacataggcttttggaggacaagctttgcagagtggttcatggagtgaggtggtgggagatttctgaggtgcggtgcggtgaatggagcaaatcagaaccaccccttggacgttgatctcaagcttggctccagaactggcttttgaaggtggaggtgggggtagtgagaactgaaacaggctggctggacaactggcagcttggtgtggccttagaagcatgagtgagggtggccgggagacgatttgtctggactgttgtgatttcaccctgacttttcctgccttcagcctctgcagagatgtgggcagctggtcaggatggccattcgggctcagcacagcaacgcagcccagactcagactggggaagcaaacaggggctggacaggccaggagagcctgtcggacagtgatcctgagatgtgggagttgctgcagagggagaaggacaggcagtgtcgtggcctggagctcattgcctcagaggtgggacctggggagatgggcaggggttgggccaccatgggtacaggaagtaacaaagttatcttaactgatatttctccaaaaccccctttcacactcaggacctttctttgggctttatcttcctttcttatctccctcaagcaaaggcagtgcaagtccagtttatggggttgggacatttagggagcctccagggtccctacagtttcatctgatcccttccttccttcctcctatgaggaaggaggagcctagaagcacaagtttgagtgggtaggtggcattgaggggccactgctcatggcagatgggtttctgagaatgctgcctctggctttgccccaggcctggtgctgagtgaatggagctttctgcagggagtactcccgctttcagctctggctctggcagggagggactgtgggagtccaggggaaggggctcaataccttctgacattgccccccaccaccccagaacttctgcagccgagctgcgctggaggccctggggtcctgtctgaacaacaagtactcggagggttatcctggcaagaggtgagggctggagggcagtgtcagggatggtgctcccagtgggggaacccacctgtaccttcccagtgttcattgaggagtgaacttcccagtcctttgctgatggttgagagtcctttctctgtgccctcattacccctctcccacggcagatactatgggggagcagaggtggtggatgaaattgagctgctgtgccagcgccgggccttggaagcctttgacctggatcctgcacagtggggagtcaatgtccagccctactccgggtccccagccaacctggccgtctacacagcccttctgcaacctcacgaccggatcatggggctggacctgcccgatgggggccagtgagtatggatgggctggctgatggtcttggcggcaggattggtgtgggaaaggagttatttattgaatacctactgtggaccatacagatgga

SEQ ID NO: 9842 - DNA, 2300 bp, Homo sapien
cgctcgatccgctgagtcccgctgcctttgaccctctgtgcagccagcgcgcggattgggatcctggtgcgggttagcgcttggagtccagtcccagcgggatcccgggccgtgcctaatctgcggctaatgactcctgcggtccctcaccccgctgggccagcgtggcctgagtcctcgtggtgggaaagtgtggggagcgaggagagatgggatccggaacccaaggagtcctgtattccagatcggccccatgggccacgagccagagacgggaaccaaagatggaagggggcttagaaataaattcacagagacagggaccagaagcaggagaagggtcagagagtggcggagaggcggagcggaggcaataatgtaacgttgcatctcggtgagcggggcggaggcccaaggccggagggacagcggcggctctggaaaaggagcgcgacggagaatttgggacctggccggggtcaccggaactcagaacaaagggcacaaggaagcaggcgagggcctgtgagcaaaggcgcaaggaccaggcgccccttccggcgtcctggctccccagctgtgccacagagaaccagatgtgcagcccagttgtgcggccgctcgagtttgagctctgggattgttttttggtcccagagactggagggctggggtgcgcgggtgacaggacacgccctcccttcctgggccctggaggcgcgggctctcgggagggctgggctgctggaggctctaacagcccgtcagccccgctcccccgccccccccacacacatcgcagcgagtctctgtctctttgttctcgccgtgtctctgacactttatctcattatccgccggagtgaggcggagagcccgggaccccgcagcctaattacagccgcgcttgtcagagtagggggcggcggaagtatcagcgagaaggaaagggaggcggaccctagaaagcgccctctccctccctgtaccccgacgatcccagagacgggtgcatagctcgctcccgcccgcgccctccacagggcgggctctggagggggaggtgctctgcaggatcggctgcgaggagggagggggtggtggaggttatcgtgggagtggggagagatattaggactcggttcctacgtccctaagacccaaattccccagagacgggggctgtgagcctccccaccccagcagcacagcacacacctgagatggttgaggacaggagggaatcgcttgcatttctgtgtctgtgtcttgttctctttcagcatctgtccgatctttcctgtttcccccactccattcccttcctatccatcccacagccagaggaagtggatggcctccttgggcggccccacctttaccctaccccaggtaggcagagcaagcaagtctctcaagcctcactgccatgactgtggtagaataaataaactggcgtattctatcctgagccatgattaacatacacctggttcttccagcctccaaccgcaattccagtccaaccacaacctgaagaaaccactcagaacaagaggggctgggggagctttacggtgtgggcctgtcttcctccttcccccactacactgtggaggggacagaaccagggttctcaggacccgctcctggacagctctaagggtgtcagggaagtgctgcacatgccctcactggccttagcccctcctggtcccacctgtgaacattccacacatgcattttgctaagtgcctgtcccatggccatgcctcctcccacatcttatggggtcctatgccactgaggtccttccctcagatgccagaagccccaagaatgatggtgtcccttggtccaggtgcagacatctggaggagagagtcggagagcagaaaccacttggctcccagacaattcccctacaggctttgggcctggaattgaggagaaagtgagctaagttggggtggggtgagtccaaagaagcacgggctgggccaagctaagctgctctgggctgggctgatccctccccactcaggggcgggaccccaggaggagggagaggacagagccactgcagaggaccagactgggaaaacaacgatatggcaggagccagtcttggggcccgcttctaccggcagatcaaaagacatccgggggtgagtcctcagaacctcagaacctctaactcctaactctcctgctgccccaccctccaaatcccccaatgccttgccttgtgcccaggtccctcagcgctcctattcttcccctaaggttgccccagtctc

SEQ ID NO: 9843 - DNA, 2300 bp, Homo sapien
tatgcaaatgttattatttgcatatgcaaatatgcaaatacgccggccctggtcagggcggcaggtggcgaggagcaggaaggtgtggggaagggagcagaaggagacgaggagtttggggacctgagagcggacccagtgagaggcaggctggggtggtcgctggagtggggcaggcgtgtgtggggggggtcttgagctcgatgccgggtgggggagggtcggcttggccagccaggagctcctcttctcgtctgcccgttgtctgccaggaccgaggttggcaccgcctagcaaggttggcagcgggagcccgggcaccatctgctgctggcggggggagggcagaggctcagctgggctggggaagaggaggcctgggacgggcgcgccccccttccagaaggctgaggtgtgatgggggtagggaagcacacaagaagactctgcagaaccgggttcagttttctgttccctttgcccttgacggtcccggatgcctgagggggtgggggcggagtcattaaagaagacccccccctttaatcgcgattgagctggaataggaacagatcacaggcaaacacacacaccaaccacacgcaaatcaagcattctgtccttatccttccttgaaatccacctaccaggaatgtatgaggggagggaccgcgagggctcgggtcgtctctattcatcaaggtctgagggactcaaaatcagagccccccgagatcctcgagagacccccgccaatgctaaggcaaaaccaatttactggctcattgggcggcaatgctggtgtgcggatgccgagaagcagggagagcggctgttctcccccaacactcggggggcgcccccctccctagcctcactgagccggcagctgtccctaattagagcggcggtttaattggatttatcagcagttaataggaaattaagcaaagggcccgagagaaggggggcgggaaaagcggggaaacaggctgtgctgaactagaaggaggggtgctagggtaccaggggtggggacatgtgacccagtgtcccgatcgagccccacggtcacaccctcccgtcattactcaccaagactcttaagccctggcccgcgggccggagagcaggtccccagagagggcggcaggcgtgacagcgaccctatgtgagctcccagcgccctccatccccctaaacggcgcctgggtgatggatgatactgccgcatgctgcaaaggtcataagtctgggccaaggagcagactgaattgaaaacagatccgaggaagggccggtactggggtacaagacaaccggcaccccaacctcctccactgcccactctactcagcgcgcgcgcgcgcgcacacacacacacacgtgccccttgaagttggaagactgggcagcacggggggaaaaggcagagtacagagtgaccctttctataaaccccaccagcagcagtgttggggatcctgagaatctctcggtgcagctccagtgttccctttaggctctccctccacgaaactgcccgatttgggtcagtggggtccgcccggtctgctgctcaggggcagcccaacgtcggcgctacccgccctaggggccagtcaaggaagcttgcagacagctaagccctggtgcacgggcctcctagtccacagccccaggcgcctcctgtcaccaagacctcatcatactgctaggctaacaaggcctgctccggagaccctgacgacctccctgccacattccaccccgcagggcacagatggcaactcctgcatatgctaaggtgtgctagcctctgagtgggtgtgggtgggctctccgtgcccctggcaattatggacgtctgtatctccggcgtgtggttagtgtgtgtccgtttgttccctgggtatgtgaggtgtgtctacctgagccccaggtgtgtccgactctgtgcccgggtgtgtgtctgtgcccctgagtgtgtctatatctgtcgggtttgtccacttccccgtccccagctcccatctgggtgattttgcccgggtgtgcctccgcgtgggggcgtttccgtgcgtctccgcctgcaggtctgtgtatgtgtgaaaatcaggaagagccagcggggagtgtgtgttgccatcgcgtctccgcctgcaggtatgtgtgtctcagtgacagtgcgtaggcgtgtgcctgggtgtgagccgcgcggcggcgtgtatccgaatgacagtgtgacgcacgtgcgcgcgcgagtgtgtgtgtgcgcgcgccggggtgagtctcccgcc

SEQ ID NO: 9844 - DNA, 2300 bp, Homo sapien
ttgtgcctcagtctcccgagtagctgggattacaggcgcgatctagcatgcctggctaatcttttttttttttttttttgctatttttggcagagacagggttttaccatgttgcccaggctggtcttgaactcctgggctcaagtgatctcccgccttggcctcctaaagtgctgggattacaggcatgagccaccactcccagcccagctcgtcttctgaaaaccctttagggatggagaacttgggcctttcttttttttttttttttgagatggagtctcgccctgttgcccaggctggagtgcagtggcgcgatatctcggctcactgcaacctccacctcccgagttcaagcagttctcctgcctcagcctcctgagtagctgtgccccatcgtgcccagctaatttttgtatttttagttgacatggggtttcaccatgttggccaggctggtctcgaactcctgaccttgtgatccacccgcctcggccttccaaagtgctgtgattacaggcgtgagccaccgtgcctggctgcctttctttaatcctaaagctggaggattgggttttacctgtcagggacagaagcagatttttattacaatgaaagctacagcaactgaactcgcagtgccaagatgctgtattatccaaacatgctcagcagtccctgtcctatgtggctgaaaaaagacgaagagcagaagtcatcttgcctgcaagatggagcttttcctttagagcatctcaaagcaagccctgttgttctgcagcctgtcagagcagggccattaaagaacctgcagagtcagaaccatcctgcacccccttttcaaactccccccttaaatagaaaaaagtagtgggtgagaatgacaaagcacgttgccctggaaatctcttgggtccaagtagctgtatccctaacgacgatcctacaggagcttgcctgacccagtctccaacacagtcctttatttcttacagatacaaggaatagagcagcactgcattgccacctctaaattgctctcccctgagatgggagtatctcctctttcatccatgtcacagcccaaagagtagaagggtgcacccctgtgagatgagaatggcatctgtctctttgatccatcagttatatactgaggcatcaaaggtgggagatggaatcagggaatcaaaagggtttaggaagtgtgagggttggccatcctacctttaagagtttgcagttctcatgaggaaggggacattacttagaaatgatttaaaaaattccttatgtggcagctatatgcttctgtccagtgttaactggccctttttaatagccctggtaattcccttcagtctgaggacaaaattttacaagaaggagggtggggagatgtctctgggagctgctggagggaatgaagcaatactacatattcttcactttcttacaggatagcaaagtactcctccaaccacctacagataaaaagcaatctagccatgcacggtggctcacacctgtaatcctagcactttgggaggccaaggcaggcggatcacctgaggtcaggggttcgagaccagcctggccaacatggtgaaaccccatctgtactaaaaatacaaaaattaccttggcgtggtggtgggcgcctgtaatcccagctacttaggaggctgaggcaggagaatcgcttgaacctgggaggttgcagtgagcccggatcgcttcattgcactccagcctgggcaacaagagcaagactctgtctcaaaaaaaaaaaaaaaaaagccatctagtatggctgataggagagctctatgagttcaaattagtctttttttaccctgtctcaaaaaataaatgaaaaataaaaataaactccccttaaatgttaaatgagcatgaacagaaactgtcccttcctgaattcagccattattcacctgttcgccttagatgaagaatcaaggaacagcagctctagggggttgggaggagttagggtccggccctgccccagacctctcagtgtccaatttctctgtgtcagctgtgtttctcagctgtccactttcctccagccctgtcatttcagccctgacaccaaggcaggaggctaggaggtctacaaatagcgactgggtagctggtgtgaacacagggggtactgggggggcttagcccccaaggaagaggaccagtttttccccagcaccaccatcaaggcctcgaggctcccagctccctctacagcctgtggactgacttagggaatcccgaacgtaagt

SEQ ID NO: 9845 - DNA, 2300 bp, Homo sapien
ctaggtgaacaagatctgtcttgggatttggagcaatttcctaaacaaggaaaggaagggaaacttgacttcctgagatgataagaaggaagaatctatttgagccagcctctgagtgggaagggaactatggaacatatttcagattgatacattattgttaaagaacattagcaaaagccacattttcttcatagcagtagcaccttgtgagagaactgaggtataggttcttagctcagaaacccaggattctgattccctgtcccttctttcctgtatctctgggctaggagaatagaaaggttcatttgtttttctcctagttgccctgatcagagctgggatggtggggaggggaagaaagggctaagagagaaaggccaggcttttgaagacattgtatacagacttagtcagctggacacttctctgctgggctgctgtcaagtccttcctgtcctattcctctcacaaccatgtcctctctcctccccttccagtcctggggcgggtgctggaggtgacagatctccctgagggcatcacccgtactgaggcggacaaactcttcacgcagctcgccatgtctggcgccaagatccagtggctcaaggatgctcaggggctgcctggagggggtgggggggacaacagtgggactgctgagaatggccgccactcggacctcgctgccttgtacaccattgtggctgtgttccccagccccctggctgcccaaaatgcctcccttcgtctcaacaactccgtgagtcgcttcaaacttcgaatggccaaaaagaactatgacctgaggatcctggagcgagccagctcccaataaatggaggaggggaaagggactgtcacagaaggagcaagggcagggtggagggggttgaaggatcctgacagaccatggacagaggcaggaagtaaggaaactgatgttaaactggaacctaagacagtgatgaagatggaaacacagatacctacactggcattggactccttcttgctcccctgccatgggtcctctctttttccctggttgaccccccttgcatcactcttcttcccatcctcttctttttttttttttttttttttttgagacggagtttcgctcttgtcaccccagctggagtgcagtagcacgatcttggctaactgcaacctccagctcctgggttcaggtgattctcctgcctcagcctcccaagtagctggcactacagacacgcgccaccatgcccggctaatttttgtatttttagtagagacggagtttcaccatgttggccaggctggcctcaaactcctgacctcaggtgatccacctgccttggccttccagagtgctgggattacaggcgtgagccactgtgcctggcttccatcctcttctatcatttttttaaatctcttctcctatcataaaattaatttctcattttttggtcaggtagaattgggaaagtcccacactgtcctcctattaccttaacatcccaagcttcctttccttttttggtctttatgaatatatttatatggacagaattaagataaacaaaattgattgccccattctctcacttccccatcttgtcttcctagaccccacagagttaaaacttgggattcccctggcccccccagaacacttgtatattgtttgtttgaggttcgtgccgcagtaacagacacagtatttaattgcacatacagatgtttgctgggtatattcactgtaaattttatttaatctgtttttttgtttgtttgggggttatttggggggaggttggttttgtttttaaatataaaaaaaaaaatctgtcactggacatcagtcactgtttctctgttgccgccctggtatgggtaaagggttggaggccctgggtaggtatagccctacagctgttggaggtgtttgtcgtgggttgggatggctttctctagcatacgcacactattttaacaccattccctctgtctcatcctcttccctgtacacggttctgatagatggctagatctctaatgggaccatggctttgggctctcccggttctgccactgtggttcatcgagcatatcacttctcaactctggatctgtgtccagatcagtaaaataagagacttggacttagtaggtgacctctaggtttccttccagactattaattctgtggtactgtgtactcatttagggcccttgtagttgagttttgagatagggtcttgctctgtcacccaggctggagtgcagtggcagatctcagctga

SEQ ID NO: 9846 - DNA, 2300 bp, Homo sapien
attatccataggaggacaatgtagtcaattctgattttacttgtgctctggaataatggtaacattgataatcattgggtagcaaatcctccagatgccatttatattttggtttggggatggctagggtgatatttatttatttatttttatttttatttttatttttttgagacagagtctccctctgtcgcccaggctggagtgcagtggcacgatcttggctcactgcaaccttcgcctcccgagttcaagcgattttcttgcctcagccacctgagtagctgggactacaggcacatgccaccacacctggctaatttttgtatttttgtagaggtgtttagttttactatgttggccaggctggtcttgaacttctaacctcaggtgatctacccacctcaacctcccaaagtgctgggattacagatgtgagccactgcgcctggcctggttttttttttttttaataatgcagatttgcctctaattattagactatctttgcctttaaactcttgtactggtagcaaaaagacatagtccataaaaatgataattgataagaaaaggcaaacaggattaaaaaataatatttgggcatatttactgagattctggaaaattcagccctgactgcccttacctggaatttattttccttaataaaacctgctatattttgatcaggacattcagtaaatacctattgatgatagatggcttttcagtgtaatattgatgtaatactatggcccagattctttcttctgtcattctgatgaggaattttgggatctagcacatcaaggtcattctggattttatgttaaaaccctggaagtttgattttgctttcctattcttttttctcctggttaggttgtggacttctgcttaggattagatagcatgcaaagcagtttcatgtattttaatttcttttgttgtggtggttctagactccagccaggaatatacggactccactggaatagacctacatgaatttcttgtaaatacactgaaaaagaacccaaggtaataacatgatgggtataagaggaaaaggggttaggggatagcaagattccaagaggccaaacggcttcccagaatttttccattcttagaatctaggatgctcatcttcctgtccccctagtatttgtcaggtatagttttatattctgtgagggattcaaaatactctcacattgaggtttctgttttcagaagaattgggaaaacttctgtgaaagaagaatgcagaaacaaagaaatatgaagtcttgggagtatactgattaaaaagcacacattgggagtgatagtaagaagagctaaaataaaaagcacagaaggaaaaaataattgatttgtacataagctaaattataattcctttaaaattgtttataacaagatggaatacagaatgacgattagatttataacgtgtgtttatatgaatatgttgttaacagtgagatttctgatatggtataacaaagtatatgattggaggacctgcaaaatgtatactcgggttgtttttctttttaaaaatattgtaaaacaggcaagtgaggcttagcagcattatggttcattactgggtttggatatatacctttttcagcttctgtaatgagcaagttgtgttttcaatccccactttcaatgtctatgggagggctgctttttgttttgttttgttttgttttaatcttttttaaacagggacagaatgatgctgctaaaattagaacaggagattctggaatttattaatgacaacaagtaagttacttgcatgaaatatataattagaggtgggagggggcactggaaataaatttaggtacaattttaggagatgttccccttgaagtgtgatttttgaaaacatactgaagtttttaagttattatgtagatttgagttgaaaaataatttatatcttttcagcagcttgcacttgtcccagattttactgttcttaaatgtcttcctttttctttgtcaaacatcatccaggtgggtgggacctagggcttaataagtagtcttttttttgagacagtctttctttgtcgcctaggctggagcgccgtggtacagtcttgactcactgcaattctgcctcctgggttcaagtgattcttgtgcctcagccattgagtagctgggatgacaggcacatgcctagctaatttttgtattttttgtagagacggggtttcaccatgttgaccaggctggtcttgaactcctgaactcaattgatccgcctg

SEQ ID NO: 9847 - DNA, 2300 bp, Homo sapien
accaacaagaatacccgacaactttgtatcagtctactccctgtctccttcttttttgcccttaaaaatgtgcttgtaggctgggcgtgatggctcacgtctgtaattccagcactttgggaggctgaagtgggcagttcacttgaggtcaggagttcgagacgagcctggccagcatggtgataccccatctgtactaaaaataccaaagaaaaataaaaaaataaataaaataaaaataagccgggcgtggtggcacatgcctgtagtcccagctacctgagaggctgaggcaggagaatcacttgaacccgggaggtggaggttgcagtgagctgagatcatgccactgcactccagcctgggcgacagagcaagactccgtctcaaaaaaaataaaaaaaaatctggaactttggtttcattattgtgcctcaggtttcctcatctataaaacaggtataataatagtacctattgtattgaggatttgatactaacaatagatgtagaatgctacacattttatattgtacttacatacacataatacaaatattagctattatttcctactggtcatcactgcctggtctggaactcctgagctcaaatgatccacctgccttggcctcccaaagtgctaggtgtgagccactgcgcccggccaagacaaaaagtttaaatcgtggtgaaaagtggcaggttagatcagttcagttcagttgtatttttcttcccccgttgttgttctctagagggttgagagaatttgggggcaggaggcagtgatgaccaggagagagggctgggcaaggtggctcacacctgtaatcccagaactttggaaggccgaggcgggtggatcacctgaggccaggagttcgagattagcctggccaacatggcaaaaccccgtctctactaaaaatacaaaaaatagccgggtgtgatggtgcgtgcctgtagtcccagctactccggacgctgaggcaggagaatcacttgaacctgagaggtgaaggttgtagtgaaccgacattgcaccactgcaatctagttgcctgggtgacaaagcgagaccccatctcaaaataaataaaacaaacaaacaaacaaacaaaaaacgccaaccaacctggaacttgctcatccttgaaggaaagatgaacttcatgcctctatgactttgctggaatctccattcttacctctctagtgaactatttatagtctcaagattagctggagtttcacctgtagtttctctgtaacttactcaatctcttttaccgctaagaacgaattgctgttccttgtgtttccatagcacatttaaacctttctattatagcacttaaattgtactataattatttgactttttttgcctaccgcagtttctgtcacaaggtaaatatttaatggtcgaattctacaaaagactacattgcttctttgagggagtttggtcagtaaattatccacacacacataatcaataactaaattgattctgcctagaatggacaaaacgggggaggctggacatttaagacgatttttgagaactgtatcttagagaggggatgatggtaagaatgtgatcttaataggacagactgagttcctcctaggtcggtttttttcatctttacgtaaaatggacatttacctgctcaactatagttatccacgtatgcaacaaataccgagtgtacgttcttttggtacaggagttactgccctaagtgaaagtgctctgtaaatggaaattactttagaatgatcactattagtattatattgaaatccagggtattctatctgacagacttgaagggtttaaggaggaccgaggctcccagtgactccggattggtgtcctgacacaggtaacgcggaaggaggagagggcgagcgagcgagtgcgagtgcgcgcgcgccggcgggagtgcgtgcggcaggcggtaggccccgcagggctgctgaggggcacgcgggaagccaggaagcagggacggccggaacgcaggacgaggtgacgacaacgccggacgtagtgacgtagcgcgcagccgcagcggggggcggactctgggcttttcttccccttctgattttcccctccccccttttctccctttccgggtttggttccccccttttcttcccctctcccccctccttcccaagcccctttcccctcccccgtcccagtcccccctgcttcccagccctcggccccggggaagccccggccgagaaaagcccgcccccagaagcgcgccgccgccggc

SEQ ID NO: 9848 - DNA, 2300 bp, Homo sapien
tacctgttttatagatgaggaaacctgaggcacaataatgaaaccaaagttccagatttttttttattttttttgagacggagtcttgctctgtcgcccaggctggagtgcagtggcatgatctcagctcactgcaacctccacctcccgggttcaagtgattctcctgcctcagcctctcaggtagctgggactacaggcatgtgccaccacgcccggcttatttttattttatttatttttttatttttctttggtatttttagtacagatggggtatcaccatgctggccaggctcgtctcgaactcctgacctcaagtgaactgcccacttcagcctcccaaagtgctggaattacagacgtgagccatcacgcccagcctacaagcacatttttaagggcaaaaaagaaggagacagggagtagactgatacaaagttgtcgggtattcttgttggtttacagaaataacattgattagtgattggctatagattgttaagctataggatctaggttatagtgtccagtgcagcattattatgttaatttatagttacttgtggcaatagcaagcaatttcaagagatgaatacatagctcaaaagcaggaagtaggacatgattgccctctcattttatttatttattttttatttatttttttgagacaggctctcactctatttcccaggcaggtgtgcagcagtacaattacagctcactgcaccttcaacctcctgggctcaaatgatcctccagtctcagcctcctgagtagctgggactacaggaacacaccaccactcccagctttttttaaattttattttatttatttattttttattttagtatggatagggtctggctatgttgcccagtctggtcttgaactcgtgagttcaaatgatttgcccgctttggcctcctaaagtgctgggattataggcttgagccgccatgcctggtctgctgtctcattttaatgtctctctgagcctgataatcttcaaagacttgcatttcccagattaaaattgttttattttctcagtgccatgacacagaatgaaagcctgaaatgtttctgagacaagtgcaagaactgaagaacaacaaccaagaatacctggatttaaaacctatactcctggccaggcacggtggctcacgcctgtaatcccagcatgttgggaggccgaggcgggtggatcacaaggtcaggagttcaagaccagcctgaacaacatggtgaaaccccgtctctactaaaaatacaaaaattaaccaggcatggtggcacgcacctgtaatcccagctacttaggaggctgaggcaggagaactgctagaacccgggaggcagaggttgcagtgagctgaaattatgccactgcactccagcctgggcgacagagtgagacgccatctcaaaagaaaaaaaaaaaaagggaatctcaaaacttcttttccaagacagaaaaaaaccccaaagggtgagcaaatctggaactcaagccctttccccaccttaggagttccctctgagagcatcaaagacatggctagaacactgtgcctcccttcccttaaccttcagacttcatagttttgagacctcttgggcaaaactcaaccagggctaacaaataaggctggattgagaaccccaggagggaggatggagggatggggatgggctttgagaaacaccaggcaaaaaagaatgcaactctcaattgttcatgcgtgacagtgagctaaagtgccttgccaatgaccccttcttgtttgagagtctccctttaacattctttcccaaaacctgtgatctgtccctttccaccatccccaggattcccagcaagggtagagatctgaggaggaatttaatctctcacctttgaaccccaggcctggcagctcacatggataacaactgtctcccaacattggcccagggacgtgtctttccctaaacaaaccaacctctcctcacatcccccactctgtactttcactgactatgcgttggcagattctgccaagttctacctgtaactggcttcattttcaagtcagacgtttggctgctgctctgtcccctgcaacaaggagccatgccagctggacacacacttcttccagggcctctggcagccaggacagagttgagaccacagctgttgagaccctgagccctgagtctgtattgctcaagaagggccttccccagcaatgacctcctcattgcttctggcctttctcctcctggctccaaccacagtggccact

SEQ ID NO: 9849 - DNA, 2300 bp, Homo sapien
agacacatttccaaatcacacccacttcccccacagctttctccccatcaagcttcttggagaaattggggcataaggagaaaagctagcatgaggcccaccttcatgaattcaatgtggaggggtctgggtccccccccatttaaagccagtgaggactgggtgtggtggctcatgtctataatcctagcgccttgggacgctgaggtgagaggatcgcttgagcccaggagcttgagaccaccctgggcaacacagcaagaccctgtctctacaaaagaataaaaaataaattagcctgtgtggtgtggtgtggtgtggttggtgtggtggcacgcacctgtagacttagctactctggaagctgaggtggaagaatcacttaacccaggaggtcaaggctgcagtgagctgtgatcaggccaccacactccagcctggatgacagagtaagaccctgtctcaaaaacataaaaaataaaataaaaaataggtcaggtgcggtggctcatgcctgtaatcccagcactttgggaggccgaggcgggcagatcatgaggtcgggagatggagaccatcctggctaacacagtgaaaccccgtctctactaaaaatgcaaaaaactagccgggcgtggtggctggcacctgtagtcccagcgactcgggaggctgaggcagaagaatggtgtgaacccgggaggtggagcttgcagtgagccgagattgtgccactgcactccagcctgggcgacagagcgagactcagcctcaaaaaataaaataaaataaaataaaataaagacagtgagaaaatgtggtcaggagggctgagactgggaaccaagactgctgtatttgccttgctttgttgtcaaaagctcttagagctcccattttctacccccattaacaggcctgaagggtggtgcggtggctcacgcctgtaacctcagcactttaggaggctgaggcaagtggattgcttgagcccaggagttcaagaccagcctgggcaacatagcgagaccctgtctctgtgggaaatttaaaaattagccaggtgtggtggtgcgcacctgtagtcccaactactaaggaggctgaggcagaaggattgtctgagcccaggaattcaaggctgcagtgagctatgattgtgccactacactccagcctgaacaacagattgagaccttacctcagtaaaataaaataaaatttaaattttaaaaatgtaagaaaaaaaggaggcctggcactacttctaggatgccccaaatttaggcaactctcacagtcccttgaaagagaagtggcagctgggtataggccctcccaagtgtcatgccccctgacagtcctgatggactctgccctgtgtaagattgcatcaccaccaccaccacctctctgggcttccccagacatcacaggaacacgttccccgccccaacccccgccggctctggccctcctccacatcatgctccacatcatgctccaggccaactggactctgggcggccagcacaggcagggtcagggggtgacttctgtgcctcgtggcactgccacctgggcctgagcaagagggctccattctcctacccgcccaaaccctcatccctgtcctagccccagtgctagaaataaagagaccagaattttccttctggcctaagggccccagaggaatacccactggaactcacagctgcctcatggaaactgctgcagcagtggtgaagctagaaagactagaggtatgagggaaaattgcccttccccacctggctcataaggcgttccctcccccaagtcccagaccttggggactgagcatgtgaaatcatcctctttcttgcatcatgcgtgtccacattgcacccccccacccccatacccctacttcaggcccagtcaccatggccagatggtgaaacctgagctgatggggaggaggacctccaccccctgcaggggcctgatgggcagcacagctggccaatcctgggactcagagggtaggtcggctggctgaccactaggtttggaagacccaggcagctggctctaaagaggccccaggtcagtagccagacatgagctgtgagggtcaagcacagctatccatcagatgatctactttcagccttcctgagtcccagacaatagaagacaggtggctgtacccttggccaagggtaggtgtggcagtggtgtctgctgtcactgtgccctcattggcccccagcaatcagactcaacagacggagcaactgccatccgaggctcct

SEQ ID NO: 9850 - DNA, 2300 bp, Homo sapien
gttttaatttctaatgtggtgaattgatagatgtaaatcatatgaacaaaagctcaatgatttttttttttttgagacggagtctcgctctgtcgcccaggctggagtgcagtggcacaatctcggctcactgcaacctccacctcccaggttcaagcgattctcctgcctcagcctcctgagtagctgggactacaggcctgcgccaccatgcccagctattttttgtatttttagtagagatggggtttcaccatgttggccaggctggtctcggactcctgacttgaggtgatccgcctgccttggcctcccaaagtgctgggattacaggtctgagccactgtgcctaacctaatgacttttaagagtatagaggaaaccaaaaagtttgagactcactggtctatagaactgggtggggagaagaaagtaaggtgttctaagagagctcttcttgctgggcaccggtggtcccagctacttaggaggctaaggccggaagaccgcttaaacccaggagttcgaggctatgatcacacttgtgaatagcctctgcactccagcctgggcaaatagtgaggccccgtcccaaataaaaataaataaatacataaatacataaatagctcctctggaagaaggggctcgaggctgggacaggagcatgtgtggggtgcctttttttcagtgcccattagtctggtctgactgagctgggtctctgaccctctggggataactagcctgggtcaaagtcccagatctccccctaccttcaccttttcttttcccccttgaccctcagactgaacagttaacccactgaccttccacacccaagggggtggttcttggaagcagagctaggatgtgggaggtctgcctgtggggttgaaaaaaaggggagagggtgccctttttccttgtcatgcttcctcctctttctcataaaaatcagagactgaaatgctgcccctcccttatatccggtcacgatggcaatgcaaatctaaagaggcagggcacttccctgtcaggcagtaccgctgggcatagcaacctctgcctctccgtttctcagagctcacatatccacctcctgggcttttaagtgggctttagtgaggggctcctccttcaactgggctcctccttcagttccccagctcttctgcttcgactccgagcgggtgtcatgtgtgagaacggccagcagagggagcagaaagcctggaagagcagctagagcctgcagtgacgtggtgcggaggggcggcaccctccagaacttcgagacgtagagccggggttctagggaaaggggcttcagtcccagggctccttggtgacctcgtgaaccacaccctgcacccagagcctcagccgctgctccttgcttttatgctccatagactcctcaccttcttccagagcccccaacccaacttgatttgccccaaaccgcaactctgtcccggccgctgcaagttccatccaaagggtgaggcctgcagataaaccacaggatggcagaatgctcagttagcaccaaccaaaggcgactaccctacctccactattatcgttctcggttgaacttctccccctgccccgcaatattttcctcaatctggttgtcggggcctctttggggccagccgatccagaaatccaagccgggatttagtactcaccaacagcagcgtgttcagccggggcgggggggggggcgtaagcagtatagggtccctcaagggagggggaggatcctgggggtcctgggggtgcaataagcccggcaccccttctcttgcttccagctaccccgcctcatcctccagaacggcaagagggagggaaatagaagggaggtgaggggcgagcgggaagagcggcggcgcgccagcggctggagagagaaaaagtttttgcaaaagggaaaaaaaaagtttgcgcttctcgcgggtggtccgggcttgcggcccggcgggctgggccggcgggagggctgggggccaggttgggggggtgggggtggcatcgaggctgcgctgccgtggccctctccgccccccctccccaccgcacaccccccagcccagactccagccctggaccgcgcatcccgagcccagcgcccagacagaggtgagaagggggggcaggcgggggaccacctgggagcagtgggggagggggcctgaggggatgctcagcttcttagggactcatcccagacccgggacatagaggcaaaataggggtgggagagcctggggtgagacattagaaactcc

SEQ ID NO: 9851 - DNA, 2300 bp, Homo sapien
cactctccagtagtgcccccctgggcgccactgcctgctttccggatgtgctgagaggaggagggaagaatgtggcccgcccctcagcccccacccctatggctcgctctactgggctcccggggcgggtggggggagcggagccgtctgcagccagtgcctgcggcggcgacttgggtgggccgaggaggcacgggggcggggaaggcgggaccgggagtaggggggcggagccgactcctgggagttggggagcgggggtgcgagggggacgctggaaaacagggagacaccgaagatggtttagggctccggcaggggaaccctagagctccctgtcccatcccgaactctcacaccccagaaaaactttaccgaagctaaaaaagttggcgacattttccttttactagcctgaaggggagatatgggtgggctgtggaacgcgtgggcgaggaggggtgtagccccatttccttggaggctcttcggcagctaggcagtggggcagaaagatgactgagtaggcaagtttgggggagtctctagtgtttgggggatcatttgcaaacttccctccttcccctgggtgagtcatagagggaaggaggcgggagaattgtccccccatccagctgccaaccagctgtgccccccgccccccaacattagttccaaggtcgagttgggaggtcttggatgcgggatccgcacctcggttggaaaaggaggagttagaaaagggtacagcccaggctgccgggccgggctgggtcgcggggtccgggttccgctccccatctcaccccgccctcaccctaaatcccagcatcccgggatcacccaccgcgccggccggcccggcccgctcccggtggttctccaccccatcccgccccaccccaccctcattcccgggagactggaaaacccgggatggagtcaaaactggagtttgaaaagaaaaacggacagcagcaccttcttcctcgctacgcttttataaggatcacattgtttttttcattctctcagagtctcccctcatacttcctttcctgttcccccaaaacagagaccaaaaagattaggtgggcctgatttaaactaccccagaataacaccagctttcacctttgtgcccaacagacccagaagactcccctcaggaaccttacctcctcctccacactgttttctgtctaagagggcagatggcttgtgctccctcctggccccacctggctctgtgtcgggactgtggctagggctccctctgctggacactgcagagattgtacacgggctgtccctggggaggggcacgagaaggaagggggaacgggctctagcagagccgcccagtgcttgaagtcagatccatcacacgagttctcccatcccaccctcaaagccggcccagggttacagcaagaagaattagagggtccatgttactaaaatcacttgaagttaatataggcacaattagtccaaaacatgccttctacacacagaccacacaggcaaagctcccacccaggcaaagctcccacccagttcccaagaagatccccagagtacacagactacaagactgcctctgcctctctgggacatcatttccccttacccctcccctcactcagcgagtgatgctttttttgttttgagacggagtctagctctgtcacccaggctggagtgcagtggcaccatctcggctcactgaaacctccgcctcccaggttcaagcgattcttctgcctcagccttccgagtagctgggattacaggcacccgccatcatgactggctaatttttgtttttttgtagagacgggggtttcaccatgttggccaggctggtcttcaactgacctcaggtgatcctcccgcctcagcctctcaaagcgttggaattacaggcgtgagccactgtgcccggctcagtgatgctcttttcaactcgaattccgtggcagatgtcttagaggggtgggggataccagggatgttctgcccaggattctgtgcctgagactgctgtctgacagtctctatttcctccacctttatacctaccttccctttctgcagtgtccccacaccctcctctgagacgccatgttcaactcgatgaccccaccaccaatcagtagctatggcgagccctgctgtctccggcccctccccagtcagggggcccccagtgtggggacagaaggtcagtgtatataccaatccctgggccttgaggatttggcagatctcccacttgggcccacccccaccccatg

SEQ ID NO: 9852 - DNA, 2300 bp, Homo sapien
tctcccactttgtctttctctctgatttggtcttggtatttatttggctttctgtttctctgtcaccatgtctctctgagtctgcacaggaagcacgcagctatggtctgaggtgactggtaacggaaacattgatgcttgcataaatttaataaagaataacacacatttttgtctttgtcattaaccttgtgtctccctgtttctgtcttgaacctgattctttcttcttatctccttcctgtgtccacctcaagactcccaccactacccaggaccaactcctgctcctgaatcttctgatgggccccacaaggtacttggaggaaaactactggcctaggtcatctcctctaatttcctgccttgctggccatgcagccctgctgaccacatcctctctcatgttacttacatacttcctcaccagacaccaccaggagttctcagcccccaaaacctgtcaccgatcctcaccaggctgtttgctctaccctctcccccaactcaagggctcccgtcctcacctccctgcaacactgctcctagaaccatgtctgtctacctggagacagccaggcctattcccttctgggtctccagtgtccctttttctcacaggtgacagtgctggctacaatgctatccagccggtggtggccaagttcctgggggatcctagggctgggcccccgaagccctcctcggggatcccagctctgtgccctctatgcctttacttatactggggcagatggccagcaggtgtctctggctgaaggggataggttcctactgcttcgaaagaccaactccgactggtggttggcaagacgcctagaagctccctccacctctcgacccatcttcgtcccagcagcctatatgatagaggaatccatcccttcccagagtccaactaccgtcatccccggccaattgctctggactcctggtgagtaagcgctaagccctctcccttcaccttcctacctcccatcaccttcctacctccctggcttctgggaattttggggaggtccccctccctcaagcttctgctaaccatcttctcttgtttttctttgatcagcctacctcttgcccccgccatggcatcctcatcccactgcctgtcctcctagtcctaaggcttctaggtctcatgccattttccacatcctccctctgcccttcttgtcttccctgtgagttcccaagatgagggacccagttacaacaacacctctgatcacctgccacccaccctccccttttctgtttccagggccgaagttgtttcatggttccctggaggagttgtctcaggccctcccaagcagggctcaggctagctcggagcagcctcctccacttccccgcaaaatgtgtaggagcgtcagcactgacaatctgagccccagccttctgaagcctttccaggaaggaccaagcggaagatccctctcccaggaagacttgccgtcagaagccagtgccagcacagtgagtcacagctcttctgagctgggccctgttctaggcacaggacagacagcacctctgtcttcaggggactcccctggggatgacaaacacaaaaacaaataaataagataacgcttggtactactgataagtctaaaggcaagttaatgtggtggagagtggctgaggtggtgcggggagacatctgtgaggtcacggcattcagttgactctgagcaaggaggagaaagaggcagccgagaggcaaactgggtaggaggtgagaagggacagtaggtaccaaaggccctgaggggacagggcacagggcgcagtggaggcactgaaaggccagccctgtgctcttccttcctccagactcctagcccagggcagggtttttctgtgttctgcttgcctgataggctacagcaggtctcctctagagatgtgacttgcccagcccttccctctctttcttaaccgtgggtggaaaggggctcctcttcccttctgtagacccttctctgtcttcttttaccttgcaggatgtgagggtggggcacccccttcaacattccccccaccccacaaaaagcctgttcccctttcctgtggccctgaggtgggggtggggtgggggaggcgggaagttggcaacaggaagtgaggagaagagcaaagaaaactgtgagagagagaatttttaaaaagcagctggggcctgaggtttctcccccagtaccctgggtcacctcagcccagagctggcggtgagaagacaatgggggagggagcaggaggtgggaagg

SEQ ID NO: 9853 - DNA, 2300 bp, Homo sapien
aggtaaggcagaagcagaagtgtgggttttaaagtgctggtaatccagggaaggtcacttcccaccttccaccaaggagaagctggcatcagtcccctatctacctgtcatagcgtcttgcattacttgtccattgttcctgattcaattgtaattattaagtttattgtgtcattagttaaggtctgtctctccttaagctccaaaagggctcattcccttctctcatctccagtgcctgacactgctccttgcacgcaggaggcactcaatcaatccttgataaaagcataaatgaggccgggcgcagtggctcacacctgtaatcccagcactttgggaggctgaggcgggtgaatcacctgaggtcaggagttctagaccagcctggccaacatggtgaaaccctgtctctactaaaaataaaaaaactagccaggtgtggtgacaggcacctgtaatcccagctactcgggggactgagacaggagaatcacttgaacccggggggcggaagttgcagtgacccgagatctcgccatcacactccagcctgggggacaagaacgagacttcgtctcaaaaaaaaaaaagcatgaatgaacccacacactaaagtagctcctgcctcaagaggcttgtgtgtacaggacagtatcaaggcttctcagctcccaaaatcgtgtcctggattgggagggtggtgatatttcaactctgaatccctctgtgtttctcccactttgtctttctctctgatttggtcttggtatttatttggctttctgtttctctgtcaccatgtctctctgagtctgcacaggaagcacgcagctatggtctgaggtgactggtaacggaaacattgatgcttgcataaatttaataaagaataacacacatttttgtctttgtcattaaccttgtgtctccctgtttctgtcttgaacctgattctttcttcttatctccttcctgtgtccacctcaagactcccaccactacccaggaccaactcctgctcctgaatcttctgatgggccccacaaggtacttggaggaaaactactggcctaggtcatctcctctaatttcctgccttgctggccatgcagccctgctgaccacatcctctctcatgttacttacatacttcctcaccagacaccaccaggagttctcagcccccaaaacctgtcaccgatcctcaccaggctgtttgctctaccctctcccccaactcaagggctcccgtcctcacctccctgcaacactgctcctagaaccatgtctgtctacctggagacagccaggcctattcccttctgggtctccagtgtccctttttctcacaggtgacagtgctggctacaatgctatccagccggtggtggccaagttcctgggggatcctagggctgggcccccgaagccctcctcggggatcccagctctgtgccctctatgcctttacttatactggggcagatggccagcaggtgtctctggctgaaggggataggttcctactgcttcgaaagaccaactccgactggtggttggcaagacgcctagaagctccctccacctctcgacccatcttcgtcccagcagcctatatgatagaggaatccatcccttcccagagtccaactaccgtcatccccggccaattgctctggactcctggtgagtaagcgctaagccctctcccttcaccttcctacctcccatcaccttcctacctccctggcttctgggaattttggggaggtccccctccctcaagcttctgctaaccatcttctcttgtttttctttgatcagcctacctcttgcccccgccatggcatcctcatcccactgcctgtcctcctagtcctaaggcttctaggtctcatgccattttccacatcctccctctgcccttcttgtcttccctgtgagttcccaagatgagggacccagttacaacaacacctctgatcacctgccacccaccctccccttttctgtttccagggccgaagttgtttcatggttccctggaggagttgtctcaggccctcccaagcagggctcaggctagctcggagcagcctcctccacttccccgcaaaatgtgtaggagcgtcagcactgacaatctgagccccagccttctgaagcctttccaggaaggaccaagcggaagatccctctcccaggaagacttgccgtcagaagccagtgccagcacagtgagtcacagctcttctgagctgggccctgttctaggcacaggacagacagcacctctg

SEQ ID NO: 9854 - DNA, 2300 bp, Homo sapien
ctgctactgagatgtcaagcaacataaggattgcataaggactgcaggatgctcaggcaaggtcgggggtgactctattgaggagtgactttgaaaaggtggcggagtgaggggacaggaaatggagatcccctctacagtgtaggcaactcaagaagttcgactgtaaaaagaaagagagaggctggactcggtggcttacgcctgtaatcccagcactttgggaggctgaggtgggcagatcacgaggtcaggagttcgagaccagcctggccaacatagtgaaaccctgtctgtactaaaaatacaaaaaaaaatagcgggcatagtggcaggcgcctctaatcccagctacttaggaggctgaggcaggagaatcacttaaacctggaaagcggaggttgcagtgagcagagattgtgccaccgcactccagcccaggcaacagtgcaagactctgtctcaaaaaaaaaagagaagaagaaagagagagagacatatatatggtggtacctggaaagcccagtaaggggaggtttgtctaaagatgggagagacttggatatgtttaaaagtgaatgcgacgaagctaacaaaaacaagctaaagtataggagagagagtttcagagaaggcaaaaaaagggtggattcaagcactgaacaccaaatgaataaataagtgaataaatgggtgaaattagtcactattttggaagtgggaaggaagagttgaggggtaggattctccatgtgttgaagtgaagtaaactaggaagatcactgaggcagaagcccagtactagccacccagccctcaggggaagagagctggctctctgatatcaccagtggggagggtcattcgctccttaacccacctctccaaacccaaacagaaagcctcacattgtgcagtggagaagctgagagaagaggaaaagaggagtggccaggtaaggcagaagcagaagtgtgggttttaaagtgctggtaatccagggaaggtcacttcccaccttccaccaaggagaagctggcatcagtcccctatctacctgtcatagcgtcttgcattacttgtccattgttcctgattcaattgtaattattaagtttattgtgtcattagttaaggtctgtctctccttaagctccaaaagggctcattcccttctctcatctccagtgcctgacactgctccttgcacgcaggaggcactcaatcaatccttgataaaagcataaatgaggccgggcgcagtggctcacacctgtaatcccagcactttgggaggctgaggcgggtgaatcacctgaggtcaggagttctagaccagcctggccaacatggtgaaaccctgtctctactaaaaataaaaaaactagccaggtgtggtgacaggcacctgtaatcccagctactcgggggactgagacaggagaatcacttgaacccggggggcggaagttgcagtgacccgagatctcgccatcacactccagcctgggggacaagaacgagacttcgtctcaaaaaaaaaaaagcatgaatgaacccacacactaaagtagctcctgcctcaagaggcttgtgtgtacaggacagtatcaaggcttctcagctcccaaaatcgtgtcctggattgggagggtggtgatatttcaactctgaatccctctgtgtttctcccactttgtctttctctctgatttggtcttggtatttatttggctttctgtttctctgtcaccatgtctctctgagtctgcacaggaagcacgcagctatggtctgaggtgactggtaacggaaacattgatgcttgcataaatttaataaagaataacacacatttttgtctttgtcattaaccttgtgtctccctgtttctgtcttgaacctgattctttcttcttatctccttcctgtgtccacctcaagactcccaccactacccaggaccaactcctgctcctgaatcttctgatgggccccacaaggtacttggaggaaaactactggcctaggtcatctcctctaatttcctgccttgctggccatgcagccctgctgaccacatcctctctcatgttacttacatacttcctcaccagacaccaccaggagttctcagcccccaaaacctgtcaccgatcctcaccaggctgtttgctctaccctctcccccaactcaagggctcccgtcctcacctccctgcaacactgctcctagaaccatgtctgtctacctggagacagccaggcctattcccttctgggtctccagtgtccctttt

SEQ ID NO: 9855 - DNA, 2300 bp, Homo sapien
acctcggcctcccaaagtgctaggattacaggcatgaaccaccacgcccagcctcttggctagttttaaaaactatttttggccaggagcagtggctcatgcctgtaatcccagcgctttgggaggccaaggcaggtgtatcacctgagttcaggagtttgagaccagcctggccaacatgatgaaaccccgtctttactaaaaatacaaaaattagccgggcatggtggcaggtgtctgtaatcccggctactagggaggctgaggcaggagaatcgcttgaacccaggaggcggaggttgcagtgagccaagaccacaccattgcactccagcctgggcaataagagtaagactccatctgaaaaaaaaaaaaaacaaaaaaactattttttttatgttggccaggcagtcttgaattcctgggctcaagtgatccagctgcccaaagcacagggattacaggcataagttactgggcctggcctagttttttgtttgtttgttttgttgttgttaatgtaacaacagccattttattatagtttaacaattgtataggtatggagcagaaatttgggtaggccttaggtgggtgattcttctatctcatgtggccttgagaccctaccaagggttacttaagagttttcagtgggcagatgggctggtctggaaggcttcactcacaagtctggcaccttggtaaggatgactggaatgctgggattagctggagttgtcagacagaatatctacatgagacctctctagcatggcagctcaaagtggtaggatttcttacatggcagctcaaagctaccagtgtgctagatagcctgcaactgaagctgcaaaacttcttatggcctagcttcaaaaggcccagaacctccatagaattttctgagatcaaatataaagtgcttaaaacagtgcctagctcataagtactattagatattaattattcttaaaataatataaagatgaataagaagcgtccctttctcaataacaggtatgtgcttccttgcataatatatacttattgccaaactcttagccatcttgaatctcaatttttttttttttgagacgaagtcttgctctattgtgcaggctggagtgtagaggcacgatctcggctcactgcaacctctgcctcctgggttcaagtgattctcctggctcagcctcctgagtagctgggatgacaggcgtgcaccaccacacccagctaatttttgtattttcactaaagaaggggtttcaccacgttggccaggctggtcccaaactcctgacctcaagtcatctgctcgcctcggcctcccaacgtgctggggttacaggcgtgagccaccgcgcccggccttacttctcaatttcatcttttccctagagatgtttggccgggcgcggctgcacgcctgtaatcccagcactttgggaggctgaggcgggcggatcacgaggtcgggggatcgagaccatcctggctaacacggtgaaaccccgtctctactaaaaatacaaaaaattagccgagcgtggtggcgggcacctgtagttccagctactcgggaggctgaggcaggagaatggcgtgaaccccgggggacggaggttgcagtgagccgagatcgcgccactgcagtccagactggggggcagagcaagactccgtctcaaagaaaaaaaaaaaaaagagatgctcttctacccctttgatgagacgtcgagctgtatatgaactcagactggtattaatattttacttgtctacattcttttttttcgagacggagtttcctcttgttgcccaggctggagtgcaatggcgcggtctcggctcactgcaacctccgcttcccgggttcaggcgattttttttgcctcagtctcccgggtagctgggattacaggcgcctgccaccatgcccagctaattttgtatttttagtagagacggggtttcagcatgttggccaggctggtctcgaactgctgacctcaggtgatccgcccgcctcgactccccaaagtgctggattacatgcataagccaccgcgcccggcctatgtacatttttgttgttgttgttgataggatggatatgtacactaacttccactttgtcactaattccgcacatggtaactccgaactctaaaactctgaccgttaagagcttgcatcgagagccactgcgagtagctgctgttatgacatggccatttcattctccacaacaagagaagcagccgcggcttcagtcaccgccctccagcagcgta

SEQ ID NO: 9856 - DNA, 2300 bp, Homo sapien
gacctctctagcatggcagctcaaagtggtaggatttcttacatggcagctcaaagctaccagtgtgctagatagcctgcaactgaagctgcaaaacttcttatggcctagcttcaaaaggcccagaacctccatagaattttctgagatcaaatataaagtgcttaaaacagtgcctagctcataagtactattagatattaattattcttaaaataatataaagatgaataagaagcgtccctttctcaataacaggtatgtgcttccttgcataatatatacttattgccaaactcttagccatcttgaatctcaatttttttttttttgagacgaagtcttgctctattgtgcaggctggagtgtagaggcacgatctcggctcactgcaacctctgcctcctgggttcaagtgattctcctggctcagcctcctgagtagctgggatgacaggcgtgcaccaccacacccagctaatttttgtattttcactaaagaaggggtttcaccacgttggccaggctggtcccaaactcctgacctcaagtcatctgctcgcctcggcctcccaacgtgctggggttacaggcgtgagccaccgcgcccggccttacttctcaatttcatcttttccctagagatgtttggccgggcgcggctgcacgcctgtaatcccagcactttgggaggctgaggcgggcggatcacgaggtcgggggatcgagaccatcctggctaacacggtgaaaccccgtctctactaaaaatacaaaaaattagccgagcgtggtggcgggcacctgtagttccagctactcgggaggctgaggcaggagaatggcgtgaaccccgggggacggaggttgcagtgagccgagatcgcgccactgcagtccagactggggggcagagcaagactccgtctcaaagaaaaaaaaaaaaaagagatgctcttctacccctttgatgagacgtcgagctgtatatgaactcagactggtattaatattttacttgtctacattcttttttttcgagacggagtttcctcttgttgcccaggctggagtgcaatggcgcggtctcggctcactgcaacctccgcttcccgggttcaggcgattttttttgcctcagtctcccgggtagctgggattacaggcgcctgccaccatgcccagctaattttgtatttttagtagagacggggtttcagcatgttggccaggctggtctcgaactgctgacctcaggtgatccgcccgcctcgactccccaaagtgctggattacatgcataagccaccgcgcccggcctatgtacatttttgttgttgttgttgataggatggatatgtacactaacttccactttgtcactaattccgcacatggtaactccgaactctaaaactctgaccgttaagagcttgcatcgagagccactgcgagtagctgctgttatgacatggccatttcattctccacaacaagagaagcagccgcggcttcagtcaccgccctccagcagcgtaagaggataaaagtgcgacttgccctaaaacctaaacgtctcttctggatctccagaaaaaaagtgctgctctaggccgggcgcagtggctcacgcctgtaatcctagcactttggcaggccgaggcgggcggatcatctgaggtgaggacttcgagaccagcctagccaaaatggtcaaagcccgcctctactaaaaatacaaaaattagccgagcgtggtggcacgtgcctgtagtcccagctgcatgggaggctgaggccggagaatcacttgaaccctggaggcagaggttgcagcgagccaagaccgtgccactgcacttcagcccaggtgacagagggagacgccctctcacaaaaaaaaaaaaaaaaaaaaaaaagtgcagtctagcccgcatctgcggcctcttcatctcgatgatagtcttttcctgtgtcttagcgttgcatgatgggagaaatagtctactttccggtagcggtgccagggcagtggcctaatacggaactccatttcccggcgtgcctcgcggaggccgctgaactcagaagcgggaggccggttccggttgcatcagcgagggattcacggcgaaatgagactgttcgtgagtgatggcgtcccgggttgcttgccggtgctggccgccgccgggagagcccggggcagagcagaggtgctcatcagcactgtaggcccggaaggtactcgtgctggtgctggtgggcggtggatgggggggcgggaccgaaacacgcca

SEQ ID NO: 9857 - DNA, 2300 bp, Homo sapien
acaagagcgaaactccgcctcaaaaaaaaaaaaaaaaaaggatagacaagaaaaacatgggtgcagatgggacagatggagtgtccaaaatgataggctaagagaaaatgtaaaaaaaaaaaaaaaaaaaaaaagagatgtaagaattaaaaggagaggatgaaaaattaaagagagatcagcaaacgggacctagcaggcaggttctggctctatcaacaatttccactacaaaatcaagccccactcacatgtgccatgtctactcacactggattctgctggggccgcagcgggggcaaactttctaggcccttctcccaagcagtaacagccatagcaatctcctcctcagatagggtagccagctcctcctcctataaagagtggagagaatcccttaccaggtgaggagggcccacagggtaaagaaactttctccttgccactacctgaaaaagttagtggccatgctcaaagtccatctcctagccacctcccacctcaggccccaaggctctgccctattccaaacctcaggctcattggtgacagcccttccctcagcggggctgggctggggctgcttttggaggtaaggccggagagccaggacaccttgctgtttcagtacagtctctgcagctcgctgacatggttcctgggtactcagtgtctggaaccagctgtgcagggcactcagctcctctgtgggtatggaagaaaagaaaatcagcaaacataaggacctggtaggcaggagcgggcatctttccccttctttgtgaggtttctccagttgctttccccagttccctcaaccatcttctgctatagttgcccagtcaagctgtaccttgaagggagttctcagtattctactgcccattctgtaacccctacaccaagctcctagggttggagtgatatgcacagttctcaccagggaggtaggcgggatcttgcagtaatgggtatagggctccccacaaaacaatgtcggctagagattctgtctcctttgttggggatagaaaaggaaaatgtacacaaatgagacactcagtttcttcccaatggtaatatctaacatttactgagcactttatatgtcaagcactgtattaagcactttatatgatctcacttaatcctcacaataactcactgagataggtactaatattatcccatttcacaactgaaaaaaattgaggattagagagattaagtgatttgccaagattacactactagtaagtggcagtgttgggttcgaacactctgaatacagtcttccctcttaatccttacaccataagccttccccagtcctcatctcaagacccaactcaccccagccaggaaaggacagttctgacgactcaagctgtggtcaatgtgagtcagggctctccgcactgaaccaagaacatcttcccccttcttgccttggaccactaaatagtacagggcagcagacaaagctggctaaaatgcaggggacatgagtcaggatggccacgcagaacaagggcctgcctgacatcccccataccttagtcctacctgcagctctgtcgcttcccattccagccactggttagtgaggtcatcttgctcccagccagataacaaaaaaaaatatctgcccagagagagagcaacagatgatggacttagaggggcccatttagcccatttctcatcacacagggaaacaatggctgcaaataaagccacacaaatgacagtgaggcctgatttgattcagccacctccctacaccaaggaccaatactgaccggcagattgcactagtggagaagaggtagttgccgctatccagctgcaagacagggaccttaggccgggtcaggaacgggaccacacaatctgatgcaagaatggaaaatgggttaaaaaaaaaaaaggaaaagaaaagaaatactttgtcaacttaggataaccttgcattgttcagtgagtaaaaaaagaaagatgggcagtctcaacccagaagttccaggataggaccactgaaagggggtggtccggaatgggctggagaggccagcaggtgttcagctgaaactgccagctggaagcaacagatggggactgcagaggaggtggtggtattgggatagtgctgcagccaagaacttaacgactgaaagtaactgggatatcttcataattatctgaaggtcacagtgggagaacaaaattaaaagaactgagaagacttacaagagaacctcctaagagtcacccaaacaatcggctgagaatgagaa

SEQ ID NO: 9858 - DNA, 2300 bp, Homo sapien
tcacactgtcgtccaggctggagtgcaatggcatgatcttggctcactgcaacctctgcctcccgggttcaagtgattctcctgtctcagcctcctgagtagctgggattacaggtgcctgccaccacgcctggctaatttttttttttttttttttttttttagtatttattgatcattattgggtgtttctcggagagggggatttggcagggtcataggacaatagtggagggaaggtcagcagataaacatgtgaacaagggtctctggttttcctaggcagaggaccctgcagccttccgcagtgtttgtgtccctgggtacttgagattagggagtggtgatgactcttaacgagcatgctgccttcaagcatctgcttaacaaagcacatcttgcaccgcccttaatccatttaaccctgagtggacacagcacatgtttcagagagcgcagggttgggggtaaggtcatagatcaacagcatcccaaggcagaagaatttttcttagtacagaacaaaatggagtctcctatgtctacttctttccacacagacacagtaacaatctgatctctctttcttttccccacatttcccccttttctattctacaaatccaccattgtcatcatggcccgttctcagtgagctgctgggtacacctcccagatggggtggcggccgggcagaggggctcctcacttcccagacagggcggccgggcagaggtgcccccccacctcccgggctgggtggcggccaggcggaggcgccccccacctcccggatggggtggctgccgggcgggggctgccccccacctcccggatggggcggctggccaggcgggcgctgccccccaccttcctcccggacggggcggctggcggggcgggggctgccccccacctcctggatggggcggctgccgggcggacacgctcctcacctcccggatggggtggcggtcgggcagagacactcctcagatcccagacggggtcgcggccgggcagaggcgctcctcacatctcagacggggcggcggggcagaggcgctccccacatctcagaccatgggcggccaggcagagacgcttctcacttcctagacaggttgacggcggggaagaggcgctcctcacttcccagactgggcggccaggcagaggggctcctcacatcccagacgatgggcagccaggctgagacgctcctcacttcccagacggggtggcggccgggcagaggctgcaatcttggcactttgggaggccaaggcaggcagctgggaggtggaggttgtagcgagccgagatcacgccactgcactccagcctgggcaacattgagcactgagtgagcgagactccgtctgcaatcccagcacctcaggaggcccaggcgggcagatcactcgcggtcaggagctggagaccagcccggccaacacggcgaaaccccgtctccaccaaaaaatacaaaaaccagtcaggtgtggcggcgcgcgcctgcaatcccaggcactgggcaggctgaggcaggagaatcaggcagggaggttgcagtgagccgagatggcggcagtacagtccggcctcggctcggcatcagagggagaccgtggaaagtgggagaccgtggaaagtcggagacagggagagggagcaattttttgtatttttagtagagacggggtttcactatgttggctaggctggtcttgaactgacctcatgatccacttgtctcggcctcccaaagtgctgggattacaggcatgagccactgcacccggcaatataagcactttcttttttttttttttgaaactgagtctcactaggatggagtgagtggcgcaatctaggctcacggcaacctctgcctcctgggttcaagtgattctcctgtctcagccccccgagtagctgggattacaagcacgcaccaccaggcccggctaatttttgtacttttttagtagagacggggttttaccatgttggccaggctggtcttgagctccgacctcgtgatccgcctgcctgagcctcccaaagtgctgggattacaggcgtgagccactgcatccggccaatactaagcactttcaaggctcatatagaataggaagtactgccgtggctcatgcctgaaatcccagcactttgggaggttgaggcgggaggatcacttgagcccaggagttcgagaccagtcctgtcaacatagactgcatctctacaaaaaaaatttaaaaattatccaggcacggtgatgcctgcctgaa

SEQ ID NO: 9859 - DNA, 2300 bp, Homo sapien
tcccccacaaccccccattaatccccaagagaacaaacaccccacgcggcccccccgccctccgcggaaggatctgcgcctcttcccaggccactggtggccaatcccagccctcctcagggaggggccccttccaaagccacagtctgttgcgggaaccaggaatgccaggtccgggaggggccaggccccgaaagatgaaagtcgcgacttgccctgccccgccccaaaggcttcccgggtagtgtgctgggacttgacccgcctccccaggtcaacatgtcacaacacgacctcagcctgtcaagtcacatgacctctgcctgtcactgacaacctggtctgtctttaggccaggggagaccatctggtccaccctccacactacccccattttcagagaggaaatggaggtgtggagcagcggagcagcctaaccaaagacctgtcattgccacaccactccagtcacaaccggccttgtgacagtttctacttaaactctggctgcccccatgagggtatgacaggatatgtaacaggccaccacatggcctctgttttcaaggcacaagaaaaatactttgcattctgggtggtgcgttttacttttggtcaagttgcctccaagttcatggttctcattttaccttcacaacttttatctttaatttacaaacaaggacggtaagatcccttggcaagtgatggggagttgagtctaaaatcgcggctccggtctccccagtccagggcagtcctgcgctgaagtgcactcacacgtcccgggatgagactccgctgtaaatctcgacccgaacacctaggaggcaggcctgtgccgcgctcctcacacagggagtcacaggacttgctgtctggtacagcaagagagggtcttggagaaagccataggagtaccgtgggggaaaataggtggccaaacagaatcgggtccactgggcaaaatacatgacttctggcaggctgagggcttaccaactacaaggtaaaagtcaagggcgctgttctgagagaagcggaaaatgactaccaagggattccagtacctcggccccttttgggagatttacggggctagaacaggagaccacccccgtttttttgtttgtttgttttgttttttgtttttggtgaaacgtagtctcgctctgtcacccaggctggagtgcagtggcgcgatctcggtcactgcaacatccgcctccagggttcaagcgattcttctgcctctgcctccagagtagctgggattacaggcgcgcatcaccacacccggctaatttttgtatttttagtagagacggggtttcaccatgttggtcaggctgatctcgaactcctgacctcaagtgatccgctctcctcagcctcccaaagtgctgggattacaggcgtaagccactgagcccggccaggagacctctttaagaagactcgagatgtcgacaatcccagtggatggataccaactttaaaaagaaaagttcaaaaggcctatgtgcccattagctgggaggggccaagaaatatgggagtcccttatagtgggggtaaaacggcgggtaaagctaggtgggcggaacagcagcttctgggggagacaagcggcaaagaggctcacgaccgactaggggcgaccaaggctgatagccgttggggccgttgggcgccgggagctggcgccccgccctctctcctctcccccaccctccgcacctcccaccaccctcggtgtcccctgcgcgtgcgcgtgcagacaccggttgccaaacattgcatcatccccgcccccctttcctcccctccccccccgctacactcccctccgcgcgcgcgcatgactcacccacctcctccgtgaagcctcgtgacccaaagccacttccgggtccgacactacgtcgaccccctagcgagagggagcgacgggggcggtgccgcggggctcctgagtggcggatgcgagggacggggcggggccaatgccggcgtgccactttctgattggtaggttttggggtcccgcccctgagaggagggcaaggccatggtaaaagattacagccaggcgctcccgaggtcagagacttaagtctaaggcactgagcgtatcatgttaaagatgagcgggtggcagcgacagagccaaaatcagagctggaacctgaggagagaggcgagtactgattcccatctaccttttaccctcccgtctcctcaaagttggggcgtccgctctttaggatcggcctcactcctccacagtgaagttaggg

SEQ ID NO: 9860 - DNA, 2300 bp, Homo sapien
aggtgggtgagtcatgcgcgcgcgcggaggggagtgtagcggggggggaggggaggaaaggggggcggggatgatgcaatgtttggcaaccggtgtctgcacgcgcacgcgcaggggacaccgagggtggtgggaggtgcggagggtgggggagaggagagagggcggggcgccagctcccggcgcccaacggccccaacggctatcagccttggtcgcccctagtcggtcgtgagcctctttgccgcttgtctcccccagaagctgctgttccgcccacctagctttacccgccgttttacccccactataagggactcccatatttcttggcccctcccagctaatgggcacataggccttttgaacttttctttttaaagttggtatccatccactgggattgtcgacatctcgagtcttcttaaagaggtctcctggccgggctcagtggcttacgcctgtaatcccagcactttgggaggctgaggagagcggatcacttgaggtcaggagttcgagatcagcctgaccaacatggtgaaaccccgtctctactaaaaatacaaaaattagccgggtgtggtgatgcgcgcctgtaatcccagctactctggaggcagaggcagaagaatcgcttgaaccctggaggcggatgttgcagtgaccgagatcgcgccactgcactccagcctgggtgacagagcgagactacgtttcaccaaaaacaaaaaacaaaacaaacaaacaaaaaaacgggggtggtctcctgttctagccccgtaaatctcccaaaaggggccgaggtactggaatcccttggtagtcattttccgcttctctcagaacagcgcccttgacttttaccttgtagttggtaagccctcagcctgccagaagtcatgtattttgcccagtggacccgattctgtttggccacctattttcccccacggtactcctatggctttctccaagaccctctcttgctgtaccagacagcaagtcctgtgactccctgtgtgaggagcgcggcacaggcctgcctcctaggtgttcgggtcgagatttacagcggagtctcatcccgggacgtgtgagtgcacttcagcgcaggactgccctggactggggagaccggagccgcgattttagactcaactccccatcacttgccaagggatcttaccgtccttgtttgtaaattaaagataaaagttgtgaaggtaaaatgagaaccatgaacttggaggcaacttgaccaaaagtaaaacgcaccacccagaatgcaaagtatttttcttgtgccttgaaaacagaggccatgtggtggcctgttacatatcctgtcataccctcatgggggcagccagagtttaagtagaaactgtcacaaggccggttgtgactggagtggtgtggcaatgacaggtctttggttaggctgctccgctgctccacacctccatttcctctctgaaaatgggggtagtgtggagggtggaccagatggtctcccctggcctaaagacagaccaggttgtcagtgacaggcagaggtcatgtgacttgacaggctgaggtcgtgttgtgacatgttgacctggggaggcgggtcaagtcccagcacactacccgggaagcctttggggcggggcagggcaagtcgcgactttcatctttcggggcctggcccctcccggacctggcattcctggttcccgcaacagactgtggctttggaaggggcccctccctgaggagggctgggattggccaccagtggcctgggaagaggcgcagatccttccgcggagggcgggggggccgcgtggggtgtttgttctcttggggattaatggggggttgtgggggaggggtaggcgcgctcccgcatgcgcactgcagcccctccagttggctcgtcgctgtccgctgggcgggggcccggccccgcccctctcccgtccgggcagcggcggaggcggcggctcctgcggcggcggctgcggcagcgacggcggcggcggcagcggcagcagcctgcgcagtgccttctgggaacggaatccccagggctgcccctggcccccatggcgcatgcgcgggaggccgctcggtgatccgcggcggcggcagcggcgcttcctgctaggaccggccggggccgtaccggaggctcgggctccaccgaccctcctcccaccccctcccactcaccctctgggccgcgactgcgcagggcggggccggccgaaccatgggccgcggtgagtgcggggcccggccccccccaccct

SEQ ID NO: 9861 - DNA, 2300 bp, Homo sapien
tgaagtcttctactccgaatggagggaggccttgcccttcatatgcctaagaattgggctagactttcttggtcccagggagctgaggttctgaccctctggtccctagggactgggcttggaaaggatggttgtagactaagccagcagatccccgagatctttataggtgcttgcctcacattgttaaggatctttcttttgagagggtgctgggctgtgctgctctttagagttgggcagactcctgacagtcccatctctctacttgcgttgcaggtgtgggctaagctggtggccccggctttagactggaccccacaatgtttgcagagatgttcaggtagctgtggtgatacggcagaggactcctcagtctccctcccagctgaggggttccccttgctcctctggggcttcccctgagttttcttgggtctccccacaacctttgccttcctggagtcctctctcaggtacttcgctcagtttaatcctcctagtgcctacatggatgtctgtgttatcaggcacgcgggagctgattacacacaatgaatgggggcaatgagagcagtggagcagacagagctgggggccctgtggccacatctgtccccatcggctggcagcgctgtgtgcgagagggtgctgtgctctacatcaggtacggatcttcacaggtccccaagctctgccactccagttgcccaggttttctttcttccgtttcttctctcagctcagctctctggtacccgattgctctcctctcttccccttccttcctcagcctttttgctttctgtagctctgggcctttgaatccattctccctttttctgtgtcttcccacattccttatcctctgttcttctaggaggatctgtaacttaagcactgtgctttaggagtattgcctgattcgctgccagctaaccccatgtcctctgaccctgtcctctcgcagtccaagtggcacagagctgtcttccttggagcaaacccggagctacctcctcagcgatgggacctgcaagtgcggtctggagtgtccacttaatgtccccaaggtcagagtggtgaggggcgcctgagagtacagagataagctaaaagtcttaatgcaaatcactgactgaggtagcccttctcacaggttccagcccctcagggtccctgtccttgctttccaccttacaggttttcaactttgaccctttggccccggtgaccccgggtggggctggggtggggccagcatcagaggaggacatgaccaagctgtgcaaccaccggcggaaagctgttgctatggcaactctgtaccgcagcatggagaccacctgctcacactcttctcctggtgagtcttctgccactttacagaagaccgaggaaaacctaagggcttggaaggctggtggtgggaggagttccttgagagggagcaaagagaaaggggagtgggtggggagctgcatgttgaaaggagggcacagggaggttgggaacttgtgggagatgggactagagaagacaaaagagtttttggaaggggagccacaggctgacccttcatttttcatttattgcaggagagggagcgagcccccaaatgttccacactgtgtccccagggcccccctctgcccgccctccctgtcgagttcctcctacaactccacttaatgggggtcctggctcccttcccccagaaccaccctcagtttcccaggcctttcccactctagcaggccctggggggcttttccccccaaggcttgctgacccagtcccttctgggggcagtagcagcccccgtttcctcccaaggggcaatgccccctctccagccccacctcctccacctgctatcagcctcaatgctccctcatacaactggggagctgccctcagatccagcctggtgccctctgacctgggctctcctccggcccctcatgcctcctcctcaccaccttcagaccctcctctcttccactgtagtgatgccttaacaccccctcccctgcccccgagcaataatctccccgcccaccctggtcctgcctctcagccaccagtgtcttcagccactatgcacctgcccctggtcctggggcccctgggaggggcccccacggtggaggggcctggggcaccccccttccttgctagcagcctactctctgcagcggccaaggcacagcatcccccactaccccctcccagcactttacagggccgaaggccccgtgcccaggcaccctcagcttcccactcctcatcacttcgtc

SEQ ID NO: 9862 - DNA, 2300 bp, Homo sapien
tcccttcccccagaaccaccctcagtttcccaggcctttcccactctagcaggccctggggggcttttccccccaaggcttgctgacccagtcccttctgggggcagtagcagcccccgtttcctcccaaggggcaatgccccctctccagccccacctcctccacctgctatcagcctcaatgctccctcatacaactggggagctgccctcagatccagcctggtgccctctgacctgggctctcctccggcccctcatgcctcctcctcaccaccttcagaccctcctctcttccactgtagtgatgccttaacaccccctcccctgcccccgagcaataatctccccgcccaccctggtcctgcctctcagccaccagtgtcttcagccactatgcacctgcccctggtcctggggcccctgggaggggcccccacggtggaggggcctggggcaccccccttccttgctagcagcctactctctgcagcggccaaggcacagcatcccccactaccccctcccagcactttacagggccgaaggccccgtgcccaggcaccctcagcttcccactcctcatcacttcgtccctctcagcgtcgtccccgcagaccccctactgtatttcgattgctagaagggagaggccctcaaacccctagacggagccgtcctcgggcccctgctcctgtcccccaacccttttctctcccggagccatcccaaccaattctcccttctgtgctgtccctgctgggactccccacccctggcccttcccactctgatggaagctttaaccttttggggtcagatgcacaccttcctcctcccccaaccctctcctcagggagccctccccagcccaggcaccccatccagccctccctgcctgggaccaccagtggcagcctcagcagtgtgccaggtatgtgagtattgtggagcccttcctcatcctggctggaaagaggcagccaaggcatttaggggaatgttcagagagctctttgagggttttctgggttgggggcagggaggttggcttctttggatgatgggagaaagggcctcccttgagctgaatttctctcctcttttacaggtgcccctgccccaccagctgcctccaaagccccagtagtccccagccctgtgcttcaaagcccatccgaaggactggggatgggggcaggcccggcctgccctctgcctcccctggctggtggagaggctttccctttccccagccctgagcagggcctggcactgagtggagctggcttccctgggatgcttggggccttgcctctccctctgagtctggggcagcctccaccttctccattgctcaaccacagtttatttggtgtgctgactgggggaggaggacaacctccccctgagcccctgctacccccaccaggaggacctggtcctcccctagccccaggagagcctgaagggccttcgcttttggtggcttccttgcttcctccaccaccctcagaccttcttccacctccttcagcacctcccagcaacctccttgcctctttcctgcccctgttggctctgggccccacagctggggatggggagggatctgcagagggagccgggggtccaagtggggagccattttcaggcttgggagacctgtcccccctacttttccccccactttcagccccccctaccctcatagctttaaattctgcgctgctggctgccaccctggatcccccctcggggacacccccccaggtgaggatgggggtgagtaggtgggacagaacaagatgtagaataagagatgggagctgggaatcaaaagctttcagtttcattcctgagctcttccttggggcctttggggaggccttagttcttggctgggggtaggatgactgcaagaattgggtctgtatttaataagcatggcctatctcacttgaggcttcagtcagatagtggatgtgaaagcactataaatctgttgagtattttacacgcgtaagtgttagaatcattcttttttcttagccctgtgtcctgagtgccccccaacctggaccacctacctccagtgtcaccacggcaactactgacccgggggcctcctctctgggcaaggccccctccaactcagggagacccccccaactccttagccctctgctgggtgccagcctgctgggtgagtctgagggagtgtgaattcacactcttggtgtgaaaaagcaggagtaaaacttgggagtagtggctgaataaattggggaagaaagtct

SEQ ID NO: 9863 - DNA, 2300 bp, Homo sapien
gcagaccccctactgtatttcgattgctagaagggagaggccctcaaacccctagacggagccgtcctcgggcccctgctcctgtcccccaacccttttctctcccggagccatcccaaccaattctcccttctgtgctgtccctgctgggactccccacccctggcccttcccactctgatggaagctttaaccttttggggtcagatgcacaccttcctcctcccccaaccctctcctcagggagccctccccagcccaggcaccccatccagccctccctgcctgggaccaccagtggcagcctcagcagtgtgccaggtatgtgagtattgtggagcccttcctcatcctggctggaaagaggcagccaaggcatttaggggaatgttcagagagctctttgagggttttctgggttgggggcagggaggttggcttctttggatgatgggagaaagggcctcccttgagctgaatttctctcctcttttacaggtgcccctgccccaccagctgcctccaaagccccagtagtccccagccctgtgcttcaaagcccatccgaaggactggggatgggggcaggcccggcctgccctctgcctcccctggctggtggagaggctttccctttccccagccctgagcagggcctggcactgagtggagctggcttccctgggatgcttggggccttgcctctccctctgagtctggggcagcctccaccttctccattgctcaaccacagtttatttggtgtgctgactgggggaggaggacaacctccccctgagcccctgctacccccaccaggaggacctggtcctcccctagccccaggagagcctgaagggccttcgcttttggtggcttccttgcttcctccaccaccctcagaccttcttccacctccttcagcacctcccagcaacctccttgcctctttcctgcccctgttggctctgggccccacagctggggatggggagggatctgcagagggagccgggggtccaagtggggagccattttcaggcttgggagacctgtcccccctacttttccccccactttcagccccccctaccctcatagctttaaattctgcgctgctggctgccaccctggatcccccctcggggacacccccccaggtgaggatgggggtgagtaggtgggacagaacaagatgtagaataagagatgggagctgggaatcaaaagctttcagtttcattcctgagctcttccttggggcctttggggaggccttagttcttggctgggggtaggatgactgcaagaattgggtctgtatttaataagcatggcctatctcacttgaggcttcagtcagatagtggatgtgaaagcactataaatctgttgagtattttacacgcgtaagtgttagaatcattcttttttcttagccctgtgtcctgagtgccccccaacctggaccacctacctccagtgtcaccacggcaactactgacccgggggcctcctctctgggcaaggccccctccaactcagggagacccccccaactccttagccctctgctgggtgccagcctgctgggtgagtctgagggagtgtgaattcacactcttggtgtgaaaaagcaggagtaaaacttgggagtagtggctgaataaattggggaagaaagtctttggccactggataaagcctaaagagaatagtaggtctgctcagcctaattggtttgcctagggagagacccctgactataatttctcaacaggtgacctgtcttcactgaccagcagccctggagccctccccagcctgttgcagcctcctggccctcttctctctggccagttggggctgcagctcctccctggggggggagctcctccacccctctcagaggcttctagtcccctagcctgcctgctacagagtctccaggtgagggtgtgggcatatatttgtcagggagataattttttctcaaactggaaatttagggctttctgagttatagtagaagagggacggtatttgagattgactgagaacttatttttttgccagcagatccctccagagcagccagaagccccctgtctaccccccgagagccctgcctcagccctcgaaccagagcctgccaggcctcccctcagtgccttagccccaccccatggttctcccgaccccccagtccctgagctgctcactgggagggggtcagggaaacggggccggaggggaggagggggacttaggggcattaatggtgaggccaggccagcccg

SEQ ID NO: 9864 - DNA, 2300 bp, Homo sapien
aatgatggggatgggtaaggccagagagactttgaagtctgaggcaaagccggcatttgggtttcaggcaaattcagatacctacgggagtgtgtgttttctgtctcagtaaccattggaggatagagtcccaatacttcagcccccttccctggccaaaaaaaaaaaggtgtgggggaagaaaaacgaaagaaatgccaagcccagagattccttgtccttccttcctttgggtcagactcctgctgcagcccctggaaagaaccaccaagaagctggccaaattgatttttctccatgtcacaggcctctgctggccaacagagagttggactgcaggagttgaggttctaggcaaagaggaagggcagggtggatgggagaaggaggaggaaaggaaagttctgctcagcaactgtctggtgagtggttaaggtcacttaagacactatgggacaaaagtaagaggctgatagcctggccagacaagacctaactattcagaactcagggggtttcccacattggggctacacctctaacctaccttgaatcttaagggaactgaaagaaaagagtccaacataaggaatgggacaggaaagctgtaggactatggagaaagggatagaggcttggggaggagccaggagaaagaaagacaacgagttccgaactcaggaactctctagtcacttggtttggcacaatttctaagtgttgcagcatcctgcaagctcaggaaacatcctgggaaacatcccatccttgggtccccaggggctccaaggtggcatctttagtaaaggggtttcaaaatgccagtccatggagggtcactggtcagagacaaaagttcactgagtatgccctcacctccaaaagaacaatggtgagtttttttttaatataaagatggatttgataagtttcaaaggactatcttttattctgagtgtgtccttcttgcttttctaccaagtaatgatggtgacagtaaataataggttttctatttgtaatatacttacttgataaaataaaaaggcaaatcttcaaggtttgtagttgttttaattttattgaacgatgaaatttaaaagtctgagaacggaaggtaaggttggtgaataggtacaaaaaattagaaagtataataagacctactatttgatggcacaatagggtgactatagtcaagaataactcaactgtacattttaaaataacttaaagagtaattggattatttgtaacttaaaggataaatgcttgagaggatggataccctcttctccatgatgtgcttatttcacattgcatgcctgtatcaaaatatctcatgtgtcccataaatacatacacctactgtgtacccacaaaattgaaaaaattgaaaaataaataaaagtctgagaactattaacgaagtagttaagagcccagagagtgttcagacagacatggagacaccacttacctacttatgaacttcagatagaattgccagatttgaaaaacaaaaaacaaaaacaggatgcccagttaaatgtgaatttcagatacttaatttttggggggttagtatacccacacaccacacaccacacacacacacctacttattatctgaaattcaaattatctgaaagcccttacttgagaagattgcctaactttttcattcctaacatacactacgcgtttactaaattttacttcttgtttttattttgtttttataatacacagtatcaagcaaacttcttgtttttgaaaccccggctgtgtcacagtatgactacctgtatcatttaatctagtcattttattcctgggagccccaaacaggaattataaatgttctttcactgacttgctgtaaaagtgagagaaaaggctgtatgaaatagctccccaaggttcgttattgtcgctccccgcccaagctccagtacaccaaaactacacatcccacaatcctaggcggcgtcccctggccattacctcattccctggcctcgttctccccaatcccggcctctccaggggtgtggcagcagggctgttctcgcgacttttgctttacccttctgctgtgctactgctgtcgcgagacttcctgctcatctgccgctccctttgccgccgccttagcccgggacccgaacccagcctctcccctacccgaacaccggccccggctccaccgaggcccgggtcccccagcccgtctcgccgccgccatggcggaccctaaatacgccgaccttcccggcattgtgagtacaggaccggcc

SEQ ID NO: 9865 - DNA, 2300 bp, Homo sapien
acatgagatattttgatacaggcatgcaatgtgaaataagcacatcatggagaagagggtatccatcctctcaagcatttatcctttaagttacaaataatccaattactctttaagttattttaaaatgtacagttgagttattcttgactatagtcaccctattgtgccatcaaatagtaggtcttattatactttctaattttttgtacctattcaccaaccttaccttccgttctcagacttttaaatttcatcgttcaataaaattaaaacaactacaaaccttgaagatttgcctttttattttatcaagtaagtatattacaaatagaaaacctattatttactgtcaccatcattacttggtagaaaagcaagaaggacacactcagaataaaagatagtcctttgaaacttatcaaatccatctttatattaaaaaaaaactcaccattgttcttttggaggtgagggcatactcagtgaacttttgtctctgaccagtgaccctccatggactggcattttgaaacccctttactaaagatgccaccttggagcccctggggacccaaggatgggatgtttcccaggatgtttcctgagcttgcaggatgctgcaacacttagaaattgtgccaaaccaagtgactagagagttcctgagttcggaactcgttgtctttctttctcctggctcctccccaagcctctatccctttctccatagtcctacagctttcctgtcccattccttatgttggactcttttctttcagttcccttaagattcaaggtaggttagaggtgtagccccaatgtgggaaaccccctgagttctgaatagttaggtcttgtctggccaggctatcagcctcttacttttgtcccatagtgtcttaagtgaccttaaccactcaccagacagttgctgagcagaactttcctttcctcctccttctcccatccaccctgcccttcctctttgcctagaacctcaactcctgcagtccaactctctgttggccagcagaggcctgtgacatggagaaaaatcaatttggccagcttcttggtggttctttccaggggctgcagcaggagtctgacccaaaggaaggaaggacaaggaatctctgggcttggcatttctttcgtttttcttcccccacacctttttttttttggccagggaagggggctgaagtattgggactctatcctccaatggttactgagacagaaaacacacactcccgtaggtatctgaatttgcctgaaacccaaatgccggctttgcctcagacttcaaagtctctctggccttacccatccccatcattgcccctccttcactgctttctgactccctttctcttgcaaagatgtttcccacccatcttcctcccatcctcagcctaggacacaaaaataagtattgtatctgcttttgaattcccataacccagaatgggagtttatcttccctgaaactggggacctggtgtgtacgttggggagacagtatagtgcacctttggatgtggaaggggaagggagtagccagaacctcccacgacacccaacttcataggagtacaggcaggggtccccccagaaagctgagtgggttgggagtccagcttccgtgcatgtggggcatgggatgggcgtagggggagaatgagaagtgtgatcccagtttggagagaggactgtgacgggttgggggatgccctggaataaagggagagggagatctgttgacccttttcgctacacaggcgacaggcccacctcagtccccttatcccttccagggggtggagtctgagggagggacaaacaggtcgggggtataggggtgggatgcagtgagttgggtggggaagggtcgagggcaaggttatctccgaacgttaggggtgggggagggaggagaggagcggtgaggttccacccttcgggggtcgacgtcgagccagcgtccccagtggagggagccccgcccccgctcctccatcgcggccccgcccaggcccgcagcgcggcgctgcagcgcgaggggcggagaggcagagagcccgaaaggaccagacgcccaggtcgcccgcatcccgctgccgcaggagagagacagcgcgccccggccctgctccccaggcttcgcccgggcgccctcaactctgtccccagagactgagcacctgtcctccgcctcggcctctgctgagagccctctcctctggagcacacaccacccctgcagcccaagaagagtcccagccccacgccgg

SEQ ID NO: 9866 - DNA, 2300 bp, Homo sapien
agggggagggagtgagactcattcttttcatcactgtgttgtccaggagatccagtcattcccctgcctcagtgcagaatatctcccctcctccaatcccatctgtggcttctccctattccagtgataaggtctggacgaaaacaacgtgggcatctgacgactgggtttctctcctacctttggaagccttgtgacattggacaagtcatttacatccctctggccttgagtttccctgtattcctgtaaaacacaaatagtccctgccgtttgtgatctcacagggacactctcagagcagagtaaccatgatgacaggaatactttaatttctatggagctgatcatggtgggtctcttcctccaggagtgacctgccgtgtggctatgaggctgaggaccaggccaagcttttccctctccaccaagagacagcagccagctaatctcccacacccacggctgcatacctgcactttcaggtagcgtcaggctgcttcctcggaccagcctcaggttgcttcccttcttgctgacagcctctttggttttcctgctgctgcttctttttttttttatcacctcaaaactttaattatgtagttacccctcaactcctgctttcccctgttgggggctacacctgtgctgccccatgtaatctggacgttgacctcccgtgcccccttttgctttccgttaggctacagtggtaaccacagtactgtctttttgccactaggggtcactgtcacatgtccaaagaagtgagcttggccgctgtagattagaaccacaggggtggtagactgcagatctatcaggagaccctagggggccatctcaaccccacctcttcctccaccctgaaataattttggatggataggtgtttttggaactaagacatctccagttaaggcgatgtttgcttcacgcctgcacctgtgtcccatcctcttcccatctgtatatgccaccagtaagctttaggaaacgccccacgaaatcagtcagcgctcccctcccatcttgctcagtggaggtggcaaagcccctctttttcctcctctgtccccaggtgctctcctctagcagcacaggaaccttctttgttcttgtgtgtcactgggtttctcaccaaggttgctttagggcccagaagtggcacagagaacatggccagtctcttactgggctgcatctaagctgagccctctccaggggtttcccagaatagtaaaccaggcacacacaggcagaaaagtctgagaagcagagaagtaggaatgcagaagaggagttggggagacctaggggtggaggtgcaagcctgggtcacggggggcggtggtaggggggtctgcttgttggtattaaaggaacaggacagtaaaccaaagtgtgtgcagatgccacctgttcctgttctgtgactgagctacaagctgggccctcacaccctctttctctttctttcccagtttctaagagggactgaggcctcttctcagcatgctgcaaacctgtggtctctgatactaactccctccccaacccctgttgttggactgtactatgtttgatgtcttctcttacttactctgtatctctttgtactctgtatctatatatcaaaagctgctgctatgtctctcttctgtcttattctcaagtatctactgatgtatttagcaatttcaaagcatagtctaccttccttatttggggcaatagggaggagggtgaatgtttcttctttctcatctactcgtctcacactgagtggtgttagtcactgagtagaggtcacagagatgacaaaaggaaaaatgggagctagagggttgtgacccttcatacacacacgcacgcacgcacacaaacatgcacacacgcatgcacacacacaaagccttaagcagaagaatgtcttagcatcatgagacagagaaatagactcttcctccctcctctttcacatatagcacaggggaaggtaaaatggaagggctgctaattgagacatataattttcttcatacacccctcaccttaatcaaaggattcaggtgttacttctgccctacaaagtctgccttttgcctccctcttcctgttttcccctggactgagaaatgggttgctcaagggaccatttccctttttcttcaagctccttttgatattccctgccccagagctcatgaccagaacccagagctgatttaaaatattttgaaaaatggaggaggcagactgctcccagcagcctgtcaatggctgctcatctgtcc

SEQ ID NO: 9867 - DNA, 2300 bp, Homo sapien
tgattgataaggtcaagcaaatcacgtgatcatgggataggggtcccttcccttttaggtagccaaagcagagagggaaggcagcatacgtcagcattttcttctatgcacttataagaaagatcaaagactaagattttcactatttcttctaccgctatctactaagaacttcaaagaggaaccaggagtacaggaggaacatgaaagtggacaaggagcgtgaccactgaagcacagcaccaaagggaggggtttaggcctctggatgactgcaggcaggcctagataatatccagcctcccacaagaagctggtggagcagagtgttccctgactcctccacggaaagggagactccctttcgcggtccgctaagcaacaggtgccttcccaggcactggtgttaccgcttgaccagggagccctcaaatggcccttatgcgggcgtgacagagggctcacttcttgccttctaggtcacttctcacaatgtcccttcagcacctgaccctatacctgccggttattcctaggttatattagtaatgccacaaagagtaatattaaaagctaatgatttataatgtttatactgatgattgataattgtccatgatcatctctatatctaatttgtattgtaactactctttattctaactattttctttattatactgcaacagtttgtgccttcagtctcttgccttggcacctgggtaatcctttgcccacaactcctgacctcaggtgatcctcccgactcggccccgcaaagtgctgggattataggcgtgagctaccgcatctggctttttttttttttttttttttttgagacagagtcttgctctgtcgcccaggctggagtgcaatggcatgatctgggctcactgcaacctctgcctcctgggttcaagcgattctcctgcctcagcctctcaagtagctgggactacaggcacctgccaacatgcccggcttttttttttttttttttgagatggagtctcactctgtcacccaggctggagtgcagtggcgtgatctctgcttggcgtgatctctgcttggcgtgatctcggctcactgctacctccgcctcctgggttcaagtgattctcctgcctcagcctcctgagtagctgggattacaggctcacgccaccacgcccggctaatgcccggctaatttttgtatttttgtagagacgaggtttcaccatgttggccaggctggtcttgaactcccaacctcaggtgatcctcccgcctcggcctcccaaagtgctgggattacaggcgtgagtcaccgcgcccggcttcgttctttcttgtctccatgtctttgtatgctgttctctttgtctagacagccttttaacctctattcctgaactccacccacccttccaaactcagtaaagtctctatcctctttgaagccttccctgaccagctacacttcctttctttgtatcattgtctttgcttcatacacagttctaggatagctcatactttgcatactgcaaacttgatctccattggccagccagtgccattagactcccaactacttcggggcagtcactgtcctataccctgcttcaataaaaggaaaatcagcccctagaacaggacctagtacaactaagtgcacaataaatacttgttaaatgaatgaatgaatttcaagacgcttgagaccactggtaagaattttgggtttccaaaaccctccccttcccaacccccattcggtaagaatgctttcgcattagcatcaggtccgaggttactcattagaaactgggcaaagccggaaggcggccactttgcagcaaagaagccctagaccttgggagtcaatcaggccagcccaggccgcaccacggtctcctagttgacagttcgaggggcctcgcgggccgcttgcttcgtcagcttacagggatcccgcacgccaggtgagcccacacactgagcggacattggggcaggcaggcaggcgccggggggcggggccagcgtcgccccgccccgtcctgcctcgccctgttcgcgcgtccgctgtccggcctccggtcacgtgacagcagcgcaggtgagcgccgcttccggggtcgggcgcctggatagctgccggctccggcttccacttggtcggttgcgcgggagactatggcgtcctcctcggtcccaccagccacggtatcggcggcgacagcaggccccggcccaggtttcggcttcgcctccaagaccaagaagaagcatttcgtgcagcagaaggt

SEQ ID NO: 9868 - DNA, 2300 bp, Homo sapien
atttggatgggatgtagtactgtggaaataggcaggagccagattgtaaagaggcttataagccccacaaagaagtttggactttatcctgaaggtggttttgcaaggggcgtgatatatttgttatttagaaatatttagaaaatgtgacagcgttttagagaatggattggtgggagggaacactggaagggtggataccagttaggaggtaattttaatagtccagggtagaaacaatgaaggcctgggggagcgatggtggtggggatagaaaggaagacctatgggagaactgagagttaagacacaggggcctccaagttcctggttagggataactgggtgcctattcaccagaaattagaaacagaggaacaggtttttggaggaagaaagttctgatttggacatactgaatttgaggtttctgcaattcatccagatgaggatgtccagtaagtggttggggtatgtgtacagaattcaggaaagaggattagactgggagtataggtttgagaattatatgtgagtaagtgatcattaaaaccatggctatagatacgattattgtagggaggttgtgtgcagtgaaatgaaaagaaggttgaggacagaacctaaaggaacaagtgaagaaatgagcccataaaggaaactaagagtagatggacacttttaattatttatgccatgctacattccatacgggattcgacgacagagaggaggggaatcaggagggtggtataataagagctgaggatgaggagacttttaaggagagactggtcaataggatcaagtgccacaaagctgaaatatgacaatgactagaatacttactagatttgacaactgagggatatgggggagatttcagaggagaaatgaggtataaacctgatttcagtgattcaacgtgtgaatgagagacaggaaatggatttcttgctgattactttcctgagaaggttggctgtgaagagaaagaggcagcaacacagaaagagagatggtaagcactgaaggagtaatttttgttttttagagacaggatctcactgtgttccccgggctggtctcaaactcctgggctcaagcgatcctcctgcctcaacctcccaagtagctgggattacaggtgtgagcctggcttaacaggagaatttttaaaaaagaatccaaattgtaggccgggtgcagtggctcacgcttgtaatcctagcactttgggaggccgaggtgggcagattgcctgagttcaggagttcgagaccagcctgggtaacacagtgaaaccccgcttctactaaaatacaaaaaattagctgagcgtggtggtgtgcgcctgtactcccagctactcgggaggctgaggcaggagaattgcttgaacctgggaggaggcgggggttacagtgagcctagattgtgccactgcacttcagcctgggcaacagagtgagactccatctccaaaaaaaaaaaaaaaaaaaatccaaattgtaggccatcatgcagacttttttttttttttaggtataaaaatctgtatttatattacagtgacagaatgacacagcacagcccaacccaatgcagacattttaaattatgggaatctagcctatgaagaaacactgctctagataaaatgatttcattgataagatataagttgtaatcctggttctgtgccacttgcatatagaaagggtctaaaataaggataataacacttaaccttcctcatctcaaagaatgataaaggtgaattgagagatgacacttaaaaattaagagatgtacaaatggaaggaatcagaggaaagggggattcagaaacggcatggataacctggagtgttttggggaagcttccaccacttttgactttgtaatctctctacttgaagtcctctgctctaccctggaatggcagtgtttgaacttccctgggctgtttgtgtatctgctactcagcctctccccattccttccccctctttcactgtagtacattgtgaagtgccatggcaacacgcttctgccccagttcctggggatgtaccgagtcagtgtggacaacgaagacagctacatgcttgtgatgcgcaatatgtttagccaccgtcttcctgtgcacaggaagtatgacctcaaggtaagaagagggtagctcggacttagagggaggctcctgatagcctgagaatggggaagaccctgggaggtctttggatgattccttttaagggaaagaaggctgggtttgagtactcatcttaggggct

SEQ ID NO: 9869 - DNA, 2300 bp, Homo sapien
gtttatttccagaagaaaggaatatctctacttggatcaattctggtcatttcaagaggatggaggcctcaagtgtgggaacttcccctactccctggatgtgtgtacctagcacacttccttctcccacccctttttccagttggatttgtttttctgttctcttctgtcctgtcttatactgcaactgtgtctcctaggggacagatggccttctttgtcatcttcactctccacccccagagaggagtcagagccataactcaatcactcagcccctccaaagatagttgatgtgtgataatctcataatgttgagaaccctgatgagatacattgtcttcctctccctacaatgcctctggggccaaggcacccattcttcttgctatcctccatcccccttgaggcttccactttttttttttttagacataaagctgggcatcagcaactggcctgtggtgatgcaaagctgctttgctctgtatctggctggactgatctgtctcacaagaagccatgaggccatagggagaagctccctctccccttcatcttctgctccaaaggtggtagcaagaggagtacccagttaggggttggagcccccatataacatcttcctgtcagaagactgatggatctttttcattccaaccatctccctttcccccgatgaatgcaataaaactctgtgacaccagcaaccattgctctttagaaatgggttttctgatcatatggctgatgtgttatgggcagtatggatgtcttcatttgttgcttctgtttttcatcttttttgttttattaataaaaatttatgtatttgctcctgttactataataatacagggaataaattattcaatccaaatttctgtacagaaatgcctttttttttttttttttaaatttcacttctctcagggagcctgtgtttaagggtgcagagaccagctgaagaattctggtgttcaaggtgttgggcccctaactaaggatgtgggtttctagacagatggctgtgaacttttttaaaaaggctgtgaagggtgtgcacgggaatggaaaacttagtctttaaccttgtgggaggtcagcggtagtgagggccagggaagagtagggtgatgggacccttcctcttcccagagttctgggcttgctaacactccatctttgtaaaggtgagtaggcctctcagcccaccagctaaaagaaaaggaatctagtattcccccaggcttcctgggaaagctgtcctcttcctggagggaaggaagagtacagcagggtcctgggaaagtgaagaaagtgactagccctccagtctagaggggggagtgaaaaaggggtggatgaatagaggttgttgccagtttgggagattcctgcctgtcttggctgaggaagtcttttggctggtggaaaaacctggcttgatgtggccccagggaagtgagttggattgggcggagactgcttgatgtgggaagcagagcagagctttttttttttcttctttgagagtttttaactctatttgaaccatacacttgacaccaccaccacctcgagccactttttaaaaaatgtattcgcttcccattctgcaccagcctccatatccctgtttgtggaaagaaaaatcagaggcactgaccaatgatcatctgagagcaggttgtgggggtcataggaggtaacaatctagaaagaggcaggagatgagggaggggattgaaatagtttagtacccggatttgtttattttttagagccaatgcttttctttttactatgactcttcccatcccacattgttcctcaaaggcccttctaccataaggattcaaaaaattgccgccctccccccgaatccccatatacccaccaacacttcacccacccatccaccaccagctcctgggagctgctacgcagctggctgggaaagaaaagggagagtgctccgccgggagcggggagcgagtagggtggcgtctccagggatttaacctcctaccctcagttccatgacgccaccccctccctccaaagactgggacagcgcctccatttttgttttggggaggaagggcaggggcttgcggatagaagggggtcaaaggaacggtgattatcacctgtgaggggaaagggggtgctgtcctccctccttcccttttcctcagcctgcaccccctgcaatcccccacctttcggggtctccccctccttgttgctaaggcccggaccgtcatcccagcaacagcctcagtcatgtgaccggc

SEQ ID NO: 9870 - DNA, 2300 bp, Homo sapien
tggagtgtagggaccagctaacttccatcacttctgagaatccatttgttgctgaatggagacttgagggattgagacagcagaaaaaatctcttaacacataaggattatgctctgaaacaggctcttgctgccgaggccgtataatctctccttctgtggaaagctgtcagcctgttgctgccccgttcgcattagctgggggtgctcagacagagactagcctggatgaccctcctctggcatctgggccttaggatgcctggctgctcactgcccactctgcttcaccttcctcccaggctgaacacccaaacccaggagttcggtatcctggcaccacacgggtggcctacctcccggactgccctgagggcaacaaggtgctgaccctgttccgcaaggcgtttgaccagcgtctcaccttcactatcggcacgtccatgaccacagggagaccgaatgtcatcacctggaacgacatccaccacaagaccagctgcacagggggaccccagctgtgcgacccctcttcatttcctttcccttggctcctcccctttgttccatttccactgagggacccaccaacccctcgctcacggagcctcctaactggagagaaccacttccaaactgttcagccatctcagtttctcctacattcaacctggtcctggtgtgcccagcttagcctacaaaaataagcagaactgggctaaattatcttggatttggaggtgtcctcccttaggggaggtggggaggtgtctgagccacctagaatgagggtgagcatggggataatagcaagttcaaacagctaacaaccctcaccctcatttctctttgctcccaggtttgggtacccagaccccacctacctgacccgggtgcaagaggagctgagagcgaagggtatcacagatgactgaaggacatcgcctttgccaaggcccctgctgtctgcctctactaggacccagcagaagcctctttctcctctctgccccctgccccccacaccacacctgtaggggacctgtctgactgggaagggagttccgagagggagggggcaatcccttcccccatcccccactggccaagtgtttcaatgcagtgtgagccactcccttctggcagaggccgacctccaaggctctgttctcccctccccgtgtacatatactcccggtttccctgcccctccattgcccttggctttttctggtatgtgctgtgctccacgaccaagccgagaaaggacctagggtggggaagggagggtctcttgattcctaaccgcccccacatactgctccaccgctgaacttcgggtgccggggaggagaaattgggctgatgtgagctccccgtcacccgccatggagccggctgtgtgtgttcatcagatacagttctcccttaaccttgtcctttctctcctgtgtctcagtctccgtcagtctgtctttctccgctcttctctgacccctgtgaggaacctccttaccctgttctggaatcgctgccagactgtagcttttaatttaataaaaataaagtaaaatatgcaactctttatgccacacccgttcttttccagggactgggtgggggtggggtggggagagggacctgctggaaaggggagaggggatgatggggtgatccctgcgtgcactcccagtccctctgcctcctgaggacctggggaaacgggatgcaccagcgggctctgtagtaacactgagaaaccctgggtcacttcgatgttggaattagtattaagagggtgtttttttgttgttcaactatggttgtagagaaaacaaccctagccactctgcgaagtttggctggggtgggagtgggggcggagccgggcagggggcggattccgcagcagcaactccccggacgcgcgcaggcctcaaagccccccagcttcagtgccccctcgaccctgaaacttggagcagggtgggggttcagtatgaagcccccggaccgccccgcccctggccgcactgaccggatactgggggtcatggggggcatgctgcgcgcatgcgccctccctgggcaggagggggtaagaatgggggctcgcggtggggtcgggggtctttcggggccttcaggagggctgcacccacaactcaacttatccgaaaacgagttctgcggggcagtcgcaggaatacatgaattctattacgagggccatagccccgttctgggcgagccttttataacaatgtgggttttgacaggtaggagaaggggaaggggga

SEQ ID NO: 9871 - DNA, 2300 bp, Homo sapien
atgcagtgtgagccactcccttctggcagaggccgacctccaaggctctgttctcccctccccgtgtacatatactcccggtttccctgcccctccattgcccttggctttttctggtatgtgctgtgctccacgaccaagccgagaaaggacctagggtggggaagggagggtctcttgattcctaaccgcccccacatactgctccaccgctgaacttcgggtgccggggaggagaaattgggctgatgtgagctccccgtcacccgccatggagccggctgtgtgtgttcatcagatacagttctcccttaaccttgtcctttctctcctgtgtctcagtctccgtcagtctgtctttctccgctcttctctgacccctgtgaggaacctccttaccctgttctggaatcgctgccagactgtagcttttaatttaataaaaataaagtaaaatatgcaactctttatgccacacccgttcttttccagggactgggtgggggtggggtggggagagggacctgctggaaaggggagaggggatgatggggtgatccctgcgtgcactcccagtccctctgcctcctgaggacctggggaaacgggatgcaccagcgggctctgtagtaacactgagaaaccctgggtcacttcgatgttggaattagtattaagagggtgtttttttgttgttcaactatggttgtagagaaaacaaccctagccactctgcgaagtttggctggggtgggagtgggggcggagccgggcagggggcggattccgcagcagcaactccccggacgcgcgcaggcctcaaagccccccagcttcagtgccccctcgaccctgaaacttggagcagggtgggggttcagtatgaagcccccggaccgccccgcccctggccgcactgaccggatactgggggtcatggggggcatgctgcgcgcatgcgccctccctgggcaggagggggtaagaatgggggctcgcggtggggtcgggggtctttcggggccttcaggagggctgcacccacaactcaacttatccgaaaacgagttctgcggggcagtcgcaggaatacatgaattctattacgagggccatagccccgttctgggcgagccttttataacaatgtgggttttgacaggtaggagaaggggaagggggaggtcagggctgcctaggagggcaggttccttacagtggttctgtccccgcagcccccaaggagaagccctctagggttggtgggtaccgagccagagtctgaacgtacggagggagatcacagaagggatcgcgaacatgaggtcctcgccggggctctgcagcccggtaagaagctgggggtggggtggggcacagtttgctatcctgcgccaagtggcgaattcaaaaatattctattcttattagcataaagttcgcatctaatttgcatgagacccatttaatcgcagagacctccactcttcttgccttcgagtccaatgtgtgtcccccatcccagtcgatcccgagccctcgcaggcagagtgtccccgcgccccacccctggcccctcgccagcccgggctccaggacttcgccttaattggcgattagtcttagctggagtcccggggcctggaggaaagaagggtcctgagagagggcggcatctgggttgtgttcacccacaaaagactccccatacacgcaccccgtaccagggggcctctgtccactcggccggggacagccccaaacccagaacatcttcgcacaggccaaggccccatccactgagtcctccttcatcgcagaggccaaggggagacctgggcagaccctgcagacaggctgaaccccgaccccagcgctccgcagagcccgggatgcgagagggagggggaccccggggcaggggagcacgggctggggaggggaaaaagcgctggggacgtggagtgggaacgtggtggtgtctgggggaggggcgatcggggcgggaacccggcgcaggcaggagggggaacgcgatggagagggcggagctgggccgcagaggccccgcctcgtggcggccccgcggccaggcctgttattcagctctccgctccgctgggacccgcacagcgccagtggctcgggggtcggccctcgcctcctccccggcccgggcctagagccacccctaaccagaggccggagacagctggagcggctgccgcatcccggcccagcctcccctaccatccctcccccttccactggacatctggaccctaggcccccgcaccgac

SEQ ID NO: 9872 - DNA, 2300 bp, Homo sapien
ttttccatctgcccagggctattttcaggaggtgcctgggcgctcctctgtcccacctctcaagcctccccactcctggaccttcctactctgggggcagggcggctcccaccagggagggggaggtggaacacaccctggatttgtgtacaggagcaccattaaggtggggagagggccaccacatgctcatgacccaacctcaactttcccacagggttatatggccaccatggctgctcagggggtccccgagagtcttcgaggccgtgacaggattgtgtttgggaatatccagcaaatctatgagtggcaccgagagtgagtggtggaactctgacagctaggtgctggagaggggccctcatctggttgtcctgtatcctaacatcagcccattgcgacttaaggaatgtttggagaagttttgtagggcacactaccagggcagacagctcgaaactgctgggagtgggcgaggtgggggttgtgaaatgtatttgacctgctgcttctctaccaacccctccagctatttcttgcaagagctacaacggtgtctgaaagatcctgattggctggctcagctattcatcaaacacgtgaggcttgagggggcagggcctggggcggggcttaggaatgggctgggattctctggagatgcgtcctccctccttgcccaccctgctctctcttaaacattacccctgttaggagcgccggctgcatatgtatgtggtgtactgtcagaataagcccaagtcagagcatgtggtgtcagagtttggggacagctactttgaggtcagtagctgagatgtcttggtgggaaggaggacagaactggggctttccaggctgcataaccaccctgtccctgtccccaggagctccggcagcagctggggcaccgcctgcagctgaacgacctcctcatcaaacctgtgcagcggatcatgaaataccagctgctgctcaaggtcaggaccccctttttcctgggggcacagctggctggcacagctgtttcctcattcatctccccagggttcttagggctcccccagacttcctgagggccctcactggtgtcctcaggggaggatgtgagagcttctaagggtgtcctcgtgacctccctgagcatttcttctctctgtcttaggattttctcaagtattacaatagagctgggatggatactgcagacctagaggtgaggaccccagatcttccaggacacaccatgtgctccttatcctcctagtatctcatgggttcccccagccccttgggtggtttacagctgtctggtttttagggggaggctggttggggttgagataccgtctgaagaggcaactggccgaggaggcctctttcccaataatgactctcttcgcccaacaatgcgcctccctcacctgtgtcccagcaagctgtggaggtcatgtgctttgtgcccaagcgctgcaacgatatgatgacgctggggagattgcggggatttgaggtacggagatagggcaagaaactggaggcccgatgctcttctgccccagccctagcattcaggaggtccttatggggagttgtcttctcctggggctgaccccatggttggttgggcatgtcaggcgaggaagggaggagcagagaattgtcctttttcttgttctttttccaaggccactatccttttggtttcagggcaaactgactgctcaggggaagctcttgggccaggacactttctgggtcaccgagcctgaggctggagggctgctgtcttcccgaggtcgagagaggcgcgtcttcctctttgagcaaatcatcatcttcagtgaagccctgggaggaggagtgagaggtggaacacagcctggatatgtatacaagaacagcattaaggtggggagaaggccacgagggagggcttggagagagagagggcatgaggcctctgagaggatgtctcagaggagccagggagggcctgaggaatctgggggctgtctcctatctgccaattcaggtgagctgcctgggactggaggggaacctccaaggtgacccttgccgctttgcactgacctccagagggccagagggtgggatccagcgctatgtcctgcaggctgcagaccctgctatcagtcaggcctggatcaagcatgtggctcagatcttggagagccaacgggacttcctcaacggtgaagctctcatcctttcttcccgatgtgctctctcagccccttaacctcctgaatccctcactgcccagtctccagtac

SEQ ID NO: 9873 - DNA, 2300 bp, Homo sapien
agaggatcctgggggctgagaccttttcctggctctgggtctccttatctttgctctctgcgaggtcataagccatgttcatagtgagcagaaggggattcttcttcaagccatggacccaagagcggacagcccaaggggatcttcacccctcccaacttctgggagagccgctggaacagagcgagccaaacattcacacagccatgtccagatgccctgtcctgggtccttaatgcatctccgagtccactgtatccattcgtcccttgggctcagtcacgtgcacttgggcttcctcaacagacaatagactgctggggtgggagggtgaggaggagacctggagcctccctgtgggcccgaggtccctttagccgataatagggagggattcctaaggggggtacaggatgtagcgcccagataagacttctgcggaacaataggaggaactgaagaagggagacccaccctcactgcaccccaccccccgggctttggggtcgtggactgggggaccagaggatcatggggaggggtgccgaagattcttgtgaatgggggtggaggatcatggcaaacagcaggattctggagttagaacctttatatttctttaggaaccatagggacacatgagcggggtggctgacccctttgaacttagtttgaccacatatgtgcttttgaatgcctactttgtgaacagcatttgttttttgtttgtttgttttttgttctttttgagatggagtcttgctctgtcgcccaggcttgaatgcagtggctccatctcggcttactgcaacctccacctcctgggttcaagcgattatcctgcttcagcctcctgagtagctggaattacaggcacctgccaccataaccagctaatttttgtatattttagtaaagacagggtttcaccatgttggtcaggctggtctcaaactcctgacctcaggtgatccacctgcctcggcctcaaagtgctgggattacaggcgtaagccatttcacctggcctgtgaaaagcatttgaatgtgataaatggtgcttcagtttttttggttcctaagaaaaaaatatcctgtgggttcagtatttcccctgaggccctgaactaggcccagccactcctcacagaggtgtgggtgctggttctgtcattatccctctccaatacatgtggctgcattccatgtcagtaggacatgaaactgctttttggaaccagctgtgccccatgaagatgtgggtctgggtgaggttcaggatgggcgctgaacttttttgctctggctgggagaatgtagtggctcagggaaggaccagtgacccaagaggaaccagcctctctctccgcccaaggtgccgatggggaaaggaaccgggagttaagtgaaaagtctaaggaagggtaaatagcgggtgttgagtgtcggggtgcgcttgcctttcggattctctctctctaatatctacacatttccacagccaccccagagccagcgatcagatccggccaaggatgtctgcagaaacgcctaacatagagactctccctctccaagccgcggctctcgccagacccgagaaggtcctcaagcgagggtgacctcagggccggattggaccctgcttcgtgggaggcgggactcagggcttagcgggcggaggagtatttaagaccgggcggagttggaggtggccaagggcagaatgagcgggattcagggcaccaggacctacccaggcgcgggggacacctctgaccttaagtaccccttggcgaccaggctcagggaagctctcaccgaggctcggttccatcagctcttcaggggcgaagagcaggaaccggagctacctgaagagcgcggctttccccggctcttcgggctgtggaggctgcgggctcgcgcttgttccgggacaggggcgtggcgcctgctgctggctcggctgcccgcgctgcactggctgccccattaccgctggcgggcctggctgctcggagatgcggtggccggagtgaccgtgggcatcgtgcacgtgccccagggtgagaggccctaacagcagcctgtcgggagcacaagctctagagggcttccgggaggaggcttagggagctgggaatccgggagcagatggtgggttcctaccgtcgagggtgggagagagggatctgaggccaagtttgaggtaaggactgtggagctccatcagatccccatccccacctcccctcatctgcgcaatcctgcgagaagccttagacaggttctggctc

SEQ ID NO: 9874 - DNA, 2300 bp, Homo sapien
ctgggggccaggcgttgtgcctctctccggttctctgagccagaacctgtctaaggcttctcgcaggattgcgcagatgaggggaggtggggatggggatctgatggagctccacagtccttacctcaaacttggcctcagatccctctctcccaccctcgacggtaggaacccaccatctgctcccggattcccagctccctaagcctcctcccggaagccctctagagcttgtgctcccgacaggctgctgttagggcctctcaccctggggcacgtgcacgatgcccacggtcactccggccaccgcatctccgagcagccaggcccgccagcggtaatggggcagccagtgcagcgcgggcagccgagccagcagcaggcgccacgcccctgtcccggaacaagcgcgagcccgcagcctccacagcccgaagagccggggaaagccgcgctcttcaggtagctccggttcctgctcttcgcccctgaagagctgatggaaccgagcctcggtgagagcttccctgagcctggtcgccaaggggtacttaaggtcagaggtgtcccccgcgcctgggtaggtcctggtgccctgaatcccgctcattctgcccttggccacctccaactccgcccggtcttaaatactcctccgcccgctaagccctgagtcccgcctcccacgaagcagggtccaatccggccctgaggtcaccctcgcttgaggaccttctcgggtctggcgagagccgcggcttggagagggagagtctctatgttaggcgtttctgcagacatccttggccggatctgatcgctggctctggggtggctgtggaaatgtgtagatattagagagagagaatccgaaaggcaagcgcaccccgacactcaacacccgctatttacccttccttagacttttcacttaactcccggttcctttccccatcggcaccttgggcggagagagaggctggttcctcttgggtcactggtccttccctgagccactacattctcccagccagagcaaaaaagttcagcgcccatcctgaacctcacccagacccacatcttcatggggcacagctggttccaaaaagcagtttcatgtcctactgacatggaatgcagccacatgtattggagagggataatgacagaaccagcacccacacctctgtgaggagtggctgggcctagttcagggcctcaggggaaatactgaacccacaggatatttttttcttaggaaccaaaaaaactgaagcaccatttatcacattcaaatgcttttcacaggccaggtgaaatggcttacgcctgtaatcccagcactttgaggccgaggcaggtggatcacctgaggtcaggagtttgagaccagcctgaccaacatggtgaaaccctgtctttactaaaatatacaaaaattagctggttatggtggcaggtgcctgtaattccagctactcaggaggctgaagcaggataatcgcttgaacccaggaggtggaggttgcagtaagccgagatggagccactgcattcaagcctgggcgacagagcaagactccatctcaaaaagaacaaaaaacaaacaaacaaaaaacaaatgctgttcacaaagtaggcattcaaaagcacatatgtggtcaaactaagttcaaaggggtcagccaccccgctcatgtgtccctatggttcctaaagaaatataaaggttctaactccagaatcctgctgtttgccatgatcctccacccccattcacaagaatcttcggcacccctccccatgatcctctggtcccccagtccacgaccccaaagcccggggggtggggtgcagtgagggtgggtctcccttcttcagttcctcctattgttccgcagaagtcttatctgggcgctacatcctgtaccccccttaggaatccctccctattatcggctaaagggacctcgggcccacagggaggctccaggtctcctcctcaccctcccaccccagcagtctattgtctgttgaggaagcccaagtgcacgtgactgagcccaagggacgaatggatacagtggactcggagatgcattaaggacccaggacagggcatctggacatggctgtgtgaatgtttggctcgctctgttccagcggctctcccagaagttgggaggggtgaagatccccttgggctgtccgctcttgggtccatggcttgaagaagaatccccttctgctcactatgaacatggcttatgacctcgcagagagcaaagataaggagaccc

SEQ ID NO: 9875 - DNA, 2300 bp, Homo sapien
taagccctggtggcactgggtagagagggcctcgctctgggggtcccgcgccggggcgcatgagccctggcacggggccctctgctcatcgcccctgccctcagacgctggcctccttgctgactgcgctgcctcggagcagtccggccgaactgaccatctccgcgctcagcctggcgctgctcgtgccggtcaaggaattgaacgtgagattccgagaccggctacccacgccgatcccgggggaagtcgtcttggtgaggatggccgtgcgcgccggccccctgcccgcgcagaccctgcggtcctgtgggaactggccgctgccgccccctggtggagtgcagagaggccacggaacagagggccggctcacactttccttggcctcctgcagaaggacgctttgaccttccacagcccccctcgacactgtcccacgtctctcacggagcaccccctagacctcttggagtttcctctgccatcctacagcgctcccttgaggtcttgctggtcacagcaccttctctgacatctgtcctcaccagggtccttccctgtaattcacagtgcatctccctctccaccctccaccgacatttctctctctccccaactaaataaacgttccgcgtctccacagatgccagtatatcactagatatcgtccagcttccctctttggaaggctcagtggcatctcttcatatccaccatccttcacagaagcgtcctcttacttccacggctccaggctctgtggcctcaggcatatgtcatccctctttcccagctctacactacaaatcagttgtcaggccctcatcccaaacacatccccgctcccccaggtgctgggctcctgcagccagctaggcctgcattatggtcctctctcatggtcagccccttctagcttctgccagggaccccatctcttcccatgccttcattttgctctctttttcaggtgcttctggcctccgtgctctgcttcacctcttctgtggacacaagataccaagtccagatagtggggctgttgcctggagggtaagagaatgaaaagatgccagctttctcttctcccacctctcccacccaacactccctcttatctccaccccccattttctctgccttccttatctcactgaagcacctaacccctcctcaccatggatccctccctctccagatttccccaacccctcctccccaacctggctgagctgcccaggattctggctgactcgctgcccattgcactggttagttttgcggtgtctgcctccctggcctccatccatgcagacaagtatagctacactattgactccaaccaggtgggactctgactgtggaccccaaccctctcatttgacttcccaccatgcctttgtctctcccacttcatctcactgtatccctccaggagttcctggcacatggtgcctccaacctcatctcctccctcttctcttgctttcccaactcggctacgctggccaccaccaatctactggtggatgctggtgggaaaacacaggtaagagggcatccttggatgaggagaaaggatgggccatccaggcaaggtggcggtggtggagaaacaggtggaagatggctagaatcccaggtggcacctatatagagaagactggggatctgtgagaaagggtgactgaggggatggaattatagataggagagatggaagataacaatgttccagtaagacctttgtaggctctaagcgctgaaaaagtttatggtgccccaggtgtggttcaaaataaaaacacaaaactataaaataaacttaagagataaaattcttatttttttcacacaatgacattgtcttttaaaaggaatatcacatatcaaagtctccccctaatatttttggtttcccttactttgctggtgccctaaacacatataccctgcttatagggtaacccaacagtggcttttaaggtggaggtgggctacaaaactggggaacttgaacaatggacatctacaaggagactggtgaataatgggcatttaattaattggggggagcgggagggttagatgtgaatggcagaatattaagaagggggttgtgtggaaggagatttgggagaagggagacttccgaggaagattaggcagagtgggcaggaagaccagctctcatgtgggggtgggaggctctcttccttttttgctcctgttcctccttttctctagctggcaggcctcttctcctgcacagtggtcctgtcggtgctgctgtggct

SEQ ID NO: 9876 - DNA, 2300 bp, Homo sapien
ccttgaggcagaggaggtgggctgactacctcgatgtcctggaatacagctacccctcccagccatgctcatgcctcctctgctcattaccttgggcagatagtaaaagaagggccccagccacagcagcaccgacaggaccactgtgcaggagaagaggcctgccagctagagaaaaggaggaacaggagcaaaaaaggaagagagcctcccacccccacatgagagctggtcttcctgcccactctgcctaatcttcctcggaagtctcccttctcccaaatctccttccacacaacccccttcttaatattctgccattcacatctaaccctcccgctccccccaattaattaaatgcccattattcaccagtctccttgtagatgtccattgttcaagttccccagttttgtagcccacctccaccttaaaagccactgttgggttaccctataagcagggtatatgtgtttagggcaccagcaaagtaagggaaaccaaaaatattagggggagactttgatatgtgatattccttttaaaagacaatgtcattgtgtgaaaaaaataagaattttatctcttaagtttattttatagttttgtgtttttattttgaaccacacctggggcaccataaactttttcagcgcttagagcctacaaaggtcttactggaacattgttatcttccatctctcctatctataattccatcccctcagtcaccctttctcacagatccccagtcttctctatataggtgccacctgggattctagccatcttccacctgtttctccaccaccgccaccttgcctggatggcccatcctttctcctcatccaaggatgccctcttacctgtgttttcccaccagcatccaccagtagattggtggtggccagcgtagccgagttgggaaagcaagagaagagggaggagatgaggttggaggcaccatgtgccaggaactcctggagggatacagtgagatgaagtgggagagacaaaggcatggtgggaagtcaaatgagagggttggggtccacagtcagagtcccacctggttggagtcaatagtgtagctatacttgtctgcatggatggaggccagggaggcagacaccgcaaaactaaccagtgcaatgggcagcgagtcagccagaatcctgggcagctcagccaggttggggaggaggggttggggaaatctggagagggagggatccatggtgaggaggggttaggtgcttcagtgagataaggaaggcagagaaaatggggggtggagataagagggagtgttgggtgggagaggtgggagaagagaaagctggcatcttttcattctcttaccctccaggcaacagccccactatctggacttggtatcttgtgtccacagaagaggtgaagcagagcacggaggccagaagcacctgaaaaagagagcaaaatgaaggcatgggaagagatggggtccctggcagaagctagaaggggctgaccatgagagaggaccataatgcaggcctagctggctgcaggagcccagcacctgggggagcggggatgtgtttgggatgagggcctgacaactgatttgtagtgtagagctgggaaagagggatgacatatgcctgaggccacagagcctggagccgtggaagtaagaggacgcttctgtgaaggatggtggatatgaagagatgccactgagccttccaaagagggaagctggacgatatctagtgatatactggcatctgtggagacgcggaacgtttatttagttggggagagagagaaatgtcggtggagggtggagagggagatgcactgtgaattacagggaaggaccctggtgaggacagatgtcagagaaggtgctgtgaccagcaagacctcaagggagcgctgtaggatggcagaggaaactccaagaggtctagggggtgctccgtgagagacgtgggacagtgtcgaggggggctgtggaaggtcaaagcgtccttctgcaggaggccaaggaaagtgtgagccggccctctgttccgtggcctctctgcactccaccagggggcggcagcggccagttcccacaggaccgcagggtctgcgcgggcagggggccggcgcgcacggccatcctcaccaagacgacttcccccgggatcggcgtgggtagccggtctcggaatctcacgttcaattccttgaccggcacgagcagcgccaggctgagcgcggagatggtcagttcggccggactgctccgaggcagcgcagtcagc

SEQ ID NO: 9877 - DNA, 2300 bp, Homo sapien
agaattgcagggccaaggtgtggggtgctgtgtcagtgtttatgggatgaatggagctgtgtagctgggctctgatgaccctcactacctacccccttcaggctgctggcttggaacaactgcagttgtgagtccagtggggggggcctccccctccccttccagaaacaagtccgagctattgacctcaccaaggcctttgaccctgcagagctgagggctgcctctgccacaagagagcaggagttccaggcctttctgtcgaggtaccagcttgaaagaagcgcatgactcctcagggggagagcagtgattgtgccgggagggagagaccctctccccccgactctgctctgtcctctccttcctccactgccaggagccagtccccagctgaccagctgctcatagcccctgccaactccccgctccagtaccccctacagggtgtggaagttcagcccctcaggagcatcttggtgccaggtagggaggagggtcccagaggatgacctcagccacagtgggggtggcagagcccaaggttgggtggggaagaatgggagatgattggaatgggaggtgggaacctctgatgaatgggggacttaagctcaaacggcggcttaggaggtgggaagtgaggacagaagggactctaggaatttcagaagactgtaactggggagttttgggggaaataatctattctttgctgactaaccattggttaggtggtggtcagggcaggccatagggcaagctttgacgggacgggctcaaaaatcagtcactgtaggctatgttatacagtgtgccctgctgaggcctcaataagaagaataggtggaaagttctctattgtgtgtggtgacagcagggagagaaaatgagaaagaattcagggctgcctatgtgattctgatccccccactcctttctcctagggctgagccttcaggcagcttctggtcaggaggtataccaggtgagagaaaacaagaaggcaaggaggccaagtaggcatcaagaatgctgggagggaggcagggctactaagggaaggatgggcgaatcagggaggcaagaagtgggtctggggcctaaccctgcactctccaatcccctcctaggtgaacctgactgcctccctaggcacctgggacgtggcaggggaagtgactggagttactctcactggagagggtcaggcagatctcacccttgtcagcccagggctggaccaactcaacaggcaactacaactggtcacttacagcagccgaagctaccagaccaacacagcagacacaggtgcaaggcctgggtggagagacgggcaggctgggcaaacagagaagaaccagaaaggctggagtgggcaaatggcagagggcatgggaggcatctgggctatggccagagctgtccagccacacaatgggtgcttcaactggaccagcagggccagagggagaaagggggcctttgttcatctggggctggagcaggccagagggaaacccgagccttgggtgtgtctcccctttaggccaactgtggggggccccaggaagagacttgtctaaggagttagaagactatattcccaacccaccccttactagagggcaaaggtctttactttcctgagatcccatttctcttccagcaaaagaggcctaaaagccctctttgcttctccccaaagctggtttgttgcactaagtttgcttccaccttagggcctttgcactttctattttctcagcctggaatgctcttccccagatttttgcagactggcttcttcttgtcatttagatctcagttcaaatgcctcctcttcactatcacattacttgtttgtcttattttccactcaatacttaccagtatctgaattttttaatttacttagcctggcaccagactgactaggttgctatcagttttgttgcttaatagttgtgtaaatgtggcaagttacttttctgtgtctcagcttttttttctgttgtaggaatctacttaatagggctatcatggggataaaatgagtgcatatatttaaggtaattttttaacgggtctggcacatagtaagtgctcaataaagattagcttttacttaaaattttctttgttgttttttctcctacccattagaatgtaagttccataaaggtaagaaccttctgttcttgtccaccaaggcctagaaaggtgggacacagagtaggcacttaaatattgattggctgaaaacagaatgttatcccacccttcagggtcaaatg

SEQ ID NO: 9878 - DNA, 2300 bp, Homo sapien
gttaatgggtgcagcacaccagcatggcacatgtattcatatgtaactaacctgcacattgtgcccatgtaccctaaaacttaaagtataataataataaaataaaattttaaaaaatagttattttccaactccatcagctccctccacatttattaattggcattctcccttctccttcattcatttaattaattaattaattaattatctatgtattatcagtgtggagtcatggattcctatgttttcaatggttcataattcattcctggtcatctccgctgggggcaccaaccagataaagtatacctgtcttatatgttacaaatattttttcacagtttgtcatttctctctcaaatttagtgtatgttaatttcttcactcaagtttttcatatagtcagatttattaatatttccctttacatctggcttagagatctcttccctactccaagatcataaacaaaacaaaaattccatgatttcttcttttgagacagagtctcgctctgtcacccaggctacagtgccatggcaccatctcagctcactgcagcttcaacttcccgagctcaagcaatcttcccacttcagcctcctaagtagttggactacaggtgtgagccatcttgctgggctaatttttaaattttttgtagagacgggggggggggggggtctcaccatgttgcccaggctggtctcgaactcctggtctcctatcgcagcctcccaaagtgctgagattacaagcatgagccactgcgccgggtttcatgatttctttcactacttttatgatttcacctttaatattaaaatatttaatacatttggaattttggtgtaagaagtgtagagattccactttcaccccagctgattagtcatttgtttgtataaaattcattcattcaataatccaccacacacacacacacacacatattttcgttatgttctatatttcttgttatatctttttttcctattgaatcttgatgcatcttttattagaaccacggagccacagaactccgattctcggcaatgtgaggtatcaggctatgacctaaggcttgcaagcagaactaccgccaatctggcctctctggggttcccttcctcctgcaaggttgcaccaagcggcagttcggggaaatagggccttcaattacccagtgtgtatctcttgagtgtctgttaaataatggggggcagggcggggaggagggggagagggaggctgtgcctcagtctttgttagccaggcagagcgtttattttccaggggttgtttcctttatcttcatcctaacattcaaacttgacttgagttttagcgcgcccccgccctacctcctcccaaagcccttatttgcccatccttgcctacaagctcagaacgagcaggcaatggaatggatgtcgtgggagcaggcggttgagatgccagtgtttggaggctaaggactgggggctgtgagcgaggaccttcccgcgtttgctccgcgcccccgcagtttcctccgcgcccactagaaggcgccggggcgctcgcattccccgcgcggagccgaagcagccgcaacgagccgggagctgagccgcgctgcgctgcggtgcgaagagccgggcggcggccagagccctccccgcgctgccagtgggacgcggagccagggatccccggctttgccccggggctggggtgcaacagactcttaacttggtcctcgcgccccgccaaccgcccccgggcaggaaacgcccagaaccaccaccgcgccgcgctccacaaaagccccgggagttccaagacgggagggatcgggcgcgctccagaggcaggagggtcccccacaccctcaggctcatgcccagctcccccatcgggcagcccccagccccatgaggaccctcaggccggggcgagagcccggcacagcccggaccgaaattttgccgctgccttagagcgttagacaggtcagtgcccgggggtgggtgggggtgggattggttggtgaggggaggaggaggaggcgggaggaggcgggaggaggcgcgcttcccggtccactctgtcccccgcgccgcttgccgaggccactcatcgggtcacctccgccgggggcgcccgccagcacgggcatgattctgcattttttcctgacaggctaggtgtggagccgccctccgcagcccaccccggcccaggtgatgctcagactgaggagtcgggggcgcgccggccagggcgggcggcgggcttggggactgccactgccc

SEQ ID NO: 9879 - DNA, 2300 bp, Homo sapien
catgttggccggactggtctcgaactcctgacctcaagtgatccacccacctcggcctccaaaatgctgggattacaggcatgagccaccgtgcccagcctgtttcttttatacagagaaaatattccttacttggggtctgtctgtttctttgtatttaaaatcaagttatgtattcccagccacatcactacataaatgatgtcatgctttctccggggaacatttctggaggcacatgatattcttctgtccctcattggtgatgttaattttggccagcaagtcaaggtgctgtctgcttttcccactgcgcggttacaatttttcctcttgcaacgaataagccaactatggggagatactttaagctacgtacataagctgcttctgtcaaactttccccctagaattagcattcattgataattcttgcccaaaccaacttttactctgatggttgcaaaatagttattttcatggggggaggggggaggaatagctttaggagatatacctaatgctaaatgacgagttaatgggtgcagcacaccagcatggcacatgtattcatatgtaactaacctgcacattgtgcccatgtaccctaaaacttaaagtataataataataaaataaaattttaaaaaatagttattttccaactccatcagctccctccacatttattaattggcattctcccttctccttcattcatttaattaattaattaattaattatctatgtattatcagtgtggagtcatggattcctatgttttcaatggttcataattcattcctggtcatctccgctgggggcaccaaccagataaagtatacctgtcttatatgttacaaatattttttcacagtttgtcatttctctctcaaatttagtgtatgttaatttcttcactcaagtttttcatatagtcagatttattaatatttccctttacatctggcttagagatctcttccctactccaagatcataaacaaaacaaaaattccatgatttcttcttttgagacagagtctcgctctgtcacccaggctacagtgccatggcaccatctcagctcactgcagcttcaacttcccgagctcaagcaatcttcccacttcagcctcctaagtagttggactacaggtgtgagccatcttgctgggctaatttttaaattttttgtagagacgggggggggggggggtctcaccatgttgcccaggctggtctcgaactcctggtctcctatcgcagcctcccaaagtgctgagattacaagcatgagccactgcgccgggtttcatgatttctttcactacttttatgatttcacctttaatattaaaatatttaatacatttggaattttggtgtaagaagtgtagagattccactttcaccccagctgattagtcatttgtttgtataaaattcattcattcaataatccaccacacacacacacacacacatattttcgttatgttctatatttcttgttatatctttttttcctattgaatcttgatgcatcttttattagaaccacggagccacagaactccgattctcggcaatgtgaggtatcaggctatgacctaaggcttgcaagcagaactaccgccaatctggcctctctggggttcccttcctcctgcaaggttgcaccaagcggcagttcggggaaatagggccttcaattacccagtgtgtatctcttgagtgtctgttaaataatggggggcagggcggggaggagggggagagggaggctgtgcctcagtctttgttagccaggcagagcgtttattttccaggggttgtttcctttatcttcatcctaacattcaaacttgacttgagttttagcgcgcccccgccctacctcctcccaaagcccttatttgcccatccttgcctacaagctcagaacgagcaggcaatggaatggatgtcgtgggagcaggcggttgagatgccagtgtttggaggctaaggactgggggctgtgagcgaggaccttcccgcgtttgctccgcgcccccgcagtttcctccgcgcccactagaaggcgccggggcgctcgcattccccgcgcggagccgaagcagccgcaacgagccgggagctgagccgcgctgcgctgcggtgcgaagagccgggcggcggccagagccctccccgcgctgccagtgggacgcggagccagggatccccggctttgccccggggctggggtgcaacagactcttaacttggtcctcgcgccccgccaaccgccccc

SEQ ID NO: 9880 - DNA, 2300 bp, Homo sapien
tgggtagcaatggtgttctgattcttaatcctaatgttatactgatttttaaaaaatgtattaacaaagcaacaacatgaagtcacatgttctgattttttttgtctgtatatgcaacttgttctttctctctggaagcttttagaatttttttctctgtgtccagtactctgagattctataatgatgtgtcttggtgtgggtttgatttgttgttctggatacttagggtgcctgttcaatttggagactgttcttcagtttgggatagtccttttaaatagtttttttgatgatctcttctgattctctgttctctttctggaactctaatttagaactcttatttagtccagaccttctggactgatcctttatttttatgttttctcctaaagcagaacaaatttgatcttcttcaactttatcccccagcctttttatagaatttttatttctgtaacatggttttagtttccaagagctctttttgcttatccgaatagtagttactctcaagtagtttcctgttgttattttatgaatgctctataatatctctttgagaagtctgatgatggattatttttaaatgctttgttgtttcagacggagtctagctctgtggcccaggctggaatgcagtgccgcaatctcagctcactgcaacttccgcctcccaggttcaatcaattcttctgcctcagcctcctgagtagctggaactataggcgcgtgccaccatgcccagctaattttcgtatttttagtagatacggggtttcaccacgttagccaggctggtcttgagctcctgacctcaagtgatccgcccgtctcggactcccacagttttgggattacaggcgtaagccaccgtgcccggcctatttttaaattttttatttttagtgttttttcccctcccttgcaatttatgtttcctctcatttgcttttcccttcttgtttgtttcttacttgtatattaaagtccttccttaaatgtctaatgatctctggctatttattttgaagagtaagaacactaaaaagctgattggaaagtggaatgagggctggggcacgtaggccaaagtgttacatgtggaattcattctagttatctatatcattaagagaactctgataagggtatctttgggatttttcgttttggctggtgagattccccagagagggttttccaaaggtataatcagcctcttgtttacctttgtttcgtaataaatattctcaagtttgctaaaccagttaacattcttctgtttgatttccagcttccaaaatgttgctgttgttgtctcctttccctttcttacggcctggagagtaatacataatttcaccttaactggaagcccatgtatgcatgtatgtatgtatgtatgtatgtatgtatgtatgtatgtatgtacgtacttatttgagacggggtttcgctgtgttgcgcaggctgcacttgaactcctgggctcaggagatcctcctgcctcagcctccggagtagctgataccacaggtgcgtgccaccacgtctggctgcccgcattatttctctaggatttttactggaggtcattttactggaggtcaactgcaggatcgtataggaaggttttgacacaaattttctgattgcctcaaagcaatatgtatatatgaaaagaggtaagcgtccgtataataattgtttgttttgcaacaagcatttaataactttcaccggcactgcgcacgctacctatctgcctcaatactccgcccggcggtgggcaggatataatgcaagagacgtctgaaaaagcaatgagatgcgcatgacagctgggcgaagacagagggcaaacttaaaaggaccaagcgcatagaccacgcctctgaaattggggaacgaggaggggtttgatcttgtcgatgattggctggtctctgaccaatcacggacagcgattgatatttctaatcgtcgtgatccacctccccaggaccttggagccacgtttacaaataggaatagggtacgtgggagggatagaacgtacagccaataaaatcatgtggcgccgatgggcgtgttgaggccgctgcctggcttagggcggaaacagattctctgcataagaaggggaacgaaagatggcggcggaaacgctgctgtccagtttgttaggactgctgcttctgggactcctgttacccgcaagtctgaccggcggtgtcgggagcctgaacctggaggagctgagtgagatgcgttatgggatcgagatcctgccg

SEQ ID NO: 9881 - DNA, 2300 bp, Homo sapien
gggtgacacagtgagaccctgtctgaaaaaaaaaaaaagatttagtagattttcttgagtaaacatttcttcatttgttatatgtccttaggaaaatttccaaagagtttaaatgctttatgtttgtttgtttgtttgtattgagacagagtttcactcttgttgcccaggctggagtgcaatggtgcgatctcggctcaccgcaaccttggcctcccaggttcaagcaattctcctgcctcagcctcccgagtagctgggattacaggcatgtgccacaaggctggctaattttgtatttttagtagagatggggtttctccatgttggtcaggcttgtctcgaattcctgacctcaggtgatccacctgcctcggcctcccaaagtgctgggattacaggtgtgagccaccgcgcccagccatgctttgtgtttttaaattttcatcagtaatggagtttccctgtggagtgtgcgaaatccctcatgctgccatttcagaagtaggaccgctcccactttttgtttttgagacaaggtcttgctttccacacgggttggaatgcagtgtggcatgatcatagctcactgtaactttgaactcctgggcttaagggatcttcctgcctcagtctcccaagttgctaagactacaggtgcacaccaccacacctcgctaatttttaaaaattttttgtggagatgagtctcactatgttgccaaggctggtcttgaatttttggcatcaagccatcctcctgccttggcctcccaaagtgttgggattacaggtgtgaaccaccagcctctcttacttttaatagttattttagaaattagaatattgcatgcttaatttatcaaaggccaatcaatctctttaccctctttctgaatgatataagaatcttagaattgtttgaagttttttaccatatgcacatatataaaaattacatatttatatacaaatatatatacactttaaaaaaaatacaggccaggccttgtggctcatgcctgtaaccccagcactttgggaggccaaggtgggtggatcacctgaggtcaggagttcaagaccagctgggctaacatggtgaaaccctgtctctacaaaaatacaaaaattagccaggcatgatggcaggtgcctgtaatcccagctcctcgggaggctgaggccggagaatcgcttgaacccaggaggcggaggttgcagtgagctgagatcatgccattgcactccagcctggatgacagagtgagactccatctcaaaaataataataataataataatacatatatgaagcaaataaaagtatatatatacacacacacaatatttatacaaaacaagaatatgaaacataaattggttacctacagttaagctgcctgaattcagttcctgtttttaccacttaaaggctggtcaacctgaacaagtgccttaactgcaccacacctgtttcttgaggcacgaagttgagaaaccaatatcgcctcactgggtctttgtgataagtgagccaatttatgtaaagtgccatatgcacagtgtatgcacaatgcttgacagataatcagtgcttagtaaaagacacctgctctaataactaaagcaaattattgttggtgattaagtgtattcatcctttctgtcctggcagttcctctgtgacgagggtgcaggtatctctggggactacatcgatcgcgtggacgagcccttgtcctgctcttatgtgctgaccattcgcactcctcggctctgcccccaccctctcctccggcccccacccagtgctgcaccgcaggccatcctctgtcacccttccctacagcctgaggagtacatggcctacgttcagaggcaagccggtgagtaattagagaaggaggagaagacggggagatacgggggcagggggtggcaaaagatcaagtattgaatagctggaggaatgtgttcctggcctgcttgcatgctgtttctcagtagactcaaagcagtatggagataaaatcatagaggagctgcaagatctaggcccccaagtgtggagtgagaccaagtctggggtggcaccccaaaagatggcaggtaggaccttgtttcacctgttccgtgaaactcacttccatttcttcccttcccctgatcttactgtcctgactgactggtggggtgggggggggtggaaaagtaccatgggccctcctcccttggtgatagaggaggggaagggaccccatcctatttgctcccttctgtctcacccctcctgtcag

SEQ ID NO: 9882 - DNA, 2300 bp, Homo sapien
ccctgtagagccgcagcctccatgtgaactggattcaggtctggtgctgtgtcctcagttcagtggcacacttgcagctgaacctcttggggctggtgggcaccaagggtcagaagcaattctacccaaagatgctggtgctaccaactaactcctcaaggtagataacaacatatggctgtgcccaacctgcactggctgctgacccaaccctaccctgtccagcccctctacctgagtaaacactttcagctgccctcgagaaatggtaggattggctatgtgctgagcctagtggcactgcagctcatggaggcagcaccggcttcaggccgctgtggccttggtggtccctttgatggcacggaggtggataaatgcctgcatcagctgacactgagtttgtggacaccagggacctctgcagctagctgggaaatctttcccaggaggtctcccaccccttccctctggaacaccccctgacgaggccaggggaggaacccctactctatgttctactctggtacctagtgctcacggtgagcaggctggctcggggcagccctcctcagagctggagcgcctttcaggtgccctctgaacagatactgttcagaatacagataaacagatgccaccaaggtcccctagctgtgcagtggaggggcaggtttcaaaatcagatctgtctccaaagttcctgctcttaaacaaagctgtcccatcttcccacccctctccatgggcctgtcctctcctctaagtaccatatcccaactctcccaggactggcatcatcttaagagtcagtgccttctctgttcccagggtccccactgactccaacctgcccacgtcctccactacatgaacccagaactgttgtacatgatggaaccacctccatgcccatgggtactgtcctgccaccagccccagtgggaggcacctctgcctgtccctgtccaaccccagtaccccatcttgaccaaggccatgccctgacctgcctccaagaacagaccagcagctcaccccctagacaaaatcacttcctctttaattgctgttgaagaagattcacaccactgcctccaaggagatgggggggcatttcccccttgcccccacctctctcccctccccaattacctggtcctttgcaaactattttagccagaaaaaaaaaaaaaaaaaaagaccggaaaccactgacacagacagcccaagggctgggttggctgagggaggcagggctgggccaggtaagtccgccctatcacccagtttgtggggaaggggcagggggcctggaaaccctcccagccacctcgaatcctctcagccctggctgggagaggtcacgggggtgaggaatggctctggagctgctccagtgggagggaggggctggacagaaagaataatgggggaggggtcccactgtaggggtgccccctaccccagatcaccacgggcgctgcacagtcacaggtacgcagtcacggtcacagacacaacccgagagcacccccaccccaacccaccccctgcccaccctgggcttcccctaccccaaaacgccctccccacgcccctgcccgcccccatccccatgttggggaacaaagcaataaattacaaggcccccgcagccctcttagcccgctcctgctccatcccttctccctcccaagatagtagtgggagggacccaggctcttggttccccccggactctttagcttccacccatgggtaggtgtaggggacgtcctggtttccactactcacggtccctttcacggaaagggttgggaacccccacccccatgagcagcaggggtcctgcccctcgctgcccttgcccccttcactgggcagtgagatgagcatggaaggggtagggtttccgtattggccccaagtcccggggctagccctcccatgtactaaaccctccctctggcgtggcgtcgccccaggagccagcctgggtatgggctcccgccctgggattgttgagctcgggcaggaccgggtcttctttccgcccctagggggcacaagcgggcatgtccaagcgcctaggagcccgtaccgctggggacctccccttccgcgaaccccgagcgggtagacccagagcaatccgagtgtggaaacaatggagagggggcgtgttgagctggggtctccatgcctcgttggggagagggaggtgagtttgtgtcttctggaaggcgtgggggctgtgccctcgtgggggtaggaagtgctcccgtggggcggggtgc

SEQ ID NO: 9883 - DNA, 2300 bp, Homo sapien
ctttgggacagtcgagctcaagtcttggccccgtcaaagtattaaatgtggtggtgtgagtgggaaagggagctgggtcatgagaacgggaaccgtccaggtacctgggggagacaagagatcctgggggaagggatttcagggcccccactttcccacttcatcttccccagaattggcagtgaccctgggtttgctctgtttaccgcggcccctgtccacccaatagatcgattttcacccttatccctaaatgccatacctcacaatcgcgcttcctaaccttggtgcgcgagaggagggggctaggttgttggaggaggtgagtccaagtcccaggaaatccagcccaggatttgggagagaaatccagccctggattttgcaccgccctcgcagacatcggtgctggtggagaaaaggtgggggggagatagggtgggggggcctgggggccgcctcctcctcaatgtgaggggagcgcccggacacagcgcgcatccggaccaagccgagcccaggcgaggcccccggactcttcgcccggatctcacgcccctcccctcccagaccccagacccgtgggttcccacccacctcccgttccctctttcctcccccgccgcctcctgtatctccatccccagcatcctccccgcgcccctgcgaatcccccgcacggccagccccactagcttcccaccctcctctagaccctctttccgaccgcatccgcggcccctgtcccttgagtcccaattccccgcccctgcctcccccgcacaggttcgtttcccctagcctccggtccccttttctgctcccttttcctctctctcccccatttgcccccactactgtcctccccgccctcccccacccatctcagcgcccccacccaggccggggtggacggtccggcgcgcctccctggagcagcaccaaggtcccggggctccaagagggtgggggcgcagggcggggagcatggggagggggcgccccatgtgatgggaggggggcgcaagcggaggcggcggaggcggcggcgacagcggagccgggccgggggctcagcggggtccgggggctgggggcagcgagcagggcggccccatggccgggcccccctgaggcagtccgggggagtcccctcccctccccagctcgggggtctccgggccccatgagccggggcgcgggcgcgcttcagcgccggacaacgacctacctcatctcgctgaccctggttaagctcgagtcggtgcctccgccgccgccttctccgtctgcggccgcggccggcgccgccggtgccagaggctccgagactggggatcctggcagcccccgaggcgcggaggagccgggcaagaagcggcacgaacgtctcttccaccggcaggatgcgctgtggatcagcacgagcagcgcgggcaccgggggcgcggagcccccagccctgtccccggctccggccagtccggcccgcccagtctcccccgctcccggccgccgcctctccctctgggccgtccctccgggacccccgctctccgggggactgagccccgaccccaagcctgggggcgcccccacctcctcccggcgccccctgctcagcagcccgagctggggcggcccggagcccgaaggccgggcgggcggcggcatccctggctcatcctctccgcaccctggcaccggcagccggaggctcaaggtggcgcctcctccgccggctcccaagccttgcaagaccgtgaccacgagtggagccaaagccggcgggggcaagggcgcgggtagccgcctgtcatggcccgaaagcgagggcaagcccagggtcaaggggtcaaagagcagcgccgggactggagcttcggtctctgccgccgccaccgccgccgccgccgggggagggggctctacagcttcgacctctggtggggtcggggctggggctggagcccgagggaagttgtcccctcggaaaggcaagagtaagaccttggacaacagtgacttgcatccgggaccgcctgccggctctcctcctccgctaaccctcccaccaactccgagtccagccactgctgtcaccgctgcttccgcgcagccccccgggcctgcacctccaatcactctggagcctccagctccggggctgaaacggggccgggaggggggccgagcatccactcgtgaccgcaagatgctcaagtttatcagcggcatcttcaccaagagcacaggagggcctcctggctccgggccccttcccggaccccccagcctgt

SEQ ID NO: 9884 - DNA, 2300 bp, Homo sapien
atggtgtcatcttggttctgtagggagggagggagaaactgctgagccccaggacagaacattggagggattggatacaggcctctgggagaacaaagggctcctggcatcctggctcagcccccccaccctcagccccccaccaggccaagcacgctgcgggctcctgcctccaagagccgcccacggcagcacttattatagtctcagctgcgtcaggagggtgggacgccaaatcaggggactgctgtgactccccaagtcccgggaaggggtctccaaggctgcagagagaccttccttcgcccatcttaccccacccccaaggggtctcaacctcttttccactttggcctaaccacttcaggattctcacctggctggaggatagagagccttgaactccaagacccctagaggggtgggggacacggagcagacggtttccattcactctgcctgcctcctctttaatcttctgaaagaatcccactcagcaaacctcaggagactgaaagggaaccctgaagaggccggctctcactgcctcaactgaagggtccttatacttggggagtgaaatcctccacctgtgggtagccaggtgtcagggcagtgcctccactaattcagcatcccgcggttggtcccctacccaccatacacacggattcctctctgcttctgcccgctgtttctgaggcactcttggagctacggttgctatggagactggatgcattttggcatgggggggtatcagtctaagacacatccttctccctcctcctagagctggagcctttgacttaccctgtggcctgggctcctccagcactcagatctctcccttctctcctaccctgctaagttccatgtttgtccccatccctggggaacattttccaagttcactttgggacagtcgagctcaagtcttggccccgtcaaagtattaaatgtggtggtgtgagtgggaaagggagctgggtcatgagaacgggaaccgtccaggtacctgggggagacaagagatcctgggggaagggatttcagggcccccactttcccacttcatcttccccagaattggcagtgaccctgggtttgctctgtttaccgcggcccctgtccacccaatagatcgattttcacccttatccctaaatgccatacctcacaatcgcgcttcctaaccttggtgcgcgagaggagggggctaggttgttggaggaggtgagtccaagtcccaggaaatccagcccaggatttgggagagaaatccagccctggattttgcaccgccctcgcagacatcggtgctggtggagaaaaggtgggggggagatagggtgggggggcctgggggccgcctcctcctcaatgtgaggggagcgcccggacacagcgcgcatccggaccaagccgagcccaggcgaggcccccggactcttcgcccggatctcacgcccctcccctcccagaccccagacccgtgggttcccacccacctcccgttccctctttcctcccccgccgcctcctgtatctccatccccagcatcctccccgcgcccctgcgaatcccccgcacggccagccccactagcttcccaccctcctctagaccctctttccgaccgcatccgcggcccctgtcccttgagtcccaattccccgcccctgcctcccccgcacaggttcgtttcccctagcctccggtccccttttctgctcccttttcctctctctcccccatttgcccccactactgtcctccccgccctcccccacccatctcagcgcccccacccaggccggggtggacggtccggcgcgcctccctggagcagcaccaaggtcccggggctccaagagggtgggggcgcagggcggggagcatggggagggggcgccccatgtgatgggaggggggcgcaagcggaggcggcggaggcggcggcgacagcggagccgggccgggggctcagcggggtccgggggctgggggcagcgagcagggcggccccatggccgggcccccctgaggcagtccgggggagtcccctcccctccccagctcgggggtctccgggccccatgagccggggcgcgggcgcgcttcagcgccggacaacgacctacctcatctcgctgaccctggttaagctcgagtcggtgcctccgccgccgccttctccgtctgcggccgcggccggcgccgccggtgccagaggctccgagactggggatcctggcagcccccgaggcgcggaggagccgggcaagaagcggcacga

SEQ ID NO: 9885 - DNA, 2300 bp, Homo sapien
cctccaccttttcacttgggggtaggctgatcaacaactttattatctagtaagtgctttgacaaaccgtccttctcacgggggtagggaaaggcataatccttctcttccccaggagaaagaaacagtaggaacaaaaaagaaaaccctccaatcaactcaacagaatgatttaagtttgtgtgtacttagattctatagacttactgccacagtcagattgccacttcctagctgcgtaacctttggccaggcacttagaaactgtctgtgcgtgtttcctcatctgtaaaatggggataaataacaacacaccctacctcttgggttgtaagaattaaatgagttaatatatgtagaatacttagaacagtacctggcatatagtaaacactcaatgttagttattacttttcaggtcattttacaggttcctgtgggcaattccaacctcaattcccttatctttaactacacagtatttatataaactcttacagaaattaataccaaaaaggtatgcaggagaatagatgtttgacagggcgagagaggtgtttgggtcttgaaacaaggtaattaagttattatcattattattattttgagacagagtctccctctgtcgcccaggctggagtgtagtggcgcgatctcagttcactgcaaccttcacctcccgggttcaaacaattctcctgcctggctcagcctcccgagtagctggattacaggtgcccgccaccacacccagctaatttttttgtatttttagtagagatggggttttgccatgttggccaggctggtggcgaactcctgaccttaggtgatctgcccgcctcggcctcccaaagtgctacgattacaggcgtccggtggaaacaaagtaattaggtcaaactacccgctacctcctacctcccaccccctcactccccacctccatccccttcctaccccaagtcccatcttcattgtctccttcagttcctcatctaccttcttttctttgaggtcctaaatcaagggcaagacaatgatattagaaggggaactggttgacaagcattttggttgtgtggtgtagtgaaaagggtatcaaaattataaccaatctgggctttatgtgcttggtaaaaaataaaaataaaaatgtaaaaataaaatcagaagacctaaatccatgtctttgtttcacctcttaatggcttctctgagccttagtttccttttatgcaaatagggataaataatcctactcctcagggctgtcatgaggataatatatatatgaaagtatgttgtaaactattaagtgttatagtcatgttaattattatgaaagcgattggacatggaacatggtagtttttgtctttttataggttactttcctccttcataactgattttccccataatcacttggcctatttatttattttatttatttttgacgtggagtttcgcttagtcacccaggctggagtgcagtggcgtgatcttggctcactgcaacctccacctcctgggttcaagtgattctcctgcctcagcctcccaaggtgctgggattacaggcatgagccaccacgcctggcctcacttggcccttttaaacaggaggtggcctcagtgggtagctgcctgaaaaagggttacatcgtaagacataaggatacagggctcattgggatgtgtagagagggcaatgggtacaagtgtatactagaatgcagggctgtgagggtaacagaccaaatgtgcatgaattcctgtgagagtttgaaatccgcaggtcatcaagagtttaggattgcacctcggacctagcttgccatattctcccagaaccaacacccatcttaattagccacctcccacaggaggccctgggacactgttaagatttctccatccacctggctgggaaatcatagcagggactggctggcagggttgatgggccaacactagagggggtgggaggtgcaggaggtagtgctgtcccaggctgtgggtttgaaactcaccagtcaggaagtgaggtcgacagacggaagggcgggcaggggcggggagttctgggcacagcagaaggggccttctgaggtttgggggctgtagggccatgggcctcagggccagaggtggttgttagcctggcaagacaggtctgggcaacatgcatgcccagaggcagttcgttgtagctgcagtgagagcagaagtcagacgacatgaggtggccaagcaggctctaaaccgcctcaggaagctggcagagagggtggacg

SEQ ID NO: 9886 - DNA, 2300 bp, Homo sapien
atgtccaatcgctttcataataattaacatgactataacacttaatagtttacaacatactttcatatatatattatcctcatgacagccctgaggagtaggattatttatccctatttgcataaaaggaaactaaggctcagagaagccattaagaggtgaaacaaagacatggatttaggtcttctgattttatttttacatttttatttttattttttaccaagcacataaagcccagattggttataattttgatacccttttcactacaccacacaaccaaaatgcttgtcaaccagttccccttctaatatcattgtcttgcccttgatttaggacctcaaagaaaagaaggtagatgaggaactgaaggagacaatgaagatgggacttggggtaggaaggggatggaggtggggagtgagggggtgggaggtaggaggtagcgggtagtttgacctaattactttgtttccaccggacgcctgtaatcgtagcactttgggaggccgaggcgggcagatcacctaaggtcaggagttcgccaccagcctggccaacatggcaaaaccccatctctactaaaaatacaaaaaaattagctgggtgtggtggcgggcacctgtaatccagctactcgggaggctgagccaggcaggagaattgtttgaacccgggaggtgaaggttgcagtgaactgagatcgcgccactacactccagcctgggcgacagagggagactctgtctcaaaataataataatgataataacttaattaccttgtttcaagacccaaacacctctctcgccctgtcaaacatctattctcctgcatacctttttggtattaatttctgtaagagtttatataaatactgtgtagttaaagataagggaattgaggttggaattgcccacaggaacctgtaaaatgacctgaaaagtaataactaacattgagtgtttactatatgccaggtactgttctaagtattctacatatattaactcatttaattcttacaacccaagaggtagggtgtgttgttatttatccccattttacagatgaggaaacacgcacagacagtttctaagtgcctggccaaaggttacgcagctaggaagtggcaatctgactgtggcagtaagtctatagaatctaagtacacacaaacttaaatcattctgttgagttgattggagggttttcttttttgttcctactgtttctttctcctggggaagagaaggattatgcctttccctacccccgtgagaaggacggtttgtcaaagcacttactagataataaagttgttgatcagcctacccccaagtgaaaaggtggaggctccttccacttatatttatgtaaatgagactcttcctcttgcctgccgtttttttgcaagccctagatcaggcgtgtactctgaaaatgctgagcacacccctctgtgcacttgtggcaatgccacatacaggaatgcgctggcctgaggccgctatttccacactgaatttctggtatattcacacccctttaggaggagatatggaacaggacatgggtactagaggacacacaaacgtgtgatgatttgctgggtgttgctgtgtccaacccgcggactctgcggccgggctaaataagctcaatatgtggctcctttgggtgttcccgagcgtgacgcaataacaaaacaatggcgtcatcgtgaggtcactgcagaacagggggaagggggtggggaagggccctccttctacgggcggagccctttttgcccagctctcagagcggccccctacccgcccctcccgccgtctccccttcacctaagttcctccagagccgtctccctgggaattagccctctcctaactccgaccacagaaagctcagctttcaacctaagcttttggagtttaggctgtagtccctaagagagtctctagaaaccctgcccctagttttaagtttcgcccaatgaaaaaacaaaaggagagggacagaaggcgggtcggtgacgtaatgcgggttgattggcatgcaggccttggacgtccaggattagccacgcatttcgccaatccagaggcaggggagggacggtgcaggcgcagagtattgggtttggctggcctcgatttaaagagacagaagctgtcggggtcctggaagacggtccccaataccctccccccaagtccttgggaccacttgggtccccagagctggggagatggtttgtggcggctttgcctgctccaagaatgcgctttgcgctc

SEQ ID NO: 9887 - DNA, 2300 bp, Homo sapien
taggacttttttccataacctttcctctcagtacatgatcatccttggtttggtcttcatcttccaatttgtaatctcttgctcatgtctggctattaaccgaagcaaacaggtaagacagtaccctttcaagtacttacttgctttttaaaattttcctcttaacctcgaactccttccttagtctggccccaactacccaaagatcatccttaggtgcactgcttctggcctcttgggctatttgcttcctctgggatgtctggttaattttccatgaggatgatctagagaacctcaaaaggtagatatttatcgtgtctataattgttgcacaccgttatgcttctgtttgacttcctttgctgggctagggaaattgaggcacttgaactgataacaggatgtagggagacttaatttccctctacccatatctttcagacagatgtcatcaatgcttcttggtgggtcatgagcaacaagactcgggatgaactggaaagaagttttgattgttgtggcttattcaacctcacaaccctgtatcaacaagattatgatttctgcactgcagtgagtgtgttgggggtggtgcagcagccaggggaggtaggaaactgggtaaggacaatgcccaagttggcaaatttagtttgaatgtcattgtttctctctctacaagccctcttgtattggggctgtgttggtgggaggtgggggtggatagaggctggggaattagccaagtaggattttagtttgtaggacactggtcagataacagtaaagtttctagggacattcggcataggtattagtcactagcaactttacattcacaactttgcattcttcacgttttatcctcagatctgcaagagccagagccccacatgccagatgtgtggagaaaagtttcttaagcattcagacgaagccctgaaaatcctagggggtgttggactcttctttagctttacagaggtaacattctccagttccctcacacacatcctttttgagactgagaattaattgatacttatctctctccctttgttcctacagatccttggtgtttggctagcaatgagatttcggaatcagaaggatcctagagccaaccccagtgcctttctatgagactttggatccttctgacttttcttctgctctctctaagctttctcttcctcccttagggaatatctagggtctgtaaccgttttggtttgagaaaaaggaaaggccccttgtcacatcctctaaaattgatggaatagcaagactttatgccttgacatattttagtgggagccagactataaggaataaaaggaaaaactttcttcctctctctccaagaggatatgggaagcttctgtgagtgcataggatgggggctggagtcattcttagctgtttcccttcctctgtccatatactggatcacctcaacataccctggtgtggctctaagggtaaatcagggatagggccaaggagaaaacaaccaagaactctttcctgtaataagcaggatccagtttgagaaagtttagcgaatataaaagtaaaagccatttaaaaatctatattctttttttttttttgacacagagtcttgctctgttgcccaggctggagtgcaatggcatgatctcggctcaccgcaacctctgcctcccgggttcaagcgatcctcctgcctcagtctcccaagtagctgggattacaggtgtgcaccaccacgcctgactaattttgtatttttagtagagacagggtttcaccatgttagtcaggctggtctcgaactcctgacctcaggtgatccacccgcgttggcctcccaacgtgctgggattataggcgtgagccaccacgccccgcctaaaatccatattcaaagaagcaatttcagttcctttctaagctttgtcagtcaaggggctccactgacttcctaggccctgtaatttaaccagtctttaaggttttgcaggaaagtcccttcttccaagtggtttttccaaatcgcacaatggcaaagccaaacagaggaagaaacattaaaaaaaaaaaaaagaccattatttctttgttttgtttttcctgtataaaaaaggaccccaaatataaaggtagggaaagggacaagagggaacataccccttagtgtagagaaatgggaaggagaaggagaagcctcaaaaggagaggtgggaggggaatgtcattaaggcagcaaagtaatctctgtagaaagatggaggaggaccctccatagcctcaga

SEQ ID NO: 9888 - DNA, 2300 bp, Homo sapien
ctacactgaagtgaacaatacacacacttacccctttccttttatggagacttccctctgaggccaagttctacccccatcacatttttttctttcttacacttacattctccctctcctcccctttgcaaagctgagggaaaagggattccaggggagctcattgggtcaaacatactgggaaaaaatttaattagtgaaagagtaattaacagaagaagggaggggacagagcctgggacagactgccaaattaaggttcctcaatagaaagtgatggagagacagtaatgttcccatgaagtattcaaatgttttggatggactaatgaatgaatcagaaaaaggggctgggacccaagcagacagagaggacgtcttctgttgcaaagacagtaagctgtgaaggtcttatgtggaaggtgaggctgaagtggggaatgctggtgtgggaagggagtttgaaaaactcacagacaattatcttagccttccagaaggcttacaaagcacccacccctagcaaggtagccaataaaacattcacctcttgagccccttagtcagttcagtccttgaggtttttcttactagtgttccagctgcccttgccaggaggggcccagggctacaagtatcaggatggaaagaggaggcatctgtattaatatgtattctattttgctctaagtcatggtttatattcatcttctagtttgaactcttatattctcagccagatggttaaggaaaacagaagttagagtggaaggagtggcaaatagggtaataaaatggctttagattttagacaaattctcacaaatgagacactaaccgctttcctcctttactcccatacccccaaagggctgggagataaagaccttggagccaataaaacaaagtaggagaaatctacttgtgtctacctaggtgtctgggcagaggccatttgggaacaagtgtgttctggacagtgctaagtgctaagaaagcggcactagggaaaaagagggaagcacaataactccaaatgagtagtcacaaggtttgcagaagggggcatgtcattttcattcattgtggtggtctggagggtgcagggggtgtggtggtaactttcttgcacatgtgcaatcctgtatccgtcttatatatgatgtgataaataatatcatatacatacatatatacatagaagcatatatgcacacatacaaatatcacataatcatagaaccttcctactggaaaaaaaaaaaaaacttaaaaggtcaagtattcctgtctcctgctcatcaataacttctctgccagatggcctcaggtctttgcattaacactcccagggaggtttggaagttggaaaagtgagaggattaccttgtcactgagcctgttggattactgtattaatctgccttccgtcatcctttaatcgtagttttgccctcaaatgggcattgtttactccctattgtagaagaccccattgttggctacatctttatagatagtcgtaccactactttaaagggccagtgacagacaccaaaaacaaaataaaaacccacatacacactggaagcaagcactcagtaaaatgttgtagaattaatgaatgaaacaatgacacaaatgagagtatgttttctcatggtggagcgaaaaggtgacagcatcacctctggtaccccaactcccaccccctccccaatgcagacaggctgaaagaccggtagtgagactggagttcagccttcagaccggtagtgagacaatccttcagccgggagttgggctctgggtggcctaggttgccatggcaccgcctcgggctccaccctctcttgtccccctcaccgctccccccctgcagcgggggttgtggcagccagtcacgtgcccgccgcgtagccacacctctgctcctcagagcaatgtcaagcggtcacgtgtgatagcaacagatcacgtggctgccatcgcccctccgcccccttacactcttcgccctcctcccagtcgaagcacctcctgtccgcccctcagcgcatgggtggcggtcacgtgcccagaacgtccggcgttcgccccgccctcccagtttccgcgcgcctctttggcagctggtcacatggtgagggtgggggtgagggggcctctctagcttgcggcctgtgtctatggtcgggccctctgcgtccagctgctccggaccgagctcgggtgtatggggccgtaggaaccggctccggggccccgataacgggccgcccccacagcaccccgggctg

SEQ ID NO: 9889 - DNA, 2300 bp, Homo sapien
acaatagggagtaaacaatgcccatttgagggcaaaactacgattaaaggatgacggaaggcagattaatacagtaatccaacaggctcagtgacaaggtaatcctctcacttttccaacttccaaacctccctgggagtgttaatgcaaagacctgaggccatctggcagagaagttattgatgagcaggagacaggaatacttgaccttttaagttttttttttttttccagtaggaaggttctatgattatgtgatatttgtatgtgtgcatatatgcttctatgtatatatgtatgtatatgatattatttatcacatcatatataagacggatacaggattgcacatgtgcaagaaagttaccaccacaccccctgcaccctccagaccaccacaatgaatgaaaatgacatgcccccttctgcaaaccttgtgactactcatttggagttattgtgcttccctctttttccctagtgccgctttcttagcacttagcactgtccagaacacacttgttcccaaatggcctctgcccagacacctaggtagacacaagtagatttctcctactttgttttattggctccaaggtctttatctcccagccctttgggggtatgggagtaaaggaggaaagcggttagtgtctcatttgtgagaatttgtctaaaatctaaagccattttattaccctatttgccactccttccactctaacttctgttttccttaaccatctggctgagaatataagagttcaaactagaagatgaatataaaccatgacttagagcaaaatagaatacatattaatacagatgcctcctctttccatcctgatacttgtagccctgggcccctcctggcaagggcagctggaacactagtaagaaaaacctcaaggactgaactgactaaggggctcaagaggtgaatgttttattggctaccttgctaggggtgggtgctttgtaagccttctggaaggctaagataattgtctgtgagtttttcaaactcccttcccacaccagcattccccacttcagcctcaccttccacataagaccttcacagcttactgtctttgcaacagaagacgtcctctctgtctgcttgggtcccagcccctttttctgattcattcattagtccatccaaaacatttgaatacttcatgggaacattactgtctctccatcactttctattgaggaaccttaatttggcagtctgtcccaggctctgtcccctcccttcttctgttaattactctttcactaattaaattttttcccagtatgtttgacccaatgagctcccctggaatcccttttccctcagctttgcaaaggggaggagagggagaatgtaagtgtaagaaagaaaaaaatgtgatgggggtagaacttggcctcagagggaagtctccataaaaggaaaggggtaagtgtgtgtattgttcacttcagtgtagtggaggtgagggcaggagagtaccaggaaagacactcccatccctttagcacgcctacctcccctgctccctccctcacctccttcacacattacaatcacaggcttctgtttctcagacaatccgattccattccttacacacctctctttcccagtccccatcgatcacacttttcagccctttgggtaaagtgtatattgcttgagtcccacccctgcccatgtacctccctcacacctccgacacttgcacagctctttctttgcacattcccattttgcacaagcctcaccctccctggtacacctgcgtcatttaaccactcaccttccatgctcacccgctcatcccccactcccagacacacacctagtcaacttgtgtgcacactccccttccttggccactccccttcctccaccctcctcgggatcccacacttgcccccgcccctgggacacctgctcgtgcggggcagggcggggatgcgcagccgcggccccttctcctctccccctccccgccccgcccctccctccatccttcacccgctccccggcgcccgccccgcccgcccgccactccgggggggtctccgccgccgccgccgccggaaggagccgccatttgccaccgccgagcgcacgggccgagccaagcctgatcccggagccggagggggactgggaccgagagaacggcgatggggggcggccccgccgcaggaggacccgggcgcgtaaccccgggggcccggcccgctccagacccagacccgcggggtgcggcaccctgagcccccctccccgcccc

SEQ ID NO: 9890 - DNA, 2300 bp, Homo sapien
caggcggggggcggccccgggccgagccgcaaccccgggggggccggggaggcggctgcggctgggcgcccttcgctggctgctccacccgggacggcgacggcgacgaggaggagtactacgggtcggagccgcgggcccggggcctggccggcgacaaggagccgcgggccggacccctgccgccgcccgcgccgccgctgccgcccccgggcgcgctggacgccctgtcgctcagcagtagcctggacagcggactccgaacccctcagtgccggatctgcttccagggcccggagcaggtcaggcctgggcacctggccgggcgcggagggtggaggcgcgcacctggggtgtcagcggagaccgcgagcaggcgcggcgcctaaggaggctgggcgggccccaggacacggagtgggaatggggtgaggccgaggggctggcaggggactcctggagcgcttgtttgtgtcggagggtcaagggtccccaggaaggggtggggctttctccccggagagcgcaaaatccctctcacccattaacagggactgctgttctctcctatttccctcgccccagggtctccgtaagctaaggggacctgttctcttgcaggtgggcagaaaggagagtgcttctgtgccccccttgaagggaggggcccagccagcgcccttgcttagctcagtatttctccccgtggggcactttttttcacttcccattctgcaactttctatctcattctaaagagtattctttgttaaaattttatgggcaaagttgtcccagaatagtgccagggggtgtctctgtgtagtgagaattgattccatgattaaagggaaacacccttcactcccacctccgcgatttctcccctttttagtacgtggaaaccgaggaccataacccatcccagtttgcgccagatctgtgaagtaactttacaatgatggggtgggggaaggaaagcatggctcagaagctctaacactcccctccctccagatcctaagaggaagcctttcttttgagaagtcttaaagactacccatcccaaattctaggaaaagagaagacccagcccttctcccctctaatccccccatccctttccatctttcatctctttggtatgggaagtttcccttgatctccaagggaagcttcttttctgttgcagccttacttagcctcttgccctgtcttgggtgaaaggcctgagttatttaaggtgggaaagtgacctgaagaggaggtttccctgtcggggagcgcggctgagtggggtcggggtggtgatggctgacagggcccctcctcactcttcctccagggggagctcttaagcccctgccgctgcgacggctcagtgcgctgcacgcatcagccctgcctcatccgctggatcagcgagaggggctcctggagctgtgagctctgctacttcaagtaccaggtcctggcgatcagcaccaagaacccactgcaggtgaggtgcaaggagaggactcggagattgggcgaggaccttttagctattggactcagggaccctccaggaagcctatttcatttactcttttcccaaagccacccttccccgccagttaccacagtctcccgtgtgtctgtatatccttcctaagcccttaatttattcacagagatatttattgggtgccacttatattccaggcactgttctaggcactgggacaatcaccactccccacccgccacaaaaaaaaagaaaaaagaaagaaaagaaaaaaaaaatgctgggcgcggtggctcacgcctgtaatcccagcactttgggaggccgaggcgggcggatcacgaggtcaagagtttgagaccagcctggccaacatggtgaaaccccgtctctactaagaatacaaaaattagccaggcgtggtggctcgtgcctgtaagctactcgcgaagctgaggcgggagaatccttgaacccgggaggcagaggttgcagtgagccgagatcacagccactgcactccagcctgggcaacagagcaagactccgtctcgaaggaaaaaaaaaaaaaagaaaagaaaaaatgatgttgatgatgatagcaaatatgtagtgttttctgtgtcaagttttggtgtgtattaactcttaatcttcacaataatcttattagatactattattatccccttttacaaacgaggacactgatgcacaaagatttgaaaacttacccaaggttacttagccagtaagtgatggagtcaagatttaggattcaaatctagat

SEQ ID NO: 9891 - DNA, 2300 bp, Homo sapien
tcctatttccctcgccccagggtctccgtaagctaaggggacctgttctcttgcaggtgggcagaaaggagagtgcttctgtgccccccttgaagggaggggcccagccagcgcccttgcttagctcagtatttctccccgtggggcactttttttcacttcccattctgcaactttctatctcattctaaagagtattctttgttaaaattttatgggcaaagttgtcccagaatagtgccagggggtgtctctgtgtagtgagaattgattccatgattaaagggaaacacccttcactcccacctccgcgatttctcccctttttagtacgtggaaaccgaggaccataacccatcccagtttgcgccagatctgtgaagtaactttacaatgatggggtgggggaaggaaagcatggctcagaagctctaacactcccctccctccagatcctaagaggaagcctttcttttgagaagtcttaaagactacccatcccaaattctaggaaaagagaagacccagcccttctcccctctaatccccccatccctttccatctttcatctctttggtatgggaagtttcccttgatctccaagggaagcttcttttctgttgcagccttacttagcctcttgccctgtcttgggtgaaaggcctgagttatttaaggtgggaaagtgacctgaagaggaggtttccctgtcggggagcgcggctgagtggggtcggggtggtgatggctgacagggcccctcctcactcttcctccagggggagctcttaagcccctgccgctgcgacggctcagtgcgctgcacgcatcagccctgcctcatccgctggatcagcgagaggggctcctggagctgtgagctctgctacttcaagtaccaggtcctggcgatcagcaccaagaacccactgcaggtgaggtgcaaggagaggactcggagattgggcgaggaccttttagctattggactcagggaccctccaggaagcctatttcatttactcttttcccaaagccacccttccccgccagttaccacagtctcccgtgtgtctgtatatccttcctaagcccttaatttattcacagagatatttattgggtgccacttatattccaggcactgttctaggcactgggacaatcaccactccccacccgccacaaaaaaaaagaaaaaagaaagaaaagaaaaaaaaaatgctgggcgcggtggctcacgcctgtaatcccagcactttgggaggccgaggcgggcggatcacgaggtcaagagtttgagaccagcctggccaacatggtgaaaccccgtctctactaagaatacaaaaattagccaggcgtggtggctcgtgcctgtaagctactcgcgaagctgaggcgggagaatccttgaacccgggaggcagaggttgcagtgagccgagatcacagccactgcactccagcctgggcaacagagcaagactccgtctcgaaggaaaaaaaaaaaaaagaaaagaaaaaatgatgttgatgatgatagcaaatatgtagtgttttctgtgtcaagttttggtgtgtattaactcttaatcttcacaataatcttattagatactattattatccccttttacaaacgaggacactgatgcacaaagatttgaaaacttacccaaggttacttagccagtaagtgatggagtcaagatttaggattcaaatctagatgttttggtttcagagcacttgcccaatcctgcctttctaaagtaagacaaatggtgtcagacaagtgccacattctagatttaatcaaggcacagagaagacagatgttgatcctgcctgaaggttttagggaaggttcctggagcaccctgctcttcagggccacccatcacctggccctccatccctttctgggactctttggagccctttctcccacacagtggcaggccatctccctgacggtcatcgagaaggtccagattgctgccatagttctgggctcgctcttcctggttgccagcatctcctggctcatctggtcctcactcagcccttcagccaagtggcaacgacaggatctgctctttcagatctgctacggcatgtatggcttcatggatgtcgtctgcataggtgagggcacctctctctcctttacctgctctgtatcttcctcttacacacctaactcccctgcccatcccctcagtttcctggctttattttctgccactgtagcctttagtgctatcctggtgccccctcaacccacttccctgct

SEQ ID NO: 9892 - DNA, 2300 bp, Homo sapien
gtggttctgtatttggacttaactcagtgccaggaggatgggataggtgtctaagggccaggggcagtctgaacagtgggcaaggacttattggacccttccttctcccagagtgaagaccccgttgtgggacatctaggcacctcaactgaggaggggaagaaagttctacgtaatggagggaagaatttcccagccatcttccgaagaatacaagatcccgtcctccaggcagtgacctcccaaaccagcctgcctggtcactgactgcttactctaccttagctggacctcgtctcccagggattagagaaaagagcaggagtcctgggtcttcccagttgagactgctggagctgagacacagtactctcttaaagaaggtggggagctgcccagggcagaacccactggtgttcatgactacccctggctcctctcaccttgtccctccactgccaacagaaaacaaagcagctgactgagatggtcaaaggactttggaccataggggatctttggaaggctgtggggtcttgctcttccttagcactcctttctccttgtgagatctctcctcagctggaatgaggaatgtagtccatctaaactgcttgctaggctcaattaccacttctgtttgctttgtggatcctgggataacatgtatatgtgtacacatgcctattctgccatttctcaggaaagggtggagtatgtatcatatgccttctaccatcctcctgtcctctccctgcgtaagacttgacctggggaatctgtgttccctaagtgttgtctctggagagtccttgggaaggtgtgggggtggagaccctctcctttttcacattgaccttcaattccagaacttcagagctagctgactggcacagagcctgatagagttgcagtggggaatgagggagtaaggagcagagaggtaaactgtgggagattcttttattttaattttttttagagacaggccctctctctgttgcctaggctggagtgcagtggtacaatcataactcactgcagccttgacctcccgggctcatgtaatccacctcagcctctcaaggcactacaggcatacgccaccatgcctggctaatttttgtattttttgtagagacagttccactatgttgcccaggctggtctcagactcctgagctcaagcagtctgcccaccttagcctcccaaagtgttgggattacagtcatgagctgccgtgcccagcctaatttttaaacttcttctgtagagacagtcttgctatgttgctcaagcttgtctcaacctcctggcctcatgccatcctcctgcctcagcctcccaaagtgctgggattataggcatgagccaccacaggattctgaggctaaaagtagaaaggagctgctaaccagaaagccccccagaggagaccgagtcagctggggaattagaacatccacatccatttagctcctctaacaccccacagacaatctctgaacttaactaatgtacaaaaagtttcatttctgcttctcaagccccaaattcccatgtctggaaggagggggcttgtatacccaagagacccccttatcctcaagaaagaaagatggaggttctaggagccattttagcccattaacccacctgccatctgcccagtatatgttaggtacaggaggagggggaggtgtggctagtgcaggaaaataatgcagagaagatacaacccactaagccaagaatgtggggacagttacagctgtgcctcccctgcttcccttcctggaggagctgaaagatggggaattcctgaggatgggcctaaaggggctgggctcactggtagaagtgggaatatcagagactgactagtgtagcttggtcacctagtccctactaaaaagccttatagcctttcctaggatgagactttgaggctcctagacaaaggcactctcccaggaggaaaatcttaggccctccctcccatgagggtcattgcaacatgagacccaagggagttgtgaagtcagccccagccccgcctactgttcctgggtgctaatccccagcacagaccactcaggaggagggattggctgaggagcttggagagggggcgtcatcacctcacccaaaggttaaataggggttgagatatgatgctcaggagaagcgctttctttcgcgagcaccctgaaccagaccatgacccagaccctcaagtacgcctccagagtgttccatcgcgtccgctgggcgcccgagttgggcgcctccctaggct

SEQ ID NO: 9893 - DNA, 2300 bp, Homo sapien
gggattacaggtgtgagccactgtgcccaggcagaactggaccttaaaccaaggttttctgcctctatgtaccatgctcttcttctctatcaggctgttatctgtttgggaagatctaaaaatagggagtggcttggcatgcatgggtgggacaatacagacaatacaagaggaacccaaaaaacaggagagtggggcagaaggaatgagatctggcgagggaggggcaaaggggaggggagatggtagaatctctgagaaaagacagttcaggatcactggccacaacggctaatctctgatgcttgtgctgaccagctcactgacccggaacctggcagatgaaatggctcatgtagggattgacgccagaaaggacaacccaggttttaagaagcatttgaggcagccccctccactctccagggcaaaggtcacagacccagagtagagggtaggtggagcctctccatgctgatgtcaccagtgtctggacgaaaggggaaaggccaattatgaccccccacaaaagttgctgaggcagcagaagctactaggcctcttctcaccccaaaaagagggcctgagtgttacctaacaggccaccatagccacagcctatgtctgcaaactccacttgggcctgagctctcttttctttcttatcctttgggtcatcgtggctctgattttgagtgagtggagcgaagaactctgggtatagctcagaccagtccatctcctctggcttcacagggctattggaaagaagacataagaagcatgagaaggttggtcacaccattgcagaagtggtactgtgagagtgtgtgggtgggtgagggtgggaggtaaaagggaggagggtttctcaaaaattctgtaacactgggccctgtggcctctaagagggacaatggaaaccacccttaactcccagtgtgaatcataggaccatcatgaggcccataaacgctgacctgcccaactccacttctggcggttgatgtgaccctggccgggtaactgccctttctggggcacaagttccccttctcccgagactggctgcctaatgcactgggatcctactttgtgtttgtgctctgcggggagggaaggtaaggtaaggtgcgggcaggattgtgtatatgtttgcctttttattaaatccaacaaacaaaagcaaaagatggaaacgacattctgcctctatcacttcagtctcagtaacaatttatttctcttcccaaacttagcaccgctacccagacttaggcccgaacgccacgcccactctcaacccgccaactcctctctcggtcgaatctcccggtcccacccccaaaaactgacgtcacccatctgatcctcccgggtctaccccaaatcctcccagcagttgcagcacaactgctctcccggctgctttgagaatcccgccctcctctctctccctctgcccactcctcactagcgcagcgtgtggtccgccatggggttggagtgagcacgttgccggtagtagcgcttctggggcggtggggcctctgctccggccacgttccgagtctcggctgccatgatcccagtccggggtttctctaccaaatccacgtggaggcgcaggccagaggcgcaagttaatgacgcagccatgcgcgttggtggcagttcccgccccttaaagacccaagagcaaattcagctgggctgggctgggctgggctgggctaggtggggagggctgtaaggagcgagtgctggagggaacctccgcaccgttagcctccaactgggagggcgaggccaggcccagggacccaacgttttctcttagcttgcttctgcctggtctgggttaccatcctggttgcaggcacctgtgcaccccacaggtgagaggggtctagagacctcgccttctacagtggcatcagtcctcgctcctgtccccttactcctggtctcggaccagtccgcccggtctgactcttgtggtcccgtgtgggtttcgtcgagtgtgcgctcggggccggggcgggaggggcagctcctcattccacctccaggaaatcgaactggaggaaggagggcaaactcagggaggcggggctcgttccacagggacaccacgacggctcgcggcccccagcctctaccccgctccggatccgggatctgagcgccggccgcggtgcccaggcactcccttggcgggccggatggcggaccccggcccagatcccgaatctgagtcggaatcggtgttcccgcgggaggtcgggctctttgcagac

SEQ ID NO: 9894 - DNA, 2300 bp, Homo sapien
tcttggtacataggggacttgaaatacattttggttgaatgaatagaagaatgaatgcctgcctctgggaagatttccctttttttatttttgagacagagtttcactcttgttgcccaggctggagtgcaatggtgcgatctcagttcactgcaaccttcacctcccgggttcaagcgattctcctgtctcagcctcccaagtagctgagattacaggcataagccatcatgctcggctaattttgtatttttagtagagatggggtttcaccatgttggtcaggctggtctcaaactcctgacctcaggtgatccacccaccttggcctcccaaagggctgggattacaggtgtgagccactgcgcccggctaggcttcccttaatatgacctagttctgtccctatgaacaaagacatgttaatttacattcctagggagatgacattgtaagaatttttaaacgagtgctttcagtttgaggttttttctgcccattagattataatttgtgaaactgtttcctctgtagtttttgcttcttgacaaaagagaagcaaatttttccttaccttttccttttccaagtctgcagtgtctaattcctaccccgcttcctacaaaacacatcctaacccttggaaactcataagcttgtttctcttagcaataaaaacctaaggaatctgaaatatattcataataaagttataaagcactcacgaagtttaatgtctgcaagtctccctacagagtacccccatatgtgcatcttgacagaagaccatgtccaaagccaaggcgcttttaagtgacagtattctccataaaatcacaaagagtaacacaaggctgggtgtcgtggctcacgcctgtaatcccaggcgcctcgcgaggcagatggatcacctgaggtcaggagttcgagaccagcctggccaacatggtgaaacgtcttctactaaaaatacaaaaagtagccgggtatggtagcgcaagcctgtaattccagctacttcggaggctgaggcatgagaattgcttgaacccgggaggcagcggttgcagttagtggggatagcagccactgcactccagcctgggcgacacagtgagactccgtctcaaaaaaacaaaaaaaattaaaaacaaaaaaaaagcaacacgatagaaacaactccttcttataggcctgcctgagttttatttcctgccctccccaatcacccaccctaggtgctttgacaggcaattcgcgctgtctggcacgcagaagcagacgccaaaataaaaacaaaaacaaattttaaaaaaaaatttgttaaaaagaaggggttagactgggcccaaagttctcccctctcccccaaagatccacgaagtgaccatttctccgcgcccctgggtccccactctctcccgtaaaaagccagctcacgcaccctgcagcgctgccaagatccccacgatgcctgtccccgcacccagttcgatcaccttcttgcctcggaaatccacattttgactctcgaaataattgcacaggctcagggcctacgggagaaaagacagagaaaaagacagtcgtgaggatggctccatatgggagaggcggagtccgggatctggacctcccacggaccctcacccggcgcagcccattcctcaccgcgtcccacacgcgcgccgccaccccgaggcgggacccaaagttctgcgtgatggtcagcacatgcccacagaaacagaactggctcttctccgagtaagagtctgcaaagagcccgacctcccgcgggaacaccgattccgactcagattcgggatctgggccggggtccgccatccggcccgccaagggagtgcctgggcaccgcggccggcgctcagatcccggatccggagcggggtagaggctgggggccgcgagccgtcgtggtgtccctgtggaacgagccccgcctccctgagtttgccctccttcctccagttcgatttcctggaggtggaatgaggagctgcccctcccgccccggccccgagcgcacactcgacgaaacccacacgggaccacaagagtcagaccgggcggactggtccgagaccaggagtaaggggacaggagcgaggactgatgccactgtagaaggcgaggtctctagacccctctcacctgtggggtgcacaggtgcctgcaaccaggatggtaacccagaccaggcagaagcaagctaagagaaaacgttgggtccctgggcctggcctcgccctcccagttggaggctaacggtgcggagg

SEQ ID NO: 9895 - DNA, 2300 bp, Homo sapien
ttgctctaatgaaggaactgtgtatctcaaaaaccatatttccagagccacaaacatgaggaccaaaaaggatggatttccctggcctctctcactttcctccttccctctttgttaccccagatactcttgggcaggtgcagtgaggtgcctgcttacaaggaatcccagagttctggcagcactagtgttagaacaccaaggaggttcctggctcctgttctcagagaaggaggatggtaaggtatccaggatttttagggggtaagggagatatatgggatgtgagagcagtgattgtagacagactgtcactgatcacttccattcctgttgctgtttacacagaatggactttaaaaaaattctgtgggatttttttttctttttttctttttttttgagacagggtctcactctgtcatccaggctggagtgcagtggtgtgatcacagctcactgcagcctcaacctctgaaggcccagatgatcttcctgcctcagctccccaagtagctgggactagaggcatgcgccaccacacccggctaatttttgtattttcagtagagacagggtttcgccatgttgcccagggtggtctcaaactcctgggctcaagtgatccacccgccttgcctcccaaagtgctgggattgcaggcatggcccactgtgctagcctaggatttttttttttttttaagaaagaattaagccttaaaaatctattgtgcaagaacccaacttttactcaggagctgagaaggaagaagcctcaaaccacccatttcctgctttttagagatagagtctagtggaaccatggctctaactgggtcaagtcctcctagctctgaagctaaggctgcagagctgtcctttggactgtatttcttcatgctttccagagttagagccttgatcacggaacatcattgtgtgcagaagaatactgtacctagtactaagttcttttcatctttgatttttctttagcttcatcagtccttccttcctaatctctaatcccctgaagcctaacacagttcctaatgtgttttgccttaacctcttttctcttcccacattggtacttctggttggggctctctttacttactgcttaggcacatagtcaccttctctggactccctgcttccatgctttctccttcagtccattccgcaaactcttgtgatcttccaaaattagctctgattagctttcacttcctgtagaagcaagaacaagctcctctgcttggtacttagtctgtgtccatgtgatccaaaattaccttcctattgcatttcctactcctttgctacgtgtattggacctctggccaaattacaaaagatgtactctttgttctctaaaaccacactaaagttttctgacttctttcacactctttatgataatcctctgcctgaaaggctattgccacctgtcaaaatcttcattattctttgcctctttcctgagcctcttgcttgaatgtgatttctttctccctgagacccataaggttcatcttatgggaccttaatttgtcttgcatggacatttgtgattctcattttctcaccattaaattaccttggagggtagggctgtggtttactcctgtctaaacccctgaagcctaacacagttcctggcacacaacaggtgttcaacagatattgtgctcattcaataaatatttactcgctttgtttaatggattccacccctgccttcctaggtgaccttggacaaattctcgaacccattcaccaaccacacaagtttgttgtgagtcataaatggataatgaatataaatgcgcattgaaaataaacataaaatgttacccacatttcttgtgttgttgttttgtgacgactttatttcttggtttctgttattttacctggggtgggaggtggggggtaattcccgtatgaaatgtgtcgtctcaagaaatcaagtagaggcgaggactgtgttcctccggccagcaggtggcaccatactcgtttggtgcgttccgctggagaattctggcccttccgccgcgccgtaggtttgttgcctcaccagtgcgcccgccggagggtgtttatcgcggctagagagatgtcgctgctgcggtcgctgcgcgtgtttctggtcgcgcggaccgggagctacccggtgagaagtcctggtgctggtaccgacctgctgtccctgcagctctcctgtgcgcctgtacctttcccttcctcccaacctcgtttgactccatctcaccttccccgacagcattg

SEQ ID NO: 9896 - DNA, 2300 bp, Homo sapien
ctacttgtggggcagcagctgccaccatctgtatttaccttgctgatgtactgtcatcacatgagtgaggctgcatctgtgtaattcaccactgtctccccagaacctagcacatagcaggcactcaaataactgaatggatgttcccttagctacaagcaggggggtgtcgcctctgggatgaagcacgtggagaccaatacctacgacgtgaagcggctgctacatgtgaaagggaaaagaaacatcagggctaccgaggttagtcctgcacactctctgccccaggcccggggcttctccacctggcacctaagaattcctcctgaacaatgtttacctctcatcgacaggtggaaatgagctgggacagtttcaaccgaggtgatgtcttcttgctggaccttgggaaagtcatcatccaatggaatggcccagagagcaacagtggggagcgcctgaaggtatggcttcctagccttagcactttctcaagttcctctttcttcttccctccatgctggctcttccccaagaatcaaggtggagccctgcctttgagtagaatctgtcttggagacaggccaagtgtgtgagtttgtgactcaccctggactcctcagcatccaagtaactcctgtgtctgggatctaggctgttctccccaaagacatcaggcagaaaggggtcccagaggagctgagggcttccttgggcttctttgacaggctatgcttctggcaaaggatattcgagacagggagcgagggggccgtgctaaaataggagtgatcgagggagacaaggaggcagccagcccagagctgatgaaggtccttcaggacacccttggccgacgctccattatcaagcctacagtccctgatgagatcatagatcagaagcagaaatcaactatcatgttgtatcagtgagtagctcaacctggttttagctggaagctggggttggggggaaggtgtcccctagaacaccagccacctctgcttggctccttgttttgggtgtagccatctggttttcttcttagtccttttcaaatgcagctcctagaaagcttggagatcccccactcaaggaggcagttcttgttagcaactctcctgatctcttgaggagacctttcctttactctagcctacacatgcccagggatgtggaagggataatgtttgggagagagatgaacaaaagtctccaccaaagaaaagagtctgcacattcctgtcctcactcaagtcatggctgtcttaggcagtcacactctacctagaaactccaaactaaaaccaaaccagaacaacatctagttgactacaagatgctttatagaggaaaaggcacaggctaacctctccccttctccagtatctcagattcagctgggcagctggcagtcacagaggtagcaacaaggcctctggtccaggacttactgaaccatgatgtaagtagagtttgggtggacttagcttggggtagccagacatgcttcagaagcagaccctgtgcaaaatcttccttctggtcttgagcaaccatacctatctctggctgctttaggactgctacatcctggaccaaagtggaaccaaaatctacgtgtggaaaggaaaaggagccacaaaggctgaaaaacaggcagccatgtctaaagcgctggtaggagctacagatgtgcaatactgttcaaataattctgctaagagcacttcaggtgtgtcactccacagagccatgctaggtatttgagcatataacattgtgcttacgtacatggactgcaaagtcaggcagacaaactgggattcaaatccaggttttgtcttttccagctgtgtgctctggggaagacatacttaacacctgtgggcctcagtttccccatatctaacatgggggtcatacccatctcctagggttattgtgaggattaaatatcatttgtaaagcactcagggccgggcgcagtggctcacgcctgtaatcccagcactttgggaggccgaggcaggtggatcacctgaggtaaggagttcaagaccagcctgccaacatagtgaaaccctgtctctactaaagatacaaaaaaaattatccaggcatggtggcgcatgccggtagtccaggctacctggcagggcactgagataggaaaatcacttgaacccgggaggctgcagtgagccgagatcacgccacggcactccagcctaggtgagagcgagactctgtctaaaaaaaaaaaaagcactcagaacagttcttggcacacagta

SEQ ID NO: 9897 - DNA, 2300 bp, Homo sapien
gtgcacacctgtggtctcagcttctcaggaggctgaggcagaaggatcacttgagcccaggaggtggcggttgcagtgagccgtgattgtaccactgcactccagcctgggtgacagagcaagaccctgtctcaaaaacaacaacaacaaaaaacagcttcctctgctcagggtccgtccaaaagggcatctctgagaattacaggccactggcttttaacctgacatttcaaaactgtgccccacacccaaggggtttctgcagtcctctcaaaggatactgaattaggatttagggagaaggagagacccagctttgggagatttgatgtcagaactgtgttttctgtgtgttccagtgtgacaggaagtcccttcctggagcttatcctctcgcattcggggtgcctggcccagggagctccttgattcctaaattcctgctgggaaacgggacaggtttcagcctctgaggctcacagtcctaattgctgccggctggtttggcttttaccagggtgacagttctctgtctccaaggaatgaattcagtggcccttgtccccttcccctagttggctcatggcttttgcctttaatgactgctacgtagggtctgaagaaaacccaaacaccatatttcctggcaattctgagcagcacagggtggggcagcacaagttatcaaattaaattctcaaacactggctgctccgcaccattgccttgctttagtcctgctacagcagtagacaaagcgagtctgctttgagctttatggttttttgccaaagtccatactagatggcgcatgctctccaaacttggctttgtccatcaaggttcaagaaaacaatggtcagacatgttcctcttaacaaacagtatgtccccaaacagcaaaaatgcatacagtcctttctgggtgaatttttaaatcttacataaatccatcaaccccatcctttttcctttgcctcttgggagaaattaatctagctttacattaattatgcatgttatcagatttcaagctccttgagagcaggtattttaattctataaagcctctacgtggccttggacatgggtaggtgcttaattacccaagatgctccttgaatacagatggtacacgacctacacagacttagatctttaccacttcccccctctccccaccctgacttgctcaatcctgaaggaactggagacgtctaagtgtctgaggttcacgcttccacacagaagcttgggtctgtgtgggagggaaaaaggaagccatctgtccgcaggccagaccaggccacaccctgctagcacccagaaccctttgtcccaggcccagccctgccattttactttccttgcatctggaaagcacagggaatatagtagtgacaaaagaaggaagggttgtttgagtttaagaatagtttactctaaaaaaaaaaaaaaaaaaaaaaaaaggacaaaagccaaagagaaggtcaaagttgactgtggagaaggccttgcaagcagggaacttgggaagaattggaatgagagtgagagaaggcaactgagtttggaaatattttttctgactagcttttctttccaaatgccactgaacttagattggtttaggaagggttgtagtacatcaaagtggctagaagcacaggtttggggatcagataaggatttcattctagagtgtgatcttgtacaagttattcagcctttgcaaacctcagattcacacaatgtaagatgaagaaactcaccttctgaaaattagagataacatatgcaaagtgaatcaatacagggcttaacatatttatcacccctttggtaaataaccatgacgattaccagagctcttaagggcaatggcaggtgggaagcagaactcatgggtggtaatccccaggccagccaggctcaccatgtgcacttggacaagtccttgcccccatcattgtgaaatggtgcagggatgcaccatgagggtgtggcaggatggctgacaacagactgggaagcagctcggcagaaaaactggattgatgcccactatggcaagagatatcatctcccctcttgttctgtgatgtttcagtcctggaaagacaagcatcatgcctctgaccagtgccttcagggctgtggacaacgaccctgggatcattgtctggagaatagaggtgagctgggctggaggcaccttacttgtgaccactggcatctggaagcagtctggctgcctggggctgctaggcaacagcccgccagcaccccttagcctatgg

SEQ ID NO: 9898 - DNA, 2300 bp, Homo sapien
ggcctcccggtgggtgcaacaccccactcagcccgggggtgcagctgcttcatgatggaaggggttgcgagaagaaaggcggtgcttgccatgggcccagtgaacacttaagggccaatgaaggttggtggcagctcacattcctggaaaggttttttaaacccacttttattaattaattgtaagtaatacaaatattccaaaaatataaacagacacttaatggcgtcctgcatttcaagtttttgaatacaacaaatttatcaaaccatgaatctgtaagcaaggtagtcagaatcccatagcccagtcacagtgggaagcagatcccctaccctccaaatggcatcttgaagggggaaagcggcacgaaatggaacatgataagcaaaaaagctcacgaggcccaaagaggagggtccgctccatgggcaggccctacaacgttaaaagaatggggcagctggcccgacctctggcctcctcttccctggctgaatgtaaatatttaccagcatttagaaaaaaggagaaaaaagacagaactaaacccgtttaggaaaaagggaccgagggacagcagtggttaagtaatccactgaggacctgaaggggaaaatggacttacctttctcatatacttggcctggctaggacactgggtgccagacagccttctgaggggattttctttctaaatgaggcctcaggaacaggtaggggcagcagaatagaatagcatccatttcccagagaaagactgcctttacatttcccatgcttttagcacaaagcagcgtctgggccactgttaccagaggtgagtttatacatttacaaaatgcttaaaatctttgggaagcaagaggaagctaaacagaaggtcccatgttaactgaaggcaaattcactcaacctctctagtaagggacccatgggcctacagagtgttccctctacaatgtgcagagtggaaacccttacctgacccttttccaaactggtcctgtgtccaaagctccccctatgagagggacacgaacatcaggcttttgatttagaagcccaatcagagagacacactgtgtccctgaagaggcaccttaaaagaactgaacctggcaggtaggcagattcctggcatggcttgaattggtgctgaccaggcatggtggcctattgcctcccaaagaccagtctcaagtgggaggggctgatggtgggaagccctagaagagagtctgggatgaagcggcctcctccctgtcttgccctccaaaattgagtctggcctgattcctttgaggagcaaattttacaatcatccctcaccctaacacacggtgaaactggaaacccgacagcaaataatgactaggctggctctggtccacaagaacagaccctggctaggtttggccgagtagcttctctggggcaagtgggaatggcattgttgggggggagttgcaggtgggcaggcagggttctgatgggagtgaggcctaaaaagcaggggcttcatgcagatgcagcagggacactcccaccaagccatcctgggctttggtcatgggtcccacgccaagcacttggacaagtctgttaggaaagggggtggcacatgctcttccgccatctggaaaaacatggagatccaagggagggcggaaagggtccttgcaactcagtcagcttagagcctcttattgcttatttagtcagaaaagcctggctgggcctagacggcaaaagatttggccaagggctaacccttagggtggggcttggaagagaggcccctcctgcaatattaggatagcagcctaggtcaggccttgggtccgaagccacagctggctctaagagtctgagctcctgctttccttcaagagacagtatatttctggctagcacatggggtccttctccctttaggtacaccgggaccccataggcaccggggagtgatgctggcggaaatggccacatgagttctggggactctgttccactttatgattccaaagagaaagacaaggccttataaccttgggacaagaagggaaggtggcaccacaacgctagagaaaaatgccagccagccaccgctgagagcacgaagctgctgctctactacctgcttttctcaaaacttgttagttcctgaggctggatctagggtgtggcaatggaagggatgatggggaagagtcctgagtgggtggtgtccctgcacctaaagcaattcacaaatgctttgtgatacctgcctccagggaacacagagatgggaacag

SEQ ID NO: 9899 - DNA, 2300 bp, Homo sapien
atgcctataatcccagctactcgggaggctgaggcaggagaatcgcttgaacccaggaggcagaggttatggtaagctagagatcatgccattgcactccagcctgggcaacaaaagcaaaattccatctcaaaaaaaaaaaaaaaggaaaaagaaagaaaccctgtctctactaaaaatacaaaattagccaggcgtggtggtgcatgcctataatccctgctacttgggaagctgaggcaggagaattgcttgaacccagaaggcggaggctgcggtgagccaagatcacaccattgcactccagcctgggcaacaagagcgaaaatccgtctcaaaaaaaaaaaagggatgaggtctcactatgttgcccaggctggccttgaactcctgggctcaagcaatcctcctgcctcatcctctcaaagtgctaggattacaggcatgagccaccatgcctggcccccgtaggaaattcattgcacatggtttccccaaccagggagggcaggactccagcggatgccatgtagcccaactacgagctgctctccctccttcattccctgctaccctctgcggacacccagccctcctcttctgcccagatgcagatgtgcttctgctttctctgccccaaacatttggtttggggctagatgtctgagaggactagcacagacccaatgagggaagcagctctggcttaagaagaaagtgagctggtggctgaagacagggaaaccaggccagccatccagctcactgctgcgagtcttcctactgaggcggggtgtgaggagaagaggggatgtgaggagtatgcccccactgaggatcatcagggctggggtccaggctctgccagttactgactcagccacacagccttttggagccttagtttcctcatccataaactgggataacagcaagccctcactcaggactgaaaggataaacgaagttagagagtaaggcactgtgctaactctaaagctaaatgctgcgcttgttttaattaattatccaaggggagatgaccactaaatggcaacatcatgggcctcattccaggaggccagcaacagaccaggagccctcccaccatcatcacgtggatgaagcccaagaagatgagggaaaggtgcctgagagctctgatcatgagcaggtttcagaaagtcaaaatagcccctataccttctcccaagtccacaacaaaatttgttttccagctcacaaactccctgactgggtattctgtgaaaaacaaaagcaagtaagactgtttcacttgagacaaaaatcgctgtctcccctggtattcatccccactactctcaagaagtaccaggtaaggacactatttgcccctatgcatgggccggggtaggtggctcaagcctgtaatcccagcactttgggaagctgggccggttggatcactgcagctcaggagttcaagaccagcctgagcaacatggcaaaatcctgttctaccaaaaaaaaattagccaggtgcacctgcagtcccagcttggcaggctgaagtgggagaatcaccggagcccaggagtttgaggctgcggtaagccgtgattgcaccactgcactccagcctgggtgacagagtgagattttgtctttaaaaaaaaaaagtgtacatgtacaaacacgtgaacacgtgcacacatacacacaaacgaagaccagagtgaccagggcaacactgtttttaatcttctcctgaaagtcaggtccagataccacttttgtcaacaacacagctttgtgtcccagcaaaggaactcctcacacatctgcctgcgattcagcagaaggtaacctctgagacaatcagattttaacaagcccattcaggtagaaagttgctttcttttttggttcatccccagaagtacttccttccccaccacctcccatcccccacagcaaaggacttagccttagcctggctatcactataaaatggcccctctgaggggcctccttcctctcagctattggaggaaggagagtatttggagcatttccggcccttcttggacggctgcctgaaccctgcagccaagacacatttgactgggactcccccatggagagaagtcctcccaggtcctctgcaaggggcatctgttccttggctatggacatgccctaaagtgccaggtggacggaagagctcctgggaccagcaggtgagtcggcagggaacaaaagagggtgagatgcctagacagcccccacacacaaaagactgcaaacaatggggaggg

SEQ ID NO: 9900 - DNA, 2300 bp, Homo sapien
cagctcctgcctgcattcctcccactgcaactaatctaccttagaagagggcaggggaagggtctaaaaaggcccccatagcaacctgactattgaagatttaccttaaagatcctattgttttaatgatgggaggtgggtatgtcagaactcctccgtttccctttctgttaatgaattaagatctacccaaattcagtgtttaaagttacataagcatcattcagatctgtaacagccactttcattttggaaaaacagcatttccattaaaatgatgttatataaaaaggttttgtatacgtgcgtaggaacagcagaaacaggcacacatgatcactgtatggcacacaggcatatgcagatcatgacctcacctgtcctcatgaggaagggaccataggaagcaggtgtctgatagtacctggcaagcttagctgtgacctagttgtcctctaatcatcagtaagacctgatgcatgttgggcaatgggaactgcagcaggaaggaagccccttccttggcagggtgagtgccactgaatcacagaatattggggttggatttagctcagaagtcacccagtgcaatctcactctacaccactcttgccggccttgacttgaacagctaccattgtcccaaggcagcccatgtcacctgtggacagatgtagatcactggaaaagacctgatattgagctgaaaccagcctttctggagctaccaccgctggggaacaaaagcacccacaaccttgagcagagactccaggagctgtagccagcggagcgtgccccgaggcctaaagagcaagtggggaaggcagcctgagtccacaaagctgaagctcctccgagagacctccatccatctaaaggaagctgggactgtgggggcaaaaagagaggggtaggatgagggaggtagggaggaggggcggagtcggggccgcctaaatgggagtaagtcggtgggtgtgaggaaagcccagcacctcaggtctcattttcagtgttttgggggacacagtcccgaggtcagttccagctcttatactctggagtcctaggtccgcccacacgcacacacccctttcgggattcgaaggttgtacttttttttttttttttttgagacagagtctcgctctgtcgcccaggctggagtgcagtggcgcgatctcggctacctgcaatctccgcctcccgggttcaagcaagtctttgcctcagcctcccgagtagctgggattacaggcgcccgccaccacgcccggctaatttttttgtatttttagtagagacggggtttcaccatcttggccaggctggtcttgaactcctgacctcgtgatccacccacctcggccttccaaagtgctgggattacaggcgtgagccaccgcgcctggcctcgacggttgtacttttatgtgacttggtacgtccttgattctagggctaagcaggggggtaaggtaacttccgatccgccccatcccctgctggagtcaggttaggcttagcggcttgtcttggtcacccctgaagggggaaacctttccaccttccccgagtgcgccctccgagaaaagaacaccccagcacagagcaccagaacgtgagcttcggagcggccttttaaatagttgggaagggggtgtggccgaggagactgggaggccgcagtctggcgcggggggagtggcccgggggcgtggccgtggcgcctggaatgttgttaggtcctctcaccgcatagtaaggaggggccacgccccttttctccaagagagccaatcggagcaccggaacggtttcaagtctcccccgccagcctgcccgcccgccaccccaccccccttgaggattcgctttttccgtaacaaaatagcaaagctcccgactgtccgcagccccggccgctcacagatggagggtcccagggcctaggacgcagcccccagcgggaagctccagctggccgtgaagaggccgagtcgagagccgggaggcgcgcgggggtgggcgctgcagccgcgggttgtttatctggagtacggaggggaggggggagcctggaaaccgccccgtgtcccatttcctcctcttgttttcgctccggattctccatgttggacccaaactgaggagcccggagctgccgctgggggatcggggccgggggcacccgggggagccgctgcccgggccgcccgccctttgtacaggccgcctcccttcccggtccggggaggaaacgagaggggggatgtgaacagctgtggaagtcggag

SEQ ID NO: 9901 - DNA, 2300 bp, Homo sapien
agggaagtgtggaaaggaagaacagctggtgcttgccctgcaccagacactgtgcagtgtgtgagatgcttcagacatttcacatcgtcctcacagaaagtaatgcaagtgctgttagtgccattttatagatgagaaaactgaggtgcagacagaataaacaacttggccaaggtcaggcagagacacttcgtgcccaggttggtctgtccttggggtgtgaatattccttccacagccttgccagcggctcctactcctaaacgtgggtgtcccctggccctacttctctttctccctttctgtgatctccctgtaagatctgcaagatctctttcatcccttgagttatttcctctgacttccagcccactggacatttcccagttaagagcccattgtcttcacaaacgccatctccaaaaggagctcctcccctggccactggcgcacccccccctccacctaagggctgcagggctgccatcttctccctgccatccatgctcaaaatcaacatcacctctggtgatttctcccctttgctgtatacacaatcaattatctccattctttcttcaaaatctcttatttctcgctgttcattttcaccttttctcttaacaccccagcactgtgaccttacgtcagcctggttccttgcagaagcctccaacgggtctccatcaatgcttcgagtttattctgcgcactgctgccagacttctggtccttaaaaacacccccttcatcataccattcacctgccctcccacctctgcaggctcgcccactgccttcaccagatcaagtccacactcagccctgcactcaaggccacctgcacctggcccccctacggcttcccaccctcatcccccactcctcctctctccagttcctcagtttagcaaagggattactccaacatcatgctcctttctcccctcctgacacatgccgtccatcctcccccagctgcctgtccccctcctgccttgcctctggcccacctctcagtcagggcctccagagccctcttcccaaggcctgaaggactcattatctgtgctgttgatcaagcaagtaattatgcacagccttgtaacgctcttctgtttagcctggaacaggcattgaaactgactagtgctatttaatctctatatctcgtgtctgcctctatgtctatatctacatatctcatcacctaaatcctataaaccacttgaaggtgacgactgtctaaaaggtcttggtttctccctacagtgcctaataggtagatgataggtgctggatatatgtgttgagctcgtttttcttctcacataacttagcctcaaacaaataaccagggctggtcagaacagtaagcatcacccttagaagtctgctcttggccaccgcaaatctgccaccggccagtttcattgtaacccctcagctcagggtcccccacggggatcgctggtctccagagtgatcgctgaccgaggcgaggcgctggaggccgccccagctcggctctgcctgctgatttggcgaccggatttccatgcccctccctggtcccgagctaaaaggaaacatcccggggatgggggatggggtggggggttcctgaaccctgaaccctgacccctgcttggtgaaaccaccccaccccagctcaggggtcgtcaaaagcaccctggggaacctctgcccttgggagagaaagaagacactgcacctttaagtctgcagctggttgagaaaaacaagctgtgatttatataagcgggaaaatcatgtgatttgcaggaacgctccctcctcccccgaccccccgcgtcgcctccaagcccttcccagaggggcccgggcggcgggctgggcccggctgcccatgaggggcgcgggtggggggcgcgccgagcctcggttcacaaagcctcttccccgggcgtgcattcccgcagctcttccttgcggacctcagacgcggggacaggcggcggcgggctctggggcgcggcagtttggtccccacgctgcctcgcggcgggctgccgttcagggggtcctcggtggggccccgcggtcctgtgcctccgagggcgcaggaggcccactcccccgactgggtcggctgctaccctcaggccagggtgtgcggtggagaaactgaggctctcctccagctgctctgggagaaaggaaagccggggaccccacacactggcgtctgtgtcccagaacacccagcaggggggagagcaatttaagaaataatctggttggcaaagggcgtcatg

SEQ ID NO: 9902 - DNA, 2300 bp, Homo sapien
gggctttggatgccatgtgtaacttcatctgtatacagtataaagacataggtatggaataaaaacacattaaggaagagataatgaacagcaaatacaaatgagttttaaaaagaaaaagaattaccacaaagaaattagagcaagggcaaagatttagctataaggattttcatttctccattgcagcactaattgagagcaaaaatggccaggccagtggcatgtaatcatagctatttgggaggctaaggcaggaggactgcctgagcccagaagttcaagaccagcctgtgtgatacagcaagacacctcctcctcaaaaaaaaggggcggcaggggaagacatcaattgtttaaatatccaacaagaggtataatggaatatatacaaccatgttaagtgtcttttttaaacaaaatatgttcattaaaagtttttgggtgttttgttttgtttttttgtttttttgttttttgagccagagtcttgctctgtcgcccaggctggagtgcagtggcgccatcccggctcactgcaacctctgcctcctgggttcaagcaattctcctgcctcagtgagctgggatcgcgccactgcactccagcctgggcgacagagcaagacaacagctcaaaaaaaaaaaaaattcaggctgggcgcgggtggctcatgcctgtaatcccagcactttgggagaccgaggaaggcagatcacttgggatgaggagttcgagaccagcctgaccaacatggtgaaacctcatctctactaaaaatacaaaaattagctgggtgtggtggcgccgcctataatcccaagctactcaggagactgaggcaggagaattgcttgagcccaggtggtggagaggttgcagtaagccgagatcgggccactacactgcagcctgggcaacacagtaactttgtctcaaaaaaaaaaaagttttttaagttccaaactagcatatacagtatgattccattttgaatttgtacttactataattcatagaaagggtctggaagactcctacaaagtattcacattggttgtccttaaatgggtaggatttggaggttttgtgttttgggggtttttttggccttcattttctaaagcaaaaataattgcttttttaatgggaactaaattatttaaaattgtataaatctatcacagtaacaaataaattacatataattgtaaagagtttaccacctgtcagctgtgaaagttgatcatataaatcgggtcacttttgtcataccagttaaagagtggagaggccagagggaaaaaacattcaggtcacaaatatcacttgaaaaatataattctctacaggcctggctgctgaaactgcctgctaacacttaaaaccaatttaatctaaaggctactaagacagtctgctacaattctaagactaattttacccaccaccgtcactcagcaatcagtttgccaaccccaccaaaacattaatagtgccaataaactctcttggagaccaatacgtaacatttctccttcttataaagtctctaacctcttcactcttcagacatcccgaagaccaccccagtctacatatatgccccaaattactattttcttcccaaataaagcattctaatttcaaagattcatctctatattctgacttaacagcttttaacacttaatgctgttttttagttgacaaataaaaattatatttatagtataaaacatgttttgaaatatatatacattgtggaatggttaaataaagctaacatgtacccttcggctttttaaaaactaacgtccaattcatccaattccgtgagagtaaagcctttgcttagctttccagtcctgttaaacgggggggaaacaacaaaagggtcctcagggccctgcccaacaatacgccacattctgtctagtaaagccacacagccagaaaacgccaggtgactggcaggcagatacttccggaagaagtcggccctccgaacccggaagtgaagcgataagacgcacggtgttctgggaggagttacgcaggcagggttgtggttgctggctgttaccaggacaaccggaggcgattgaccgttatctgcggtttggagccgttagcgggagaggcagagatattcagaggtcttttaggatgcgctaaagggtcgtgagggctctcttaaaattttcttcacaagcggttatccagtcgtgccccgcggccctgctgctggccccggggatctgagtcgtaccctcttgtttttctctgagtcagtctt

SEQ ID NO: 9903 - DNA, 2300 bp, Homo sapien
gagagactgaggtggtaggattgcttaagcccaagaattcaaggctgtggtgagctatgattacgccactgcactccagcctgggtgacagagcaagaacctgtctctgaaaaagaaaaaaaaaagaagaaattgttatgacaaaaagacaaagacatagaatcaaccattaacctaagtgtccaccaacagatggttaaagaaaatgtggttatgcatacaccacggaatactatgcagccataaaaataatgaaatcatgtcttttgcagcaacatggatggagctgggggccattatcctaagtgaaataactcagaagcagaaaatcaaacaccccatgttctcacttataagtggaagctaaagactgagtgcacgtggacatacagaggggaataatagacactggggactccaaaagtggggagagtgggaggggaagggtgagggttgaaaaattaactattgggtacaatgttcactgtttgggtgatgggtacactagaagcccagacctcaccactacacaatatatctgtataataaacctacacataaaccacctgaatctatgtattaaaaaagaaagcatgaaaaaaatccaaatagtatttcaaatgtatataggctatggtccatttctaggcatatctagcctgccttcagtattccaaactaatcacactgaattgtaatggcttagttttccatatgtgtgttttagttcaataactggattgaaagctagttgtgtggtcctagataaattattgaattttgctgagcccactttatctgcaaattagagataatacttactttgcagggttgtagtgaggattggaaataatgtatccaaggtgaatttaattaaaaagtagttactttttttttgacttctggctttaatagtctatgtacataggagttgtttgtatttttataatattccagatgaatgactatcctagcatcccactcaatttagatattgagcatctatgacacataaagcactgttcataaccctaaaggcctgctgagcctatatttttcagatatgtttcttacataaaccacatgctgctcttcatctttagcaattttcttagtcatgtgtttcctcagtctcttacaccttgcctggcccatcatagtaggtgctgaataaatgtgtgagctgagtggaataatttagtaggaaaagagaaacacacaaattggataaaacctggcaggctacgatgaaaatgattaacaggtacaaagtgctttgtacattgggagatcaggagacattaattttgattaaggtatctgggaatgccctgtggagtaggcagatttgacctgggccccaatcataggggctgaggcaaggagcttaaagatggaaatgacagtatgagttaaggctgagaggtagaagtaaacagggtgcgctttgttatcagggagttattggtggggggtggggcagaagagtagggtaaacgaatgggtacaggtgggaagaaaaaatgtagttggttcctacattttgaggattttgatgtgactagtcattctttatagttttaaaacgtttctgaaaaacactgctttcaatatggccagaggcatctttgggcagagtggatctgagggatggcaggggtcgggaaagtggcgggccagaaatgacaactggcttgccccggaagaaggcagggagtgggaggatggccgagaccttcggcggcacaagagcagttagtggccaatattcgccccgaggtgaggaaggagtgtctgcgaggaggcgggacacccttagagctcagcaggcagcaggaagctgcagaacaacgcttataaagacatgtcacccacactgggagggcagcagcgaaatccgcggcagccgggttgttacagcctttgagggaagtcgcaagacccagctccgcccaacagcatcgggccccgcgccccgccccatgccctcgccccgcccctcatccctcgccccgcccctcgcctctcgccccgcccctcgcctctcgccccgcctcccgcgctccccgtcaggttcaaagccccctcccgcctaacgtcttcagcccagccaggctgcccttcttccctgcggagggagggcctgggcggtcgcgttggcgggagggaggttacctttcccagtctcgctctggccgcctgagccaggaggaagcagcggcgaggtctgcgggaggcatggcgggagctccggacgagcgccggcggggccccgcggcaggggagcagctgcagcagca

SEQ ID NO: 9904 - DNA, 2300 bp, Homo sapien
gagctcactgcagcctccacttcctgggctcaagcaatcctcccaccacagcctcccaagtacctgggagtacagacacatgccaccacacccagctaattttttattttttgtagagaccaggtttcaccatgttgcccaggctggtctccaactcctgggctcaagcaatcttcccacctcagcttccccaaatgctgggattacagccgtgagccactgcacctggcctggaattttcatattgcactaaaattgtgtgcctgactccctgttcccttgggttgagttctttctcatgggactgcacagcttctgctgcaaataggatcattccctaatttgttcaacaagtattggggcccatcaggtggcaggcactatgctgactgtacgtacagtggttaaaaaaaaatggactcggacagctctggctccatgactcagcagtgccccagacgtgtttaaatcctggggtgagggagaaaacctaggactcaagctgggaccgtggaaagagaaagaaaggaagaaacaagaaaatagagaagattttcaaatacatgatagaggaatacaggtatatcaaaagagatgcatggagcttgctgtatttatatgtatttagttgttcagaattacatttttatttgtgttctaggtacataaataatgctacaagcagtatgagcattgttagtgggacttacgagctaagcaacagcttagcaccccattaactttgtgttataatcttatgaacaagctgtatggctttgagcaaatttattaactcattgcttcaaactttatatgaattattgtttgcagacatagaagtcacatccacatatattgtaaagttttaggaatagagatgaggaagtgaagaagacagcaagcctcccattgtaaccgggtggagctcatctgtatgctcatatttttcaacttatgactttctgagcttgctttaatcattcccttcatgtccaatatctttctttctttcttcccatctattatccagaccctagcgtaagtcctgtatagctaaaaaaaaaaacagtccccaaaaatgtccatgcctaattattagaatctgttaatatattacctgtcatggcaaaagaaactttgcagatgtgattaagaatcttgagatggaaagattgtcctggttatccaagtgggatcaatgtcatgacaggagtgtttataaagggaagcaggagggtcaaagtgagagaaggtgatgtgacagcaaaagcagagagagatttgaagatgctatgctgctggttttgaagataaacatgtattcttacataataatatatattttatttgtttgattggggtagggatggaaaaggtgctccaagtctgcaaacctaagggcctgtctagcaatgccctcagagttcagcccatggaggtccagcctagactggccttaacctctcactaagttatgttttgtaggttgtactagaagtcactgaggtttggagaactataaacatttttaattcaaatatgttatctggcaaaataatatgttatgccagcatttttcaaatattttagccatagaaacctttatttaaataaagtactttgatatacgttatgattggccaattaaatataatatgaattttaatttttttattaaaaataataaataaaatattttaggaaaccccaaagagattaaagtggatctactgaaattgaagggagtggggagaaagtggaccccaatcagttcaagttacaaagcggtcctcaagagaagaaaaacagcgtcagaacaagagagaggaagtgtaatattgtgatacaagaagaaatatatatttggtctctgtccccatttctggagctaatatttggtctctaccacagttcctgacacagatctcctaagacctctgtaatttcctgagtggtaggagcttctggcacagaggtccaaaatcccttggaatttcttgggcgataggagcatcttctgttctaatgaggtaacagttggtggaggctggtcgctaggggaaccaacaatgtgattggagggttggaactttcagcctcactccgtgacttcctggaaggggagaggtactgaggttgagtctatccccaatggccaatgatgtcatcaatcatgcctaaataatgaagcctccataaaaactcaaaaggatgggatttggagaacttctggaatgctgagcatgtggaggtgcctggagagggcatggaagctccacatgcctgcccacatactttgc

SEQ ID NO: 9905 - DNA, 2300 bp, Homo sapien
cgcagttagctacaaaatatctagagaacacaaaggtgacacaaaccccagagagtatgctgcttgcagccttgatgattgtatcaatggtggtaagtctccctatgcctgcaggagcagctgcagctaactataccaactgggcctatgtgcctttcccgcccttaattcgggcagtcacatggatggataatcctatagaagtatatgttaatgatagtgtatgggtacatggccccatagatgatcgctgccctgccaaacctgaggaagaagggatgatgataaatatctccattgggtatcattatcctcctatttgcctagggagagcaccaggatgtttaatgcctgcagtccaaaattggttggtagaagtacctactgtcagtcccatcagtagattcacttataacatggtaagcgggatgtcactcaggccacgggtaaattatttacaagacttttcttatcaaagatcattaaaatttagacctaaagggaaaccttgccccaaggaaattcccaaagaatcaaaaaatacagaagttttagtttgggaagaatgtgtggccaatagtgtggtgatattacaaaacaatgaatttggaactattatagattgggcacctcgaggtcaattctaccacaattgctcaggacaaactcagtcgtgtccaagtgcacaagtgagtccagctgttgatagtgacttaacagaaagtttagacaaacataagcataaaaaattgcagtctttctacccttgggaatggggagaaaaaggaatctctaccccaagaccaaaaataataagtcctgtttctggtcctgaacatccagaattatggaggcttactgtggcctcacaccacattagaatttggtctggaaatcaaactttagaaacaagagatcgtaagccattttatactgttgacctaaattccagtctaacagttcctttacaaagttgcgtaaagcccccttatatgctagttgtaggaaatatagttattaaaccagactctcaaactataacctgtgaaaattgtagattgcttacttgcattgattcaacttttaattggcaacaccgtattctgctggtgagagcaagagagggcgtgtggatccctgtgtccatggaccgaccgtgggaggcctcgccatccatccatattttgactgaagtattaaaaggtgttttaaatagatccaaaagattcatttttactttaattgcagtgattatgggattaattgcagtcacagctatggctgctgtagcaggagttgcattgcactcttttgttcagtcagtaaactttgttaatgattggcaaaaaaattctacaagattgtggaattcacaatctagtattgatcaaaaattggcaaatcaaattaatgatcttagacaaactgtcatttggatgggagacaggctcatgagcttagaacatcgtttccagttacagtgtgactggaatacgtcagatttttgtattacaccccaaatttataatgagtctgagcatcactgggacatggttagacgccatctacagggaagagaagataatctcactttagacatttccaaattaaaagaacaaattttcgaagcatcaaaagcccatttaaatttggtgccaggaactgaggcaattgcaggagttgctgatggcctcgcaaatcttaaccctgtcacttgggttaagaccattggaagtactacgattataaatctcatattaatccttgtgtgcctgttttgtctgttgttagtctgcaggtgtacccaacagctccgaagagacagcgaccatcgagaacgggccatgatgacgatggtggttttgtcgaaaagaaaagggggaaatgtggggaaaagcaagagagatcagattgttactgtgtctgtgtagaaagaagtagacataggagactccattttgttatgtactaagaaaaattcttctgccttgagattctgttaatctataaccttacccccaaccccgtgctctctgaaacatgtgctgtgtcaactcagagttaaatggattaagggcggtgcaagatgtgctttgttaaacagatgcttgaaggcagcatgctccttaagagtcatcaccactccctaatctcaagtacccagggacacaaaaactgcggaaggccgcagggacctctgcctaggaaagccaggtattgtccaaggtttctccccatgtgatagtctgaaatatggcctcgtgggaagggaaagacctgaccgtcccccagcccgacac

SEQ ID NO: 9906 - DNA, 2300 bp, Homo sapien
ccaggtttcagtggaaagtgttacctcagggaatgcttaatagtccaactatttgtcagacttttgtaggtcgagctcttcaaccagttagagaaaagttttcagactgttatattattcattatattgatgatattttatgtgctgcagaaacgaaagataaattaattgactgttatacatttctgcaagcagaggttgccaatgcaggactggcaatagcatctgataagatccaaacctctactccttttcattatttagggatacagatagaaaatagaaaaattagccacaaaaaatagaaataagaaaagacacattaaaaacactaaatgattttcaaaaattactaggagatattaattggattcggccaactctaggcattcctacttatgccatgtcaaatttgttctctatcttaagaggagactcagacttaaatagttaaccccagaggcaacaaaagaaattaaattagtggaagaaaaaattcagtcagcgcaaataaatagaatagatcccttagccccatccaacttttgatttttgccactgcacattctccaacaggcatcattattcaaaatactgatcttgtggagtggtcattccttcctcacagtacagttaagacttttacattgtacttggatcaaatagctacattaattggtcagacaagattacgaataataaaattatgtggaaatgacccagacaaaatagttgtccctttaaccaaggaacaagttagacaagcctttatcaattctggtgcatggcagattggtcttgctaattttgtgggaattattgataatcattacccaaaaacaaagatcttccagttcttaaaattgactacttggattctacctaaaattaccagacgtgaacctttagaaaatgctctaacagtatttactgatggttccagcaatggaaaagcagcttacacagggccgaaagaacgagtaatcaaaactccatatcaatcggctcaaagagcagagttggttgcagtcattacagtgttacaagattttgaccaacctatcagtattatatcagattctgcatatgtagtacaagctacaagggatgttgagacagctctaattaaatatagcatggatgatcagttaaaccagctattcaatttattacaacaaactgtaagaaaaagaaatttcccattttatattactcatattcgagcacacactaatttaccagggcctttgactaaagcaaatgaacaagttgacttactggcatcatctgcactcataaaagcacaagaacttcatgctttgactcatgtaaatgcagcaggattaaaaaacaaatttgatgtcacatggaaacaggcaaaagatattgtacaacattgcacccagtgtcaagtcttacacctgcccactcaagaggcaggagttaatcccagaggtctgtgtcctaatgcgttatggcaaatggatgtcacgcatgtaccttcatttggaagattatcatatgttcacgtaacagttgatacttatttacatttcatatgggcaacttgccaaacaggagaaagtacttcccatgttaaaaaacatttattgtcttgttttgctgtaatgggagttccagaaaaaatcaaaactgacaatggaccaggatattgtagtaaagctttccaaaaattcttaagtcagtggaaaatttcacatacaacaggaattccttataattcccaaggacaggccatagttgaaagaactaatagaacactcaaaacccaattagttaaacaaaaagaagggggagacagtaaggagtgtaccactcctcagatgcaacttaatctagcactctatactttaaattttttaaacatttatggaaatcagactactacttctgcagaacaacatcttactggtaaaaagaacagcccacatgaaggaaaactaatttggtggaaagataataaaaataagacatgggaaatagggaaggtgataacgtgggggagaggttttgcttgtgtttcaccaggagaaaatcagcttcctgtttggatacccactagacatttgaagttctacaatgcacccatcggagatgcaaagaaaagcacctccgcggagacggagacaccgcaatcgagcaccgttgactcacaagatgaacaaaatggtgacatcagaacagatgaagttgccatccaccaagaaggcagagccgccgacttgggcacaactaaagaagctgacgcagttagctacaaaatatctagagaacacaaa

SEQ ID NO: 9907 - DNA, 2300 bp, Homo sapien
gtgggccacctcagtagagcaggcagggacagactgtcagcccttttctaccctttattttaattgcaacagaaactcactaaattattttaggtttgggcaaatagttctggtaagcaagttaagtgatgtaatttatattttttaaagctcactggtagctatgagaagaatggatactggagggaggggtaaggaaagaagcagggagatgatcaggagaagcctgtagcaaagacataggctggacttttgggggtggccccaagagtgagagaagtgaacagtctagaggtgtattttggaagcagaacatgcaggacatgctggtgattttgatagaagagggaagaagggaaagagaagaaccaaggttgacatctaggcttttgacttgagcagtctggaagatggtgaaacctcttactgaaatggggatgacctgaaaaagaatttggtcagtggacaggggaaaatcaagagagttccttattagacatattattttttatgcctgttttatacctatatctctcatggataggaactacctgcagaaacttggtagcaagggcctaatcagtaaggcatttatttttctcatatggcaaaaacaaaaaacaaaaaaaaaaacaggaagatgtaaccacatcatggttgatagagctactcaaggatccctttttcttcctgctcaagcaccaaaaaaataatggctttcattctacagctgccccatgattacaatatgtgttctatctccaacttctggtccaagtttcaggcaggaataagaaagaagcaaaatgaggaagtgtattagtctgttctcatgctgctaataaagacatgccaaagattgggcaatttataaaggaaaaaggtttaattgactcatagttcagcatggctggggaggcctcaggaaacttacaatcatggcggaagaggaagcaaacacatccttcttcacatggcatcaacaagaagcgcagagcaacagtggggaaagtcccttgcaaaaccgtcagatctcatgagacttattcactatcatgaggacagcatgggaaaaacccacccacatgattcaattacctcccaccaggtcccttccataataggtggggattatgggagctatagttcaagatgagatttcggtggggacacagccaaaccatatcagtaatgatgtgtgtctttatcaaggttaaacaatttccagaaagctccagaagattttggttggcatctcccatggctacccatagctggaagagagtctagaaaatattgttcttagctatgcctattgctatcccaaacaatctcatggttctagtacggaaaagtggatactgagaagagagctgactgtgtttagctataatatccaagtagagattgaaagtacactgttggctacagaagtctggagtccaggggagtcattaaagatatttaaaaaatactcatcagcctgtaaaggatatttaaagtcatgggactgagtacagttagtcagataaaaagtgacgaaagagaagaagtctctggactgagcttggaaaccttccaacattccaaagtctagtagaagaggtagcaaaaaaaaaaaaaaaagctgaaaggagcagtaagagaggaaaaaggaaaaccaaaggaacgtgctgaccactggtgagaggtcaaggtagggaggacaaggaagtggccactggttttggcaacatggagattgttggtatgtggggaaaagcaagagagatcagattgttactgtgtctgtgtagaaagaagtagacataggagactccattttgttatgtactaagaaaaattcttctgccttgagattctgttaatctataaccttacccccaaccccgtgctctctgaaacatgtgctgtgtcaactcagagttaaatggattaagggcggtgcaagatgtgctttgttaaacagatgcttgaaggcagcatgctccttaagagtcatcaccactccctaatctcaagtacccagggacacaaaaactgcggaaggccacagggacctctgcctaggaaagccaggtattgtccaaggtttctccccatgtgatagtctgaaatatggcctcgtgggaagggaaagacctgaccgtcccccagcccgacacccgtaaagggtctgtgctgaggaggattagtaaaagaggaaggaatgcctcttgcagttgagacaagaggaaggcatctgtctcctgcctgtccctgggcaatggaatgtctcggtataaaacctgactgtatgc

SEQ ID NO: 9908 - DNA, 2300 bp, Homo sapien
gatctgtttccatttgtttgtgtcatccatgatttctttcagcagtgttttgtagttttccttgtagaggtctttcacatccttggttgggtatattcctaagtattttattttttttgcagctattgtaaaaggatttgagttcttgatttgattctctgcttggtcgctgttggtgtatagcagagctactgatttgtgtacattaattttgtatcctgaaactttgctgaattcatttatcagttctaggagctttttggaggagtttttagggttttctagttgtacaattatatcatcagcaaacaatgatggtttgacttcttctttaccgatttgaatgtcctttatttctttctcttgtcaaattgctatggctagaatttccagtaccgtgttgaagacgagtggtaagagtgggaagccttgtcttgttccagttctcaaggggaatgctttcaattcttttcctttcggtattatgttggctgttggtttgtcatagatggcttttatttcattaaggtatgtcccttctgtattaatcaggtttctctggaaggacagaactaataggatatatgtatatatgaaagggagtttattaaggagaattgactcacacaatcacaaggtgaagtcccacgataggccatctgcaagatgaggagcaaggaagctagtggtggatcagtccgagtcccaaaacgtcaaaagtagagaagttgacagttcagccttcagtctgtggccacaggcccgagagtccctggccagccactggtgtaagtccatgagtccaaaagccaaagaacttggagtcttatgtttgagggcagggagcatccagcaagggagaaagatgaagactggaagactcagcaagtctagtccttccacatccttctgcctgccttattctagctgcgctggcagctgattagatggtgcccacccaggttgtgggtagacctgtctctcccagtccactgactcaaatgttaatctcctttggcaacactctcacagacacacccaggaacaatactttgcatccttcaatcccatcaagttgacattcagtattaaccatcacaccttctatgccaattttgctgagggttttaatcataaagggatcctggattttgtcaaatgctttttctgtgtctattgagatgatcatgtgattttttgtttttaattctgtttatgtagtgtatcacgtttattgacttgcatatgttaatagattgttaatttgggggtttatattttaaaaatatatgtttatagctataaatttccttctttttttattatactttaagttcttacatcactggtcatcggataaatgcaaatcaaaaccacaatgagataccatctcacaccagttagaatggcgatcattaaaaagtcaggaaacaacaggtgctggagaggatgtggagaaataggaacacttttacactgttggtgggactgtaaactagttcaaccattgtggaagacagtgtggcaattcctcaaggatctagaactataaatttccttctaaacactgctttgtttgcattccatacactttagtgttttgtgtctgtactagtttttaatctcaatgtacattctaatttcccttgtggtgtcttctctgatcaattggttgtttaggattacgttgtttcacttttgcttattaatgaatttgctcactttccttctactattaatttctaatttcattccattgtggtcataaaacatactttgtttaatttcagttattttaaagttattgagattggttttgtggactaatatgtagtctgtcctggagaatgcctcatgttgatttgcaggacagggctctggctaaccttggctggcccagctctttccgccatctcacttgtaattttcggaatagctatagaatgtgccgagaacacagcatcctgagataaggagaaactgtttggaacaatctgggctctatttctgttcctcctagaacaggatgtcctacaatgttttagcacagtaatctaagttgtctctgtagtataaaaaacagagcagagtgtttttggggttcctcagttgcagtgagatgtgaggcacttgcagagactcagtccaccaccctgggcagctttcaccaccctgggcagcttttccgagacgtagggactggcttgccgtaattcatagcttctgctgtcccttgctacatacctgtgagtaactgaattgcttttcttaatttgtatgagtgttctgtctcactggac

SEQ ID NO: 9909 - DNA, 2300 bp, Homo sapien
ttatgctcatttagtgaaataatatgtgtaaaggatgtagcaaaatggctacaaggtagtgctcagtaaatgcactgttagccactgttaacagaagtctattcttgtttgctttgtgtggtaggtatacagttttacagtaggatccttgccactttatcatttaactatctgtatctgccgtggtagaagattttgaatatgattcattaatgcattcactcagcaaatgatggctgtggcctggcacatagaacagttttgagtttaaattgtagggcaaaacatgtatcttaaaagtcacagaatgttagagctaccaggagagactttaaaaaaaaaatagatgaagtgagtggtcagggtacaaagagattaattgatacacccaagatctcacagttgattgttgaggaaactaaaaagtggcagaaaatagcaggaagaccttcattctgagaatcagatgacctctgttttatcctgacttcattgtttctgtatctgtaaccttgagcaagccttttaatctttccatctcaactttagtttccttgacttgaaattggaattaacccctgcccaatctatgtcagggacaatctgtaagtatcaaacaaacaaacaaataataaaaaggaatgcaagtgaacctgtaagactccactgtgctaatgcctatattgtttctctgatttcagtgcttccctcattcaccaagacccccatggatctcaccatccgagctggggccatggcacgcttggagtgtgctgctgtggggcacccagccccccagatagcctggcagaaggatgggggcacagacttcccagctgcacgggagagacgcatgcatgtgatgcccgaggatgacgtgttctttatcgtggatgtgaagatagaggacattggggtatacagctgcacagctcagaacagtgcaggaagtatttcagcaaatgcaactctgactgtcctaggtgggtgaatttgttaagattctgtagtataaatcagtcttgaagatactagctcatccaaggtccctaagtatcagaagttgtgagagtaagagatgaagatgtatggggcattgccttttcctagaaagtattaatgcaaatggcctcttgaacactttgaagtcagggattgcatgacatcctcaagtctggccactgaggtgaatccctgccccctccatcctgaagagaggggccgaggaaaagttgggatgctttcccttttatgggggatcaccctcctctaatttccccactgtgctgtctatatcagtagtcttaacaccataaagaacattaaaaaaaaatgtgggaacaaattgggaaggccttactctcttttctcagcctaccatacctctccggaagtcagagtttttttttcatcttttacctaaacaaatgctttttaaaaatgtaaacacaattattattcacgtatctttgaaagagctaattaacgtaacctattaagatactaaataataaaagtaaattattgtcagagttttaatataggcccaggcatccggccctaaaaagtttcacttaaaaaacttaagcattctgattttttttatttatcaacatacccttgtgcttgaaattatttttgtactttctatttttaaaaagcttttgtttcccactctccccccctactaccagcttcccgacttttgcaaaagtgagggaagctgagattttaaaaatagtagatattatccttaactggtgttatgagtaaatgacagcagaatagtgaaatactgaatgttgtatatgtttaggctcttagaaaagtgtgtccagtaagttgtgggagaataaaattttaggttacaatttgaataagtttaaatgctacattttatgatatggaaactaaattttatttgggaaattaaaagcataacttgttatttcagaaacaccatcatttttgcggccactgttggaccgaactgtaaccaagggagaaacagccgtcctacagtgcattgctggaggaagccctccccctaaactgaactggaccaaagatgatagcccattggtggtaaccgagaggcacttttttgcagcaggcaatcagcttctgattattgtggactcagatgtcagtgatgctgggaaatacacatgtgagatgtctaacacccttggcactgagagaggaaacgtgcgcctcagtgtgatccccactccaacctgcgactcccctcagatgacagccccatcgttagacgatgacggatgggccactgtgggtgt

SEQ ID NO: 9910 - DNA, 2300 bp, Homo sapien
ctttctctgtctacctacttacctacctacctatatagaagtatacaggtgtatgctttcctttgtatttaagaacaaaagctatatctccttaatgggtttttaattgtttttctcaaacagtgattatttaattaaaaaaaaaacaaactactaggtgtagttcatccactatatatcaggcattgtaccacatattcacatatattctcatttaattcttagtcagaatacaattcaatagctattattatctttattgttaagcggaggttctaagagtttattgattccactggacagttaaaggagatgacttggcttttaaagaacaaagacaatgttccacaatccttaagagtgacataggagagttttagcactactttgagaattgttggtctcttattgttgtttaattatgaaacatacaacccccccttaccattgttctcttttttgttgttttcttttgtttcgtcttgacccaccagttagtagctgtcagaagcaggacgcaacccagagctgccccgacttgcacagtgtccctgcatcacactagctcttgcctgtacaatctctgccgctactcccagtagctcctagtaactcctggcacacatttctgaaatgtcatttaggggctcaggaattttcagccactaagagaggaaagctagctaacattgataggaatcaaaacttgcatgttttaactaagggaaccaaccagctgcttataaccatggatgtatgttttacgcttgtacagtaaaagtacaaagtaatgtataatatcgactctgactgttaaggaatgcttgtatccagaagttttaatatgtattaaccaggacaaaagaagttacaatttaaaatacatattgggttctcctatgtgtgctgtgtattgagagtgaagatttagctgttatctgtaaaccactgtgttgtcaccttctgactgcaccagttcctctgagggagacttggatcgtgagccacccagacagtgagtgcggcagttcaaattatagtagaatgattctgcaaagctgagttttggaagggcagaccaacattgcagtatttattgaaaccgattattttgaaaagaaaactagccaaaagggtttgtcatttggcccattccgtttctgggaacgtggaattagtggatcagtggagtattaatctctgcttcagttttcttaaatcttccttgattgccccagcctcttcgtctagccatgtctggtcccttctttctttgtcttctcttcccacttgtctcactcaatattccctttgtatactgtgacccctgtaaagaaaaacagagtggtaatcattgtggtgaatactttaatgcagagtgcttataagtctctgtataaagagaattaatccagaatatgtgctcattttatgaatttcctgcctgaagtattggttttaacaagtatatcttgtctgaacatcttactgcgtttatgttagtgagctgtgggtgacagaattaggttaatggttaaaagcacaggttttggaattgaaaataattgtttcaacccttaccttcccctttcgtgctgagctaagtagtaataccatcatattttgggttgttgtaggaataaatgcagtaacacttgtaaatcacttaactgagtgcatatcttcaaaaatactgtgtaaatgttttataaaagcataattatttttattttttatttgtatattttatttgtatatttagaagtttccaatagttgctaatttgaataaagagtaatagaatgaaataatagaacagcatgggccctaatgagtcaaataatctttaagtgatgacagaaagtgaatctttttcactaaaacaaaacctatctgtgatacaaatgccctgggtcttcagcacaagctttgcagtggattcttctggggctgccccagtcatgtatttgacacatagagggagtatttgtttggcaaatggggtgggcagtgggggcccaaactttgtccaaaagcacgaaatgatggtagtttgctctgatgcatttgatttggtgatttttcagagacctgagtgacaacgcaatcatgtctttacaaggcaatgcattttcacaaatgaagaaactgcaacaattgtaagcttttcttttccttctaggagtctgaaagtatagaggggaaaactgtcatatggtgtggcatcctggattatgtatctataaaaagtgcctggcacattcttaacattacttaatttttatactaggcaacagaaa

SEQ ID NO: 9911 - DNA, 2300 bp, Homo sapien
gaattgaaaaataaaagctattgcttttctcttttttctttacagggacctaactttcaatcacttatcaaggttagatgattcaagcttccttggcctaagcttactaaatacactgcacattgggaacaacagagtcagctacattgctgattgtgccttccgggggctttccagtttaaagactttgtaagttacacgttttgctgtcagtactcgaacgtaattggttcctaaatatgcccacttttctcctagcagatttcctttgttgtcaaggaaatgcatacagcctcagaagtagtatcttaatctttcccagatcagtttgattacaatggatccatttcatccatatgtgtttcgtatagggattaaaaaggacagtgatcagtttgttttggtgattacagtgaaccttctcaggatctccaggaaattggtaactgcttaagagggaaacaattttaagtccactaagtttttctttgtaaaatacagattaaaaattacttagagcaaaaaggtctacaaagggcaaggaagatactgtttatcatgccagttatatcctcaacctgatctctgtcctaagagaaagaaaagggagttaaattaattgacctttgaaaaatttctcaaatggtaatttaaggttgtgcaatgggcttttgatttttgctctgtcagaaacttttgctctgttcgctatttgaagcattacgtaattgaaagacatactgtatgctttggcgaacttctgcatgcgtggttggaagagtggttttaaagtttaatgtatttttcagactgttcggatcattcagaatgtagtcattttgatagaggaattaatagggccagtgtcagctttttcggattttagggaaaaacttaaaatgttgttgagggaatcaggcagggtgtaagaggtaagttggagaaaaagagttttctattattttgagagaggtggagataatgtggggaattatgagaaattttttacaaatgatatgccacctgggtggtgatactaggctttctgagcttatcactctaaagggaatgcttcttttaaaattagggatctgaagaacaatgaaatttcctggactattgaagacatgaatggtgctttctctgggcttgacaaactgaggcgactgtgagtatgaattgcctcataatttagctcactctttgatttaaaaattttgtcttcactgaagtcagctatacaagttgacatcatgaagagatgagaaatcagtgcttaatctggttaccacccttgatcctctccccaaatgcctgctgttgcgcaagatgtatattattaactttttcttccttaggtgaaagtgttttattcaacattttagtatgtgtaatttactttaatatcctcataataattttcatctatgttgagggcttacacttttggaattatcattgcgtaaaagttagtgcaggcacttccacatcttgaaatcctcaatgttgtactgtccccgtaggaatttttttaatgaagtaatctagtagccactgataatgctgtggtaggttacaagcaaaacaggatgaaaacatcttataattaaccataaaatggtcttgcagatggtcaaattacatgtgttaagccagcagtattcaaattcagctccctatagtcccaaactcctatggatggaaggtatccacagagaaggagaggaaggagaaaacgttcactattatctgctttgttagtgttctgagacagtttacttgaaataaagtctctacctattcctaaaaggactctgaaaaacagtgatttaacttaatcagcagagtgacttactgaatacctatttttgttgggctctttgttgaatgcttcaaaaaccatgttcgactacattattgaaatagatggcatggacacatttttacaggatatattgtttaattgaagaaaatggaattgctcacacataatttaaaaagcagttctgtttatgagagttccaccccaaaatggctttttaaattaagtgctccaatgtaatttttttccccaggatactccaaggaaatcggatccgttctattactaaaaaagccttcactggtttggatgcattggagcatctgtgagtagctagaatttagttaccctaaaagagaatctctaagatggtttttacttatgtgtcatgaaagataaaacaaactggaatgtaattttgttggcatccttccggttccataaaatatatttaaacatctccctatctttctatttc

SEQ ID NO: 9912 - DNA, 2300 bp, Homo sapien
caaggacagacaagcttgggcagacagcatgcaataaacaatgtatagaagtgaaaacttactttaagcttccagggtttgttttttggtttgttcatgttttctgtcttgcttttatttttattttttttgcaacaaacacattagttacgttctctaggtctatttccttacccagaggaggaaggccccttagcacatgatctctgcggtctccattagtttcaacatcttgtggcgctgatcacctgtaagttaaggaacaaacttcactgggaagtcctgtagcctgaatccagccccaaacatccactcccccagctgaggaggccgggaggtacttttaccctggtagcattctcaatcaacatgtgtcattactcaaagcgcaagtggaccaaggtgcatatactaattttttcctccaaggtcttagttttcattttactttgaaatgtcactgtgactacttttattattactattaccaggaatctatgattgccatcgaggtctattagaaggtcatctcccatcccccaccccgcccagctttatccagtgcacgaaggctggctatttgtaattcaatatacactttccaaaaccacgagttttacgttttattattgtttttacttttgaagccgatgtatgggggaacacccaccagcattaacgttgaaagagctgttttcattgaaaccactctttcatctgtggatggtaggataatttatcagtgtctttaatttggaattgaaaagtttcctgaaaacactgctaattaaactttacttccctgaagttctcctaaatacctccaactccgagaactagcccagtatttgctcacttccttttgcctttcaactccatttgatatatgtttcccacgacgtagtggagacttctggctggagaggctggaaaatataactctgaatttcctacaatctcagctccactttctcccgcgcgtaggcccccggctggagcggtgttattgtcacgtggccacggggacgcccgcagccgagtcggccaatgggcgcgcgtcggcctctacccgcccgccttgctactccgccgcgcggggacttggcgcagtgccgcggggtggaggcgaaaaagtttcttttgcagacaagaaggggcttcggcgagccgacgctgctcaagctgcaactctgttgcagttggcagttcttttcggtttccctcctgctgtttgggggcatgaaagggcttcgccgccgggagtaaaagaaggaattgaccgggcagcgcgagggaggagcgcgcacgcgaccgcgagggcgggcgtgcaccctcggctggaagtttgtgccgggccccgagcgcgcgccggctgggagcttcgggtagagacctaggccgctggaccgcgatgagcgcgccgagcctccgtgcgcgcgccgcggggttggggctgctgctgtgcgcggtgctggggcgcgctggccggtcagacagcggcggtcgcggggaactcgggcagccctctggggtagccgccgagcgcccatgccccactacctgccgctgcctcggggacctgctggactgcagtcgtaagcggctagcgcgtcttcccgagccactcccgtcctgggtcgctcggctgtaagtattcttcccgcggggggagggggcccgggccgctggagattcgagaaaacaggagccggcggggaatggggttcggcgtgcagtcccctttttgccgtatagctccttctggcccaggccgcgatcggcgctccgtgggcgtggaaaaagaactgtccgggcctcagtttccctcccacgtgctttgcgggcggcgcaggtgggctcttggcgcgtcctaactggctgcaggtagaccagggttgggggccagtaacgacgccagagattggggatgaagtcctgcgccctaagctagccaaggggttcaaatgcttgctcctgccaggcccaggggagataagcggcaacctgcacacatcaggagtttgcagttctcgctgagttatgagtctggttcagttttagtttctagctgcgtcagactccttttcctgttcccacccagtaactgaagtcaggcttttcatttgggaagccccctcaacagaattcggtcattctccaagttatggtggacgtacttctgttgttctccctctgcttgctttttcacattagcagaccgtaagttcccactcctcaaccagattgtaaagactggtcggtagctatggaaagggcggaactcgattatccagaatcaa

SEQ ID NO: 9913 - DNA, 2300 bp, Homo sapien
tgtaaatgtaaatggaattcatggaagaagatgaaattatacaaggagaataaagaatgagaaaaggaaatgagccaaaactccccaaaatggtagcacatttatatccctgtcatatgtctcatgtctcaagagcaagcctccatactgatgttaccttgcttatgcataatggcatgtgtacaatggaatctttcttctttttaaaaacttcaatgaattatacctaattttccttgtatgaaatagatggggggccgggtgtggtggctcacgcctgtaatcccaacactttgggaggccaaagcgggcggatagcctgaggtcaggagttagaaaccagcttggccaacatggtgaaaccctgtctccactaaaaatacaaaaaaattagccgggtgtggtggtgggcacctgtaatcccagctacttgggaggctgaagcaggataattgcttgaacccagggggtagaggttgcagcgagccgacatcgcatcactgcaccccactccagcctgggtgacagactggagtgtctccatctcaaaaataaaaaaataaaaaaaataaataaaaatagatgggggatactgagctggaaaatccttactatgactgtagtgtgttttgtctactcccaagcagacaaaatcataaattcaaaaccaaggtgccatcattatagatattttctaattataattatacatcatccaaaaaggtagtagcgttgttgttaatggtagctggaaataagaaaatgggataccatatctaaaatagggtgtgttaacttcaaagtgagtcttttccttcccccgtaagtgggagtgatttgctacagtgaaaaatcaatgggccttagagtcagggttaaagtctcaactccacaagctatctccactcctcaatcatgagcagtttacgcaactccaaggacagacaagcttgggcagacagcatgcaataaacaatgtatagaagtgaaaacttactttaagcttccagggtttgttttttggtttgttcatgttttctgtcttgcttttatttttattttttttgcaacaaacacattagttacgttctctaggtctatttccttacccagaggaggaaggccccttagcacatgatctctgcggtctccattagtttcaacatcttgtggcgctgatcacctgtaagttaaggaacaaacttcactgggaagtcctgtagcctgaatccagccccaaacatccactcccccagctgaggaggccgggaggtacttttaccctggtagcattctcaatcaacatgtgtcattactcaaagcgcaagtggaccaaggtgcatatactaattttttcctccaaggtcttagttttcattttactttgaaatgtcactgtgactacttttattattactattaccaggaatctatgattgccatcgaggtctattagaaggtcatctcccatcccccaccccgcccagctttatccagtgcacgaaggctggctatttgtaattcaatatacactttccaaaaccacgagttttacgttttattattgtttttacttttgaagccgatgtatgggggaacacccaccagcattaacgttgaaagagctgttttcattgaaaccactctttcatctgtggatggtaggataatttatcagtgtctttaatttggaattgaaaagtttcctgaaaacactgctaattaaactttacttccctgaagttctcctaaatacctccaactccgagaactagcccagtatttgctcacttccttttgcctttcaactccatttgatatatgtttcccacgacgtagtggagacttctggctggagaggctggaaaatataactctgaatttcctacaatctcagctccactttctcccgcgcgtaggcccccggctggagcggtgttattgtcacgtggccacggggacgcccgcagccgagtcggccaatgggcgcgcgtcggcctctacccgcccgccttgctactccgccgcgcggggacttggcgcagtgccgcggggtggaggcgaaaaagtttcttttgcagacaagaaggggcttcggcgagccgacgctgctcaagctgcaactctgttgcagttggcagttcttttcggtttccctcctgctgtttgggggcatgaaagggcttcgccgccgggagtaaaagaaggaattgaccgggcagcgcgagggaggagcgcgcacgcgaccgcgagggcgggcgtgcaccctcggctggaagtttgtgccgggccccgagcgc

SEQ ID NO: 9914 - DNA, 2300 bp, Homo sapien
atgtggacttcatgagtatatatgtgatgtacgtattcacagtttgctcatctgtggaatatgagttgctagaatgctaagtgtattgctatttgtttttcccactgttatttcagcttatgaatataaatcaaggcaaacattttaccagagcattccaagttctaatcatatggcttattttttccctaaattgtatttttttctcaatttcttaacaatattaaactgtaagtcataggataaactggctgaatttattcttagctgattctccctcctttcagatacctttctagtccaatcaaattttacataacatacctagctatcacaacaaagcaatttagaaatgagttcccaaatactaactctgtgacagtaggtaaattagatccagagttttaattgttgaaaaaacaagacttaaaaagaaggttacgatatcatgctataagtagtgatgtttggcattcagcaataggttaaacaggtcaagaacatgggactataagaaaaaaacaacaaaaaagaaaaatcaaagagaaggaaaagggagaataggatcaaaattcagaaagcatatggtctttcttcttcctcttctttgacaggaaataaaagtgatgaatgagcaggaaaaatatcaatagcaaacactcaagactatgaccttgaaatgtgcctttatgttgtttcttttaaatgtttaactttttttaattaaatgaagtgtttatagtcactgctagacatttcatcattatcaaaggcctattatgtcttatacaaatgtctatttaagcatttttagcttaaaaatataaaatcctttctgtaattttctgcctttttttcattttcaaatatcattctttcaataaaattatcttccagtaattttgatgttattaatcacgattattttttcatcttgtattatgcctaccagccacttcatgtatattatttcacttaaatcttatgaaatcaacacgattgatattacttttatttcatagctacagaaattgaaattcaaatttcgtccattacaacagactagctgtggcaaagacaatgtgaatttacccaaatgacttaactctttttataaattcgtaaaatgtgaagaatcatagaacacaccttaaaatgattgtgaaatcaaggaggagaaagctagctaaactggtagacaaactgcaataggacttgtcaagccaaaacctacaattattcttttggatagtttctttttctctaaagtggcaatttaacttaaagatattaaagaaacccaatctatggggttacttaaatgttctcttccagcccttcctctttccagttttaccaagaagcacattttagacaggggaagagaccaaaccaatgacagcagaattaccattatctctagcactattcgttgtcaaataactaaatgctggtttgaagaactaagtaatttgagaaattaaaaatgaaaggaattataaatgatttgaaaaaaaatccttcttatttttaatgttttttggtgctgttttctatgtccttcctcctatggtgtcaattatatttttttccgtgaagtgatttggttggtgagtctaatctccaacagtgccctacctctttctcccaaaaaggcctcagttgaaaaatggctcaacactttccctgcaagctcacaatgaggatctcctattctccctgcattcggccagactcttctttttttgcatgctttcctctcccatgcttgggttgcacagagctaccgcacatctgtcttctaggtcaggctacagagtacttcggatacagcaagttacgacccatctggaaagacagatctacctgccttttggctttcttccttggtcaaaactaaaatccgaagtggagtgccccgagcgatagagaaagtgcctatagctttgacagccgcttggagcatgctcagtcggtctccaggcaccgggaggcggctcccccccaccaccccccgggccggcctccaccgcagcctgtccggcccccacccctggcgcgcgctcctccgcacccacaagggcgttcagcagccgcgcctccccttcccgccaccgcctccttctccgctggctgtggcgggcgaggacacgtcaggggccataaataaataaataattccattcacccgttgacagcgaggcgaatcggctgcggtttgctgggaacggagggctgcagcgcccaccctgcgccagagaccagataaagtaagtacagctggggagggaggggagagg

SEQ ID NO: 9915 - DNA, 2300 bp, Homo sapien
cctgcaagtcctgtaacacctaccccttttcctatttttgtccctgctatcctgctattatggccttattgcttccatagtaaccttctaaatgtagctaattaccaccaactcatgcaagcagcaacatctccaaacctcttttcccagagccccaaatacattgtgtacattttctgcatttgaagatatcagggaaaagttttaccaaatattttgttactgtttaacataacttgccatttttctaacttcttctaacagattcctcactattgcctgcccatccttgaagccaatgtgtttctcaggattttgttttatgcaccctagctcagattttgctattctgtcaaacaactgcaatctcttagggcttacaataacagatatttatttcttgcccatgctgcttaggcactatgggtcagctgtggctctggttggttctgaggggctcagctaaccgtcaaacattttcttattttctgggatccaggctaaagggacatgttcttattttggaaagcaaggactgctataaaggcaaaacatgcaaacacattttaaacatactcttggacatggcctacactgcattgacttacattccattggcaaaaggcagtcacatgtccaaacctaaagtcaatggatgggggctatactttgcctacagagaaatatgacaagtatgagtaggggacaaataagtattaacaaaaataaaatctaccaattcaattcactcgtaagtgtatggtagaagaaagacctggtaactttattaagttcctatgaattctacattccttcccttcaacatggctctttcataatcctgattattggtattattttctgactccagtggatagttaacattctgtgggttccagctttcatttcctcctcttcttttgataattaccaactaattgagtgtctcctgaagtcattggggaagcacatagctggaatggtggaggcagaaaacccaggcaagtgaccacgaggaaagccattattagaacaagcaaaatacaagagggtggagaaggagtggcaatatgaccactttaaggagttcatgaatgaaagatagtaagttggtaggaagtgtatggcttttaattcattaaaaacatagttctagagtgagacgaatactgcggtagactttaagactttgaacaagatatttgacatctttgaactttattttcattgcctgccaaatgaagacaatagctaaaagatagtattatgtgaaaatgcatattaaattgttaagtgtcttgcttattgatacttacctgtaccataacaggtggcagcaatgttttatatatatgcaattggtaatcagcaaatgttatttatatctaaatttttatgtggtgactgtctgtgagtatcctctttacaattatgcaggagtctcataatttcatttaggtatgactaaagacaaatcaatataaaacaaaaaaggagaaacttaaaacaacgtaggtaagatctgtaaataaaatacagcttccagtttcattgtgtttccttacaaaaactatatttgaatcagttgtggactagttaaaagcaacctatttttcaaagcagacataaaaatcaaaattagggcaaataagtaaatgtgtaatattaatttaagtactgtatatattatgccattatagtggtattatatcaacttaatataattaaggaattataattttttctgcaatccttatcctaattctatagcctatgtttatgtttttttgacatgtgtcttttatcacatatttggaattatgctatcatacaggtttatatcactatttttaaactaaaaattatataataaatacttccctttgtattatggagctttcctaatcattatttaatgtatatataatagtttatcaagtgaatgacagtaatatatgcaaccgcttctcagagttggcatttagattagttttcccatattatgattactcaagtgagctaggggaaggggtcatagaatcctgagactagctgacaaagtgttgagtgacaaagagatagatggaactaagtatgttcaggattctaaaaagagcaatggttcacaaggaaacttctgcctcaggtggggagaggagtccatagatcagggaaacttatgtcttggtgaaatggaagaccatgtttctaaacacctgtcgccaggttggttcaccttgctgtggtactgttcttaatcctgcctcagtgatactgtattttttagaaacttaagggat

SEQ ID NO: 9916 - DNA, 2300 bp, Homo sapien
acaaccaaacctaaaataaaagttaaaaataaataaagaaattcaagaccctgaaaaattagtacaaatttaaacatatatatatataattatcttaaattatgataaggggtatggtgataaaaaaaataaaggaaacagcaacagtgagttcaggggcattggtagtagtgggtgggaaatttcaaataatatgtttaaagaaggatttgcagaaacattgacattttagcagatacctgaaaaaggttgtgatagtgtaaaaaaaaaataccacccaaccccaaccccccacccccaaagatacccatgtcctgatccctaaaaactattaatattaccttttatggaagaaagaaaaaaggaaaaaaagaaagaaggaaggagggaaggaaggaaagaaggaaggaagggagggagggaaagagagagagagagaaagcaagaaagcaagcaagaaagaaagaaaggaagaagaaagaaagggaaggtgggaaagagagtgatcacacatatagatgtgattaaatgaaggatcttgagatggagagattatcctggactagccaattgggccctaaatgttaaatgcaattgtggatgttttttagaaaggaaacaaaagtgattgtattcataaacaaaagaggggaaagtaatataaccgcagatgcagaggctggataatgcaactacaagccaaagaatgccagtagccaccagtagctggaagaagccaagaatgaattctcccctcgaaactccagagggagtgcaatcttgttgacactttgattttggcttgatattactggtttgagacttctggcctccagaactgtgagaaaataaatttgtattttcaatccactaagtttgttgtaatttgttggagcagccattggaactagtacaggggatgaggatgcaaattatgcagagctgaggacacaagctatttggtgggtaaatatctggagtgagttaacttttggatatgttaagtttgagaagtctagtagacatccaagtggggagatgtcaaggagacagttaagtgctcaggggagagtcctgggctgtctagataaatgtggaaattattggcatgtagattgtaattaagccatgagaccagatgagggaggtattcagaaacaaagaaaaggtaaaatgattgagctctggactcccccaggattagggattagggatatgagaaggagccagaaaaggagcctaagaaaggagtggtcttaatgcaaagaggaaaatcagacaagttcaattccctgggagtcagtgaagaaaaagtttcaaggaagatggcatagtcaactgtggtcaactctatcaaaagctagaataagatgagaactatgggatttattgtcttttagtcacaaggtaattgatatttttttaagaatagcttcagtggaagtgtgggaacaaatatctgattgaactgggttcaagagaaaatggaagaaaagaaatagaagatcataaatatagccaacaaattgagataatgtcattaaaaattacatggaggaagtcctcttttagtttccacatttaatctaatctacacataaaataagctaacaataaccacatatagtaaaataaaattggtcatgaaaatatttctccagaatgtctttaaccaaagcgacatatgatggaaattcattatgctttagccatagtgttttctacatttcccatagaattaaaatataaagtagtcagttggtatcgatatagtgaagtaattcttagtaatgtcacagtacagatcatactttgtcttcacagaaacgtgtggatattatagcttaaatgtatactataaatatttacatttatcaaacttaatggtttctattctgtcttctttatgtcatatttgtaataaatattcaggtaaaagtcagaaaattataaacctaataaaagtagaaatcgtatttaccttaccataacatccctattgtgctattgtgcagaacagtggctgtgaacgtggtaagtgttcaattagcacttactgaatgaaaaaaaagttgccagtgtaagacgtttcggccgggcgcggtggctcacgcctgtaatcccagcactttgggaggccgaggcgggcggatcacgaggtcaggagatcgagaccatcctggctaacacggtgaaaccccgtctctactaaaaatacaaaaaattagccgggcgtggtagcgggcgcctgtagtcccagctactcgggaggctgaggcaggagaatggcgtgaaccggg

SEQ ID NO: 9917 - DNA, 2300 bp, Homo sapien
tacgagttcaataatgcctgatacggcattaaaatagaattttaactgttcaagcttctcaaatccatggctaacactcaaacctaaaagcagatttaggcttaaaatcaaggttggagccaaacttcagtgcagtactataaaatatctaccttcttatattcttataagtgtccaatagacagctcaggagccaaatgtgtcctgagacttttgtagttttaaatataattacttaatactcacaaatatcttactaatgtgacatttaaataaattcaatttgaaattataattgggaaaataaactagaacattattaatttattcaagaatatattggtattcaggtcatactgtctatgtggagtcatcagatggctattcaaaagtttacatattactcagagctcagtggaatcactgctaattctctaattaaagttttaaaatttaatgctgaaagctactgttggtgaaggccaagagatttgattaaaatcaatttgattcgttaaatttattgaatgcagctctaaaaaattcttgaactatgtatttggtgacttcatgaaaagatagtaaatgatctgattaaaagcaacttgataacaaatgtattggtcaagataacagtttgattcaaaaattggtcaaaaataatgtaaataaattttttctcccaaatattggtaatcttggtaaaaccatatttcattttatagtccatcagttactaatgccaagtgtattactgtgtacacttagaaagttggccctactatacattctcccattttcataggttcatattatttttaaaattcaaatagaccacactttattaccatgactaatgagtatttaatgtggcctacacacatgtggatttatgaccatgtgttgaggcaacaattattgattaggaaatggaatctgaagaaagactaaatgggcattttagttatagaattcttttgttttacgattcttgaatttgtaacaaaacagcaagtaacaaaatggtcgttttggtcatcagaaaataattgactttatttcagtgatatttgctgtgttatcagattattgagttaaagaaaaatgtattcaatttcctccttcctctctcacatgtagaatacatgatacactaaaaaggattgatcaaatgctgctgaagggaaattgaaatgttaggtaggctgagtacacaggttgtttaaaatgagatcattgaactttctgttgccattactaacctggtaaataaaacaatgcattgtggcaaatgttactgaggtcaaaaacattctcacatttaatagaaataattaatatccatcttcattaatgtctttatttttaaaagtgagaagtagatgaaatggatcatcttttgaagtagtgacttctgttattggaaggcattcaagcaaggactaaagagtcattttttgaacacatggaggatttatgcactatctagaaattcaaacttccccaaagaatgttccacagagcagtagttacaaagtaggttaatctatactgttttaaaaatgtttctatggtctattgataggaaaataaaatgttaaatatttccctctattttaggactattcatatatttatatgctaatatgcattgtgactcttcacgaagagaatgaattttagctgttttctaaacatgttttactttattgccatttatttatatctcctttattcatgactactgatgactactgcttattcagttaaatacacatcagggaacgccagactaaatgttacaaaaaacccttttccggctctgagatgatttgaatataatgcatcttttcaaagtagaactaaaaatttgaaaggaagataaaattaaaatgatatctaggaacaagtaatggtagagaacctcctgtttcctcagtaatatacactagctttttggaatcacatggctataagttcagcaacatgacttaagatccaaagtaatacttctttaaacaagacagaaggttattgctttctcataaaattctagaatgatactagtgctctgctgcaagaattcaagtgtgaagaattctctcttgttgctcaagccccttagtgtgatctcctcatctccatcatcccagatggcaaaaatgcaggggaaggagaaggtaaactgcttccttttaagggcacaacccacatcagacttctattggcatcactttgaccaaaactgaatcatatatctacctgcaattgcaaaggaatgggcttggtgtattgtaagt

SEQ ID NO: 9918 - DNA, 2300 bp, Homo sapien
tgtgctaatttagattatcaagttaaaatagaactgctccagaaattcagagtgaatggaagggtgtttaataataactttaatacacattttacaatttttgaacatacagaaacattttgaaagcaaacccccagctcaaatagtaagttcacaaaaatctaaatgttaaggttacagatgggacctagcttgatttggactgatgtaacaaaactttataaaatcggtggagctattttttataaaaatgaccacctcaacataattaaattacttgatgcattttagatacaaaatatggttgatttactaagcatgttaagataaaatagctaagtgaagcacatattctatatttctttgtaaatatggtatgtagtattacttttattttatagctggtgaagagagcttgtgatacctaatttgtcaatggtttcagtgaatcacagctatataaaagcacagacctttagagctggaaggaatttagctatcttgaccattattggtctagttgaaaaagaggtatgaaaactggctccaaaaccagattcttgagttatctttccttgtaaaggacttgtaaaatttcctgggtcagcattccctttctttgtttcagattttctttttctgaattcattcttactaattattcatttttgaatagtcttctaatcactagattaaggttttgctcatctccaaacatgatcgaagtgagcctcagaagacccttcatttgagctcatatgcacagcgcttaaaccgacacccaatttgaccaaacatgtaaggacatgaccttccagcgtcatgaatatcacgacgttcctttagcaagggctttgcttaatagggctgcagtgaaaatcctccgtctaaatccttgagaagttgtaatttgtaaaaatgcaaattatctgaaaccagatatttttttctttttctttatggagagaaactggtctgttacatctagtaaagcgttctaatccggttgaccctctagagggagacatagtccagcttttataccagttgcctcctcatcttttactgtctcgttctttttctgcaggaccgttgtttgctctcaacggcagttgctggggctaacagaactggctgttgggagagagaggcgaggcaacgccgcccggccctgccattccattttactgcttaactcaacctggagtgtcaggacctattctcctgcattctcgctgcactatacgggggagccaagtcactctgtactcactggacagccaggctgggtggaatagggttctagagtggagcaggggctctgccctttatggcgactttctaaaagattagcatcagtgtcttttgacagtatagcatctggggtgggacgcggagaggaggctttgcttgctaaacggcttctttctccgccggtgatctggatttgtttcctcggccccctccccccgctcctttctttctcccctcccgcctttagcaaagtgacacaggcgacacctgctcgcttgtgttcgatgttggaactcgcacctcctcggtggtgacggtgccagggcactgctaccagggggacatcggcgggtttcccttccttccagcccacgatgcctagaagggcagcgggtgggctgcgtggggctctgcccgcagcacttcgaggcgggattgaggggctgaagctggccaggagttgctgctaagtggattcgagtggaaggcgccaagtctccgcgagggcaccagcggggacctatctgcgagcagtgggaacaggggcacctggacggaggaacgcgggcgtctggaggggggacatcggctgagctcagagcctctcctccttcctgtcccgagcttcccagcaactccgccacgttggagacccggtacctgcgagagccagggaactcgagaagtgcgtggccgaggctgctttcctgaaggtgaatcattctgtccaattgcctttccccagagaacaagagggagggcgggagagagggaacggaggatgtgtgagtgtgtgtgtgtgtgagagggagagacgacgtgaggcgagaggaaaagtctttagtcggccttaaaagcaaacaaatcagagatggaataagagcggtaattgcagcaagaccgccttgattcttgcagtccagggagctgagcgcaccgcgcgcatccggcgaggacaggaggcgaccgcgggcgctgccaagggctgcgggactttggcttttcctcagtaaacaaatcttttgattactttgacactgtggaat

SEQ ID NO: 9919 - DNA, 2300 bp, Homo sapien
taaacataactttcacatgtgttgagaaaccaaaaaaattgtgtgactcactttattgcaatatttgtggtggtttggaaccaaacctgcaacatttttgaggcatgcctgtagaaggtaagaagtatcaacaaaaaatttctgttaaattaggagaatctttactactttgtttcctttgaagagaatgcaaaagattttattttgtctaggagatgctggaaataggaatatcttgatctaaaaattattgggaattatttacaaaaagcacagaggttatgatagaatttcagcatcatatgacattggataagaaattttgttctattttgtaattaatttatatatctgttctctttactttttcatatattgtaaaaacacagtgggtttagttagaaaaataaggctgaaaatgtcccacacttaaacaatacaaataaaattttaacaagatgacaaaactatagattacaaccacaaaaagttaatgaattagaaggtagaaagattataatgtatgctttatgtttttttgtatgtgtgtgtgtgtgtgtgtgtgtgtgaaaagaaagccaatgttctaaagtgattttgtaagtgacttctttctagtacagagtccaagtttccaatgtcattcctgcttgaatttcatcacactattgaacacagcagacaaaaaaatactgtaagatttgcagtgcaacagtgccaggtgttttaaaatgtaaacgttgctttcctggatataagttactatgtaagtggaatgaaatatttaatcacatggcataaatcttttgaaagagactatctgagagatccttggaaacaaatgattgctgtatactactagacaaagtcaaatatgccatagagcaattagttacggtaaaacttgccttgtttagttttggtgctttgttttaaatgatttcaactagtctcagctatttaaaaaatacattcttttctttctttatgactgtgctaatttagattatcaagttaaaatagaactgctccagaaattcagagtgaatggaagggtgtttaataataactttaatacacattttacaatttttgaacatacagaaacattttgaaagcaaacccccagctcaaatagtaagttcacaaaaatctaaatgttaaggttacagatgggacctagcttgatttggactgatgtaacaaaactttataaaatcggtggagctattttttataaaaatgaccacctcaacataattaaattacttgatgcattttagatacaaaatatggttgatttactaagcatgttaagataaaatagctaagtgaagcacatattctatatttctttgtaaatatggtatgtagtattacttttattttatagctggtgaagagagcttgtgatacctaatttgtcaatggtttcagtgaatcacagctatataaaagcacagacctttagagctggaaggaatttagctatcttgaccattattggtctagttgaaaaagaggtatgaaaactggctccaaaaccagattcttgagttatctttccttgtaaaggacttgtaaaatttcctgggtcagcattccctttctttgtttcagattttctttttctgaattcattcttactaattattcatttttgaatagtcttctaatcactagattaaggttttgctcatctccaaacatgatcgaagtgagcctcagaagacccttcatttgagctcatatgcacagcgcttaaaccgacacccaatttgaccaaacatgtaaggacatgaccttccagcgtcatgaatatcacgacgttcctttagcaagggctttgcttaatagggctgcagtgaaaatcctccgtctaaatccttgagaagttgtaatttgtaaaaatgcaaattatctgaaaccagatatttttttctttttctttatggagagaaactggtctgttacatctagtaaagcgttctaatccggttgaccctctagagggagacatagtccagcttttataccagttgcctcctcatcttttactgtctcgttctttttctgcaggaccgttgtttgctctcaacggcagttgctggggctaacagaactggctgttgggagagagaggcgaggcaacgccgcccggccctgccattccattttactgcttaactcaacctggagtgtcaggacctattctcctgcattctcgctgcactatacgggggagccaagtcactctgtactcactggacagccaggctgggtggaatagggttctagag

SEQ ID NO: 9920 - DNA, 2300 bp, Homo sapien
ggtctacaaaacggctccataaatctgatgtataattcaaattggcattgaatttacacgtctatatccagttaacctgctgccttgagcatggtgcaagtgaagaaaatattattttacttcattgtatggttgtagctgtcaacacttcaaaaatgcattttctcttaagggaaagtggacattagggtataaatgatttattgctacttggttatgttatgtttatacaatgaaggagagcacagttttgccttcaaagcccctaacaccttttttcaatagctttattgaggtataattcacatactgtacaattcaccctgtcatcaataaacaatactagtgtttattgaatggctattacgtcccaggcaataaacacaaattgtttcatttaatcttcataaaaatcccttaaggtaggtattattatactcaattttatgattcaattaaagggcaagaactttgcagctaaaggttgaagtgaggtttgaacttacatccatgtagctccaatatatgttttccatattctgcagcttcccttcagaaaattactttgttctctttcagagagtgactggaaaaagggggaaaatgtgacttttagagggtagccgtggttagagaaactcttaatcttttaacctgtcaggagaaaagccagaaatagcagtcactgaaagttgttttaaaactctcaattcaaggttggcatgataatgcaaaatagtattattacgcagaaataagcaatcataatcataatactgatatacacaaatcataatgccaatatacactactttcacttggattcagcacttcctactagcataactacacctacctttatcgcattctcaccaaatgagttagggtttaaaatgggcaaacgagaaatgatgtggggattccggcccatcttttagacttttcacatcaatatggtatgttaaaatcacacccctggacatcatgctcgggaatacttaagtaattttgccacaattcatttactaaacaaatatttaggtaatttttacatgtccatcagtactgtgctaaccaccaggtgtacaaaggctaaaacaaaagatgaacccagttccagctcttaaagagtttacattttagttcaggctttcagaaggagaggcagtgagtgtgctatactgtatagcatgtgggctcttgaaccagcctctccactcacctctccacctgctgtgtgaccttggcatttgatttttaagcgactcgattttctattttgtaacataatcgttgacttcaaattaaagacatatctagtttcatttcaggtgtacggcaccatacgaagatggggctaagaaaatgttactatcctgtataaacaagagggtttctcgcacgttttcttcctttagtatctggcattattcaatactgtccatattctactccctgttcaccgatgaactgggacatgtttttcactgcagcttagtcgtctgggtgtgcctggggaggcgtcacaaagagcctataaagggtccccacctacaacgggagtaagagcgctggaaggaacccaggaagggcatggagaccaagcgttcggtttcggagtgttttttgtgtgtgcccatattcaccgagcttgggttctcccactcgtaacgaaaagcccagtcactgagctgctacattttctgccatatcttagccgtccccacgcccccacaccaccgccccaccctacctcaccctcaagcgtgagtgaatgcgcaaataagggttttcaaggcgtcagtgggaaagagggaggggaaggcaacgctgaggacgggaggacagggcggtggcatccctctagcgagagagagccagagccctcggcggcgaggaaagctaaaacccggcagtcccgggccagaggaggccaaggcaagatgctggacgggcggggaccgatggggggcagcagaccatggccgcgcacccagtgcgcccccggggcctcctcttgtcccgaggagcacccccgctcccggtgtcttttggtttcgaccggccgactgggaggggccgtgggacgccattcccataatgctctggggcgtgccgccgccgtcgctgccacctcccctaccgctagtggaagaagatggcggaaggcggagcggcggatctggacacccagcggtctgacatcgcgacgctgctcaaaacctcgctccggaaaggggacacctggtaagagaaaggggttgagatgcccgcggttgcccgaggatagtggagaagtg

SEQ ID NO: 9921 - DNA, 2300 bp, Homo sapien
gaaaggaaatgaacagagaagtaaagccggtgagatcgtgataagccgcggcaccgggacctgtcaaaacggcgtatataagactcaaaccaaaccactataacctatcattcgggaaggcctgaggtgggagcggcactacggaaggaaggaggacgaagagaaccgcacgagtcagaaccgccgccgccgccgctccccggatacctttcagcatgccctggcaagccaagaaccctgaccctcatctagagtccaacctttgccccaacatttcagaagcggccaaaatcccgctgccccggcggccgccgccggacctgcccgcacctgtcactagcgaaagaaccagctcgcggctcccgcccacttctccactatcctcgggcaaccgcgggcatctcaacccctttctcttaccaggtgtcccctttccggagcgaggttttgagcagcgtcgcgatgtcagaccgctgggtgtccagatccgccgctccgccttccgccatcttcttccactagcggtaggggaggtggcagcgacggcggcggcacgccccagagcattatgggaatggcgtcccacggcccctcccagtcggccggtcgaaaccaaaagacaccgggagcgggggtgctcctcgggacaagaggaggccccgggggcgcactgggtgcgcggccatggtctgctgccccccatcggtccccgcccgtccagcatcttgccttggcctcctctggcccgggactgccgggttttagctttcctcgccgccgagggctctggctctctctcgctagagggatgccaccgccctgtcctcccgtcctcagcgttgccttcccctccctctttcccactgacgccttgaaaacccttatttgcgcattcactcacgcttgagggtgaggtagggtggggcggtggtgtgggggcgtggggacggctaagatatggcagaaaatgtagcagctcagtgactgggcttttcgttacgagtgggagaacccaagctcggtgaatatgggcacacacaaaaaacactccgaaaccgaacgcttggtctccatgcccttcctgggttccttccagcgctcttactcccgttgtaggtggggaccctttataggctctttgtgacgcctccccaggcacacccagacgactaagctgcagtgaaaaacatgtcccagttcatcggtgaacagggagtagaatatggacagtattgaataatgccagatactaaaggaagaaaacgtgcgagaaaccctcttgtttatacaggatagtaacattttcttagccccatcttcgtatggtgccgtacacctgaaatgaaactagatatgtctttaatttgaagtcaacgattatgttacaaaatagaaaatcgagtcgcttaaaaatcaaatgccaaggtcacacagcaggtggagaggtgagtggagaggctggttcaagagcccacatgctatacagtatagcacactcactgcctctccttctgaaagcctgaactaaaatgtaaactctttaagagctggaactgggttcatcttttgttttagcctttgtacacctggtggttagcacagtactgatggacatgtaaaaattacctaaatatttgtttagtaaatgaattgtggcaaaattacttaagtattcccgagcatgatgtccaggggtgtgattttaacataccatattgatgtgaaaagtctaaaagatgggccggaatccccacatcatttctcgtttgcccattttaaaccctaactcatttggtgagaatgcgataaaggtaggtgtagttatgctagtaggaagtgctgaatccaagtgaaagtagtgtatattggcattatgatttgtgtatatcagtattatgattatgattgcttatttctgcgtaataatactattttgcattatcatgccaaccttgaattgagagttttaaaacaactttcagtgactgctatttctggcttttctcctgacaggttaaaagattaagagtttctctaaccacggctaccctctaaaagtcacattttccccctttttccagtcactctctgaaagagaacaaagtaattttctgaagggaagctgcagaatatggaaaacatatattggagctacatggatgtaagttcaaacctcacttcaacctttagctgcaaagttcttgccctttaattgaatcataaaattgagtataataatacctaccttaagggatttttatgaagattaaatgaaacaatttgtgtttattgcctgggac

SEQ ID NO: 9922 - DNA, 2300 bp, Homo sapien
actaagacttagatcaaggttaaattaaggtcctaagtctgccacctattagcttaactgaaaatgatcccaatatcacagccttttgtcaggagtaaagagcagagataagaggataactaaaatttgatatctcataaatatgaaattcttaagatattaaaacgaatcaagataaaatccttataataaaattactgtccattttacagcatgaagataatgaggtgcaatgatttaaattaactctcctcaaagccatactgcaagttgagtggtgaaactgtgacataactcaggtctaaatcttactgttcctttcactatgccatactgaaacactctatgaattatatactactgttatggtaacagtggaaagtgaaaatatgttttattataatgaagaggcacattatgcttcccaaaaaataaggaattttaaattatgttacatattcacatatttaagttattgtagatgccacttgatatggtcgacaagtgtgaaaatgtccacatacatccttcagtattttaaatgtataacctttggtattttacaagtttgaatattagcagttagttaagcctcaagtggacttatctactttttgcaggcctacattatctttcaaacagaagggaagggctgcacgtctaacagaaacgctgccggcttctatcaagccaccactaaagcacaagaccacgtggtctctcataagcccaaggttccctactcctctccctcctttgacaaggaactggaaactagggtttctttctcttatgtggagccctgacatgccacctgtgtagtacagaccgcaaacatcctgcagcctgcctcccggaagaccaagaatcagaataaaagggaacttggacgccgacaattctaggaaaggaaatgaacagagaagtaaagccggtgagatcgtgataagccgcggcaccgggacctgtcaaaacggcgtatataagactcaaaccaaaccactataacctatcattcgggaaggcctgaggtgggagcggcactacggaaggaaggaggacgaagagaaccgcacgagtcagaaccgccgccgccgccgctccccggatacctttcagcatgccctggcaagccaagaaccctgaccctcatctagagtccaacctttgccccaacatttcagaagcggccaaaatcccgctgccccggcggccgccgccggacctgcccgcacctgtcactagcgaaagaaccagctcgcggctcccgcccacttctccactatcctcgggcaaccgcgggcatctcaacccctttctcttaccaggtgtcccctttccggagcgaggttttgagcagcgtcgcgatgtcagaccgctgggtgtccagatccgccgctccgccttccgccatcttcttccactagcggtaggggaggtggcagcgacggcggcggcacgccccagagcattatgggaatggcgtcccacggcccctcccagtcggccggtcgaaaccaaaagacaccgggagcgggggtgctcctcgggacaagaggaggccccgggggcgcactgggtgcgcggccatggtctgctgccccccatcggtccccgcccgtccagcatcttgccttggcctcctctggcccgggactgccgggttttagctttcctcgccgccgagggctctggctctctctcgctagagggatgccaccgccctgtcctcccgtcctcagcgttgccttcccctccctctttcccactgacgccttgaaaacccttatttgcgcattcactcacgcttgagggtgaggtagggtggggcggtggtgtgggggcgtggggacggctaagatatggcagaaaatgtagcagctcagtgactgggcttttcgttacgagtgggagaacccaagctcggtgaatatgggcacacacaaaaaacactccgaaaccgaacgcttggtctccatgcccttcctgggttccttccagcgctcttactcccgttgtaggtggggaccctttataggctctttgtgacgcctccccaggcacacccagacgactaagctgcagtgaaaaacatgtcccagttcatcggtgaacagggagtagaatatggacagtattgaataatgccagatactaaaggaagaaaacgtgcgagaaaccctcttgtttatacaggatagtaacattttcttagccccatcttcgtatggtgccgtacacctgaaatgaaactagatatgtctttaatttgaagtcaacgattatgttacaaaatagaa

SEQ ID NO: 9923 - DNA, 2300 bp, Homo sapien
ttctttttttgagatggagtctcacgttgcccaggctagagtgcagtggccggatctcggctcactgcaacctccgcttcctaggctcaggcaatcctcccacctcagcctcctgagtagctgggaccacaggcgtgccaccatgcccagctaatttttttgtatttttgtagagacggggtttcaccatggtgcccaggctggtctggaactcctgagttcaagtgatcctccctcctcggcctcccaaagtgctgggttacaggcgtgaaccaccctgccaggccaacaataactattattaagtcacttgaagattctatttttttgatataatgaaacaagtatgtatttacatccttagggatttctatcatacaaacatagtatatagcctaccaaaaaagaaaaaagagactaagacttagatcaaggttaaattaaggtcctaagtctgccacctattagcttaactgaaaatgatcccaatatcacagccttttgtcaggagtaaagagcagagataagaggataactaaaatttgatatctcataaatatgaaattcttaagatattaaaacgaatcaagataaaatccttataataaaattactgtccattttacagcatgaagataatgaggtgcaatgatttaaattaactctcctcaaagccatactgcaagttgagtggtgaaactgtgacataactcaggtctaaatcttactgttcctttcactatgccatactgaaacactctatgaattatatactactgttatggtaacagtggaaagtgaaaatatgttttattataatgaagaggcacattatgcttcccaaaaaataaggaattttaaattatgttacatattcacatatttaagttattgtagatgccacttgatatggtcgacaagtgtgaaaatgtccacatacatccttcagtattttaaatgtataacctttggtattttacaagtttgaatattagcagttagttaagcctcaagtggacttatctactttttgcaggcctacattatctttcaaacagaagggaagggctgcacgtctaacagaaacgctgccggcttctatcaagccaccactaaagcacaagaccacgtggtctctcataagcccaaggttccctactcctctccctcctttgacaaggaactggaaactagggtttctttctcttatgtggagccctgacatgccacctgtgtagtacagaccgcaaacatcctgcagcctgcctcccggaagaccaagaatcagaataaaagggaacttggacgccgacaattctaggaaaggaaatgaacagagaagtaaagccggtgagatcgtgataagccgcggcaccgggacctgtcaaaacggcgtatataagactcaaaccaaaccactataacctatcattcgggaaggcctgaggtgggagcggcactacggaaggaaggaggacgaagagaaccgcacgagtcagaaccgccgccgccgccgctccccggatacctttcagcatgccctggcaagccaagaaccctgaccctcatctagagtccaacctttgccccaacatttcagaagcggccaaaatcccgctgccccggcggccgccgccggacctgcccgcacctgtcactagcgaaagaaccagctcgcggctcccgcccacttctccactatcctcgggcaaccgcgggcatctcaacccctttctcttaccaggtgtcccctttccggagcgaggttttgagcagcgtcgcgatgtcagaccgctgggtgtccagatccgccgctccgccttccgccatcttcttccactagcggtaggggaggtggcagcgacggcggcggcacgccccagagcattatgggaatggcgtcccacggcccctcccagtcggccggtcgaaaccaaaagacaccgggagcgggggtgctcctcgggacaagaggaggccccgggggcgcactgggtgcgcggccatggtctgctgccccccatcggtccccgcccgtccagcatcttgccttggcctcctctggcccgggactgccgggttttagctttcctcgccgccgagggctctggctctctctcgctagagggatgccaccgccctgtcctcccgtcctcagcgttgccttcccctccctctttcccactgacgccttgaaaacccttatttgcgcattcactcacgcttgagggtgaggtagggtggggcggtggtgtgggggcgtggggacggctaagatatggcagaaaatgtagcagctc

SEQ ID NO: 9924 - DNA, 2300 bp, Homo sapien
gacctcaggtgagccacccgcctcggcctcccaaattgttgggattatgggtgtgagccaccgcacccaggtgctacaccttacttttaaaatttggcttttcaaatcattagaagtattgttttcaatcaatgaattccaattgcatgtcctcaactctgaacagagatgtaaaagattctaacgattttgagttaatcatgccaaagttaccaatagtaaaaaatccaaaagaaaagttggctacatagtgaaagtcagagaatttgatcctatatcactagcccaattactaaagcatcatttttggccaggtgtggtggctcatgcctgtaatcccagcacttcgggaggtcgaggtgggtggatcacttgtactctggagttccagatcagcctggccaacatgctgaaaccccatctctactaaaaagaacaacaaacaaacaaacaaaaaggcctgcggtgtggctcacgcctttgtaatcctagcactttgggaggccaaggcaggtggattgcctgagctcagtagttggagaccagcctgggcaacacagtgaaaccccatctctactaaaatacaaaaaattagccgggcgtggcagcctacgcctgtagtcccagctactcgggaggctgagacaggagaattgcttgaccctgggaggtggaggttgcagtgagtggagatcgcgccactgcactccagcctgagtgacagagtgagactccgtctccaccccccacccaaaaaaagcgcctcgtttttacaagctccctgagacctcaagaataatgtctgccatatattccatttgaacttttttgctaaattcaccagttttcatacataaagcttataccataggaggtgtcaagtttcccagaagttgtgtaataggcacaaatgatcaaaattactgccctaggagctctctactattacctcatctgtcccctttatccatccttgctttgcttcttatcagaaggaaaaataaaataaaattatttagcttacaaagtagctctgttacagccaaacagcgctatccactgacaatctcatggctcactgtcttccatcatgtcataagctcagctgtctgaaggtgttggtttcttcatctctactgtttctggtttttcctccctcattttctgctttctgaccagcagctgcaaaatgtcttggggaaaaagtagaccaacctggatcttggggaaatacagatgaagatttttctgtttggcttttgcctcatatttatttggcacttcagacctgatgaaggcttttatgtatctgtgccttatttgagcctcgaaactctgattttataatagaagggtattcattcaacaagtatgtactgattacctgctatatgccagacactgttctaggtgctggagatacacaggaaacaaaataagatttaaaaagaggaagaaccggcagcccaactcgcgaaactctccttttagctgggagcatctgccagtaaaggggccgggacagatctcgtagcgcctggtaggtgattggaggaattttggcttttactttgagtgagatgggaggccagcggaatgcgtggagcagagggtagtctcattttagagattaggaaaataagaggctaccccacagtaagtgcaccagttgcgtttaaagaaaaaaaatgtatattaacaggaggtagccactgatttggggccactagtccagagattcgaaatgaagcgggaggagacacgttaagattaatctacagggaaacaaattatttacaccgaaatacaatttaacacaaacatacgcaaagagatatgccaaggagtactcgggggctctgttcaggcacttgttaatgaaaacgaagcgaatcttgacgccttaaaccctgtctagcctacttgattccgggggtggggctgtgggaatcgctgcccacccggaatcccgcctgccccgagcatggccaagccccagccccgccccgccgacggcctgccgccggggttggccgcggcggtggcggaggccacggtacccggaagtgcggctgacgtgtcccggcagcgctcggaattgtgggcgactcggctaatggcgtcggcgagtcttaggggcctggggagctggcgctgaagcttcttgccaggttggctggtgacacccggtgtggctgggccccgcggcagcggagggacctgcccgccttgtgggtttctcggccagagtcggcggagcctagcgggacggtgcgactgcggggggcgcctccgagaaa

SEQ ID NO: 9925 - DNA, 2300 bp, Homo sapien
gggagatgtaaagcaaagacttattctgaaatataaataatattcccttggaaaataaatctaagaaaactaaagttgactagaaatctatgccgagtatcattaattaaactacttgatccaaattaaaagttatcattcttacaacaaatctttatatattctgaatatacagagacatatgagatttcaatatccaatctcatttgagactcctcaattgtttggtatttttgacatacattagagcacaaaagtagtatagtctcctatagtctcaagtaccataaagaagtaaatacttctcatgaaattttaaaaagttaactaaaaatttttctcagtattaactgtactcttaattatatagtttagaaactatatactgactaatttaaactctgttttgaagagcctctgattttcaagatgatagtggtctataaatctacaacttttaggtataattgctttaaatacttcagaaaaaatactaggataaagtttaagtgcaaatatacctcctcaagtatatgggctctggatactacgaagattaaaacatgactattaattgtatttgcaccagatctgttctaacttgatttgaataatgcaaattgaattaaaatgaaattaacagcctgcctatatatttaaatcataccgactaagtcaaaatttttcttactcatcttaagagtaatttattagacattttacttgggatagaatgctggaataacagtgatcctctgaggaaatcagtctttttttaaaaaaagtcttccacaaactataaaaccaataaaaatttgtattattggagaataattaaggacttaccacggtatcaacaatgatattagcaacagtaaatattttaaatatttacagtgatattctaatacgattggcctatggtaagtctccaacataaaaatatccaggtcatcatttttctttaaacaccaatttccccacagtagctaatctgcctaatgtacatctcccattaaaacccacatgctggccgggcgcagtggctcacgcctgtaatcccaacacttggagaggccgaggcgggagaaccccgaggtcaggagttcgagaccagcctagccaacatgatgaaaccctgtctctactaaaaatacaaaaattagccagatgtggtgttgggcacctgaaatctcagctactcgggtggctgaggcaggagaatcgcttgaacccaggaggcagaggttgcagtaagccgagaccacaccattgcactccagctgggataacaagagcaaaagtccatctcaggaaaaacaaacagacaaacaaaaaaaacccacttgccagccttcctaaccctaccatgtgcacctctgcctttacccaccactttcactataccacttctcaatatgcacacagagcattatttacttctgtgcataatgttataaaactattgggtgttttgataagactgttcaaaatcagggaaaaagctgtgggaaacagatgtaattgaggagcgcttatgctaagggcaaatttccagcaaagctggatagcctaagtgaaatccactcttgcccccgatccttaatctgaccccaaaaatcttaatttcatttcataacactctgaaatcccaccagttacagatttactggtatcccttttaaaaaatgtaaagtatatgaaagttaaagagattatttactatttggactctgtaaattaatttaataggactactttcctcatagattagctgagatcaacagcactactggaactggaaatgcagattaaaggatcactgaagcaagcactggttacatatgtaatacttgggagtaagtggctaacgtggaaacctggtgataccatggtagcacactgtagcaggaagaacatgggctcctgaacactcctggattttaatctggttctatcacctttcctgtgaccttgggcaagtaacttaacctcttcacatctcaattagctctactatcaaataagataatatttccccacaaggttgttatgtaagatagaatgacacaagtgccttgcatataacagattcttaaaaaaaaaaaaaaaaaaaagccagtttacctcttttccatgttcattattgaggcaagaacaaaaggcaccaaggaagagaaaggagtggactgggtagaaaagaaggatgccaaagagaaactcctgaaaattcctccttgaaaatcaggttcaatcaagagaaggtaagaaaacatttttgttttcttttctctacttca

SEQ ID NO: 9926 - DNA, 2300 bp, Homo sapien
aaatttacgtacagtgaaatgcacaaattttcactgtacatttgctaagttttgacaaaatgagcatcatttttagtaccttcatgatatttctcttaaaagctgagaacgaatagatttatatatatatatatatatatatatatatatatatttttttttttttttttttttttttttttgagatggagtctcgttcttgttgcccaggctggagtgcaatggcacgatcttggctcaccccaacctctgcctcccaggttcaagcgattctcctgcctcagcctcctgagtagcagggattacagacaggcatgcgccaccatgcccggctaattttgtatttttagtagaaacgggatttcttcatgttggtcaggctagtctcaaactcctgacttcaggtgatctgcctgcctcagcctcccaaagtgctgggattacaggcgtgagccatcacgcccagcctagatttagattttttttaaatgaagacataagacagttaatgtctttgataattttttataactttaagaaatgatatttgttattttagaataagttttatatttttaacataaccacgtgcaatatataattatatctactcttttaaagggaccccttctctgacataaaatatgttaatagagaaattgcaggagtttttctccctaaatggcacgggatattctaaatctgatattaggtcaccattctgattggcaaatatagtgattcatgagacttttaaactttgatggcaacaggtagaagtgttttaattgtttgacattttaaaatgtaatttgtcaaaactcttttaaacagtttacttaaaattctgtgtttttattgtatgtaaattatacctcaatttttttttttttttttgagatggagttttggagtttcactcttgttgcccaggctggagtgcagtggtgtgatctcggctcactgaaacctctgcctcctaggttcaagcgattctcttgcctcggcctctgagtagctgggattacaggtgcccaccaccatgcccagctaattttttgtatttttagtcgagacagggtttcatcatgttggccaggctggtcccgaactcctgacctctggtgatccacccgccttggccttccaaagtgcagggattacagatgtgaggcactgggcccagccctcaatttttaataaaaagaatatggaggggaaagatgcatataactaggcaggtgttacagtttgtccagagtaggcagatagtacctattgttttataccagacctacttcaagcttttctattaaccgactgctttcccaggaatttggggtttatcccttttttaaaaaaatctggtcatttatcagctttccaaaatgaaagtccttaaaccttgattatttattttacatgtttcatagcctacttatgttgtactgctttggaaaatatcaactttcctaattttttacatcattttaatgtaggtatgtggataataatccatgttattaacaaagccagtaggcttgtttgctgtagggaaaagatctggctggacatggtggctcatggctgtaatcccagccctttggaagactgaggcaggaggattgcttgagcccagcatgggcaacatggtgaaaccctatctctacaaaaaatacaaaaattagccaagtgtggtggtgtgcatctgtagtcccagctactcaggaagctgaggtaggaggatcgcttgagcccaggagttcaagaccagactggacaacatagcaagatcccatcactacaaaaaataatttaaaaataaattagccaggcatggtggcatgtgcctgtgatcccagccacacttgggaggctgaggtgggagaatcacttgagctcagtgagccatgatcataccacatgacactctagcctgggtaacagagtgtgataccatctcttaaaaaaaaaaaaagaaaaaaattctgcagctctaaaataatttaaatatgaaaactaaagtataaagttaagatttatgaatgtgacatagtttatcttaaatatttaggccaataaaaaaacatgtattatactgtcctaagttacgacttttccaatgattctctggttaagaacgagaacttcttacttaatcattaataaaggtgggtagactgaagatgttactgaaatgcttttgtttcaacctcgttgatttaattttctgttatcctttggcagaagttctgggaaatggtataaatatgtataagtacatacatattttggggttt

SEQ ID NO: 9927 - DNA, 2300 bp, Homo sapien
acgtgcaatatataattatatctactcttttaaagggaccccttctctgacataaaatatgttaatagagaaattgcaggagtttttctccctaaatggcacgggatattctaaatctgatattaggtcaccattctgattggcaaatatagtgattcatgagacttttaaactttgatggcaacaggtagaagtgttttaattgtttgacattttaaaatgtaatttgtcaaaactcttttaaacagtttacttaaaattctgtgtttttattgtatgtaaattatacctcaatttttttttttttttttgagatggagttttggagtttcactcttgttgcccaggctggagtgcagtggtgtgatctcggctcactgaaacctctgcctcctaggttcaagcgattctcttgcctcggcctctgagtagctgggattacaggtgcccaccaccatgcccagctaattttttgtatttttagtcgagacagggtttcatcatgttggccaggctggtcccgaactcctgacctctggtgatccacccgccttggccttccaaagtgcagggattacagatgtgaggcactgggcccagccctcaatttttaataaaaagaatatggaggggaaagatgcatataactaggcaggtgttacagtttgtccagagtaggcagatagtacctattgttttataccagacctacttcaagcttttctattaaccgactgctttcccaggaatttggggtttatcccttttttaaaaaaatctggtcatttatcagctttccaaaatgaaagtccttaaaccttgattatttattttacatgtttcatagcctacttatgttgtactgctttggaaaatatcaactttcctaattttttacatcattttaatgtaggtatgtggataataatccatgttattaacaaagccagtaggcttgtttgctgtagggaaaagatctggctggacatggtggctcatggctgtaatcccagccctttggaagactgaggcaggaggattgcttgagcccagcatgggcaacatggtgaaaccctatctctacaaaaaatacaaaaattagccaagtgtggtggtgtgcatctgtagtcccagctactcaggaagctgaggtaggaggatcgcttgagcccaggagttcaagaccagactggacaacatagcaagatcccatcactacaaaaaataatttaaaaataaattagccaggcatggtggcatgtgcctgtgatcccagccacacttgggaggctgaggtgggagaatcacttgagctcagtgagccatgatcataccacatgacactctagcctgggtaacagagtgtgataccatctcttaaaaaaaaaaaaagaaaaaaattctgcagctctaaaataatttaaatatgaaaactaaagtataaagttaagatttatgaatgtgacatagtttatcttaaatatttaggccaataaaaaaacatgtattatactgtcctaagttacgacttttccaatgattctctggttaagaacgagaacttcttacttaatcattaataaaggtgggtagactgaagatgttactgaaatgcttttgtttcaacctcgttgatttaattttctgttatcctttggcagaagttctgggaaatggtataaatatgtataagtacatacatattttggggtttttaattttttttatttcagtagcttttggggtacaagtggttattggttacatggatgaattgtatagtggtgaagtctgagattttagtgcactcgtcacctacctgagttttgtttttaagattgaaacattatttgatatatccatcatcctcctcttggtgccctttgttcctatatctgaaaaatttttttactgaatttctaggttgtgataattttaattcccattgttagtaccttagtacctagtcatatattttccagttctgtaggattttaagcagaaaaattaagcaaatatgctttcaagtgtctaatatgaagagaaaatttgatcgcttttatgataatagtttttttttctcttcctaatataggagatttttcaagagcttgggatgttcttcttgaccatatacagtcagcagcactcagcaaaaacaatgaagtatctctggctgctctgaaaagcttccaggaaattttacagattgtgtcccctgtcagagactcagataagcctgagacaccacctgtagttaatgtacctgtgcctgttcttatagggcccatatcaggcat

SEQ ID NO: 9928 - DNA, 2300 bp, Homo sapien
tacatccaataactcaaaaatgttactactatttgggcaatatgtagttgtggataaaatttactttaaaaacacaagatataaagtatgaatagtttatctgtataggacattgagcatttctggtgtgcttatccgcttaaagtttaaattaccagcagaatttgttatactttggggtgcagattaacaaccgttgattctccataaaaatgttagagtgtagtgggttggaagattacctcggttggttgaatgaagtgttttggaaaataaaatcataatgaaattagcatgttatgattagtttctccataaaccaagatttgacacagcaccgcagaggttttcattatttaagaaaacaagcacttaacaaagccctgaatttactctgcgttgctatcaagaaaagcaaacttcaagagccaacattcaagcattttctgcatcttaagattcaagataaggttcttcaccgcccttcccacaatgaggcggctccatcctgatgagatcagattaagtaaggttattctcaaggctaaaccaaacccaatcaaggcacatatattagatcacttttgaatgataaaagcatcaaactcctgctgaagggtttggttggtttaaagaactgccttatttgtttttcaactgagcatcagaaaaccatagaaaactgcgattacattatattcaaaactacttattctgtacaaatacagatcagttttcaacgaaaagtactaaaactgaccacttacttccctcagtgaaaataaaataaaaatacaagtatcttgttttccacgcagacttcagggtattagagcactgagtattttcattagttatccaaactaccttttttctctatgcaaaggtattttcctattaggagtagtggccactcaggaatcaaaatgagtgttagtagattttaaactcaaatctagaaaccactttcaattcctagtcctcttctcccatacaaaacctcaaagatgtaagtaccacataacattagaatcaaaggccataaaaaccaaaaaaccaacccaccacaccagcagaatctgagccccaaggttaaactaaaaagaaaaaacaaaaaacaaaaccattcacagcacactgtacatagaatttatttgtttgcctcatacattaaaaaatcggaatagtgcaattacctacaaataatttcaatcttctcattcgcgagttgcaaagtttaaagagaaactttaaattgctttgggtttacgtttttaaagacacactcagatttactaagagagcatatcagaaaccagatctaaaatgttaaggcataaactttaattatcaggtctacttcttctgcccctctaatgccagttctgcagatcgctcacaccactccaacctacagctaaagaatgaagtaaaacaggtacacactaaatttggcatttaactgctgaaagaagtgttagaattttttagggtgaaaaagttatctgtatcaattatcttacacaattccactccttccttcaagaaaaggaatccaatggcttagctctttcccaacctttaaaatgcatcgcggtccaccccactcccctcaattccttctaggaaaatgtgaaactaacggtttccgtggtggccgcgccggccgggcgccgaggcttcgcgggctgtccccaggcagcgccccggaaaacaaaggggattcccagccattgtcctccgcggcgctgagcatcaccagcactagcaaggcagtagcttgcgcagttatctccacagcgggcaatgtcacaacccgaccaacagcacaaactactacctcagccagggccatggtgtcggggaggcacgggaccacgcggagggcagcaaagcggctccggcgctcctccgtccttcctcgccgccgacgtcggcccgccgccccttcttttcctttgccttccccccgcgccgcgcccggagaccccgcccagcacccagcggctcggctactcccggcgcgccccgagagctacggggatgagaggcggcgccggcgcccgggtgatacagccggcgttctgtacgtcagccaccgctctgaagagagaaaagcggcggtgtcctgcggagagagccgctccctccactgcccgaggggagcgcgtcgcctcagccgctcgaaagcaggaaatgggcggcaaaagcgcagtcagacaccaactggttctggactgcccccgagaggcagcgagcagcgctcccgcgcttcgcccgctaggagctgccgccacgtc

SEQ ID NO: 9929 - DNA, 2300 bp, Homo sapien
gcaactaaaatggtcgggcgcaggtggctcacgcctctaatccctgcactttgggaggctgaggcgggcggatcacgaggtcagcagttcgagaccagtctggccaacatggtgaaaccccatctctactaaaaatacaaaaaattagctgggcgtggtggtggatgcctataatcccagctattcgggaggctgaggcaggagaattgtttgaaccgagaggcagaggttgcagtaagccgagatcacgccactgcactccagcctgggtgataagagcgaaactccatttcaaaaaaaatcaactaaaaaaatgtttatttactggaatatctgagagacaattataaaggtagttgttctacaacaaaagttttcttaaaaagacgattctaagcttatattagactcaatggataccagagaatgtggtatgttcgatgtttcaccaccacccatataatcagagatttcccattcaggagtttgcggtttaaccaagcaaaggataagaagacatatcttgcatcatttaaaacactgcacaaaataagaagaaaaggagctaagataaaattacatttatattttgtaaaaagtgatttaaaaacttcattgataggagtggcatttcactgaaagtttaaaatactgccatcttttacataattatttggtacctagtaaattagaatatctatacatgaaaaagttaaagggggaaatgtcttttaaaaagaatattatagatactgaagaaaagacatctgtgaggcttatccaggcctcacctaacagcaagaactccttgactcacaattcctcttcaaagaattggcttctccttcaacacctgggccactctccttcccaaacactgactgagaagaacgagggcctgtattctccgttgaattcagagcaagctgtttggtgcataactgcgtaagtaacaccgaattctggcaaattaaataggtaaacatgaacaggatacacgttctattgcaaagtttcccctccccctaaaaagccaatatttaagaaatgttagccttgatgaagtattcagtttttaagatgtgttttctaacatatgatcaccaaaaatgttttatcattataagtatttattcatttttactttagcatttgagttgctatgttctacttaagcttctttcgttttataagtgcccttagataattttgcaacaatgttctgaattaaaaaaaattcaaatacgactgcatttaagtgtctagatagtaaacaaggtaagctttgaaaagatacttttgttcctaagttggaggaaaatgcatttatttgtctagatagtaaacgaggtaagctttgaaaagatacttttgttgctacgttggaggataatgcttgtataaatttatttaacaattaaatactaatggtccctgtttctttttcttttaggctagtcaagtgaagcagcgggagtggagaaagaacaaagaaatctgtaactggttgtgatcaattaattgtaaataccactgccctcagaccagcctctgatttcttaagagatcttttttcttgtgtattaagcttattctgggttcgaaataaggtttgctccatagataatgatgcatatagtggtaataaaaagaaaagtaaatcgacaaatacctagggaaaaacttttaataattctcatgcaatccgtataggcttgtttatttttaagccctggaaagtctcttacacccagtgactgctggtttccaccgcaggacttagaagcttcccaccctgattgcacctgtctcccctttcccctcctgctcccaaagtttcctttctggagggtgaaggcagcattcctcaggagtggattcttcaatccttttcccggctgcccggctccacgtgacagccgctaacacctgtaccgcctccagctcacagcgcccccatcccctccgccaggtaccgactcagccggtctccccctcccccaggaggtcacgatcccggtgcgagtctcgcttgggccggcaggggaggggctgagcaacggccaccgcagcagcctgagcccttgcagcctgattatcacatgacccggcggcagtagccgtggcagcagccgcggcggctccgcgagctcgccgggtgggctcagttcagcgcacgccggagccgagcgcagggggcggggaagggacctgctgcagctgcagccgcctgggcgctcctggagcgcgcggtgactcccccggtcggcccgctccatgcagctccgttgcggaagtgt

SEQ ID NO: 9930 - DNA, 2300 bp, Homo sapien
tcccaaagtgctgggattataggtgtgaaccactgcacctggcccaaactgatgtttaaaaaaatcagtgaaacttttttcttaaatacataagcatcattgtaaatgattatttaaccaataaatggtggctagcttggttaaaggaaggatgggggatctagagatctacccactcagcccctccttatctgagctttttctgaagactcaaaatgctatgcttgtcacagtctgaaaagcactcatctaagttaagcccttcattttgcagatgaggaaactgcagcccagagggatggaaaaacttactcaagatgacctacagagcaggaggttttattcaggacctattctgaaatttttgatttgttgttgttcatacaatcctgctactttggatggcagctaaataggactgggggaggccttgaggtgcccacgcaagatttaaggaagcactccctttcaggtctggacaagtgccaactctatacttgcaaggactagagagggagtgcttccttgaattttgcaactaatcccagtcctgcctctattcatatctaaaatactatcatctccaaacatgctgatcttctacttcatgttgcctcttgccctcttatctttgtctttccattagattgttaactttggaggtcaagggcaatgtctttcatccttattttcctagggtttggtatagcatatggaaaataacgggtcttcagtaagtatctactgaaagaactgatgggtgagtgggtctaaattctgtttttgatgaaggctttcctgatccctcaaattcactctgatgtctccatcctctgaaatcctaacatattatccgtattctctgaataactcaattcatttaattatatatgttgacataacttttatgtttatgtaactcttgtgcagcaacttaattttccaattttctctttctttatgcacaattagattttagttagttaagagcaaatgccaatttgtgttctttgaattttctcagcagctagcagaagattttgcacactgaaggtacatagcaaatgtttcttcaatatatgatgaagaacaaacaagtaagtagatgaatggcattttctcagctgaaaatagaatctacggtaactgttttcaagtcctagcttgcctcctaactacctgagtgcagaaatgctttcccctcattggcttcagtttcttttctctttttttgagacgaagtctcactctgttgcccaagctggagtgcagtgatgagatctcggctcactgcaacctctgcgtcccatgttcaagcgattctcctgcctcagcctctcaagtagctgggactagaggcatgcaccaccatgcccagctaatttttctattcttagtagagatggggtttcactatgtaggccaggctggtctcggactcctgaccttgtgatccacctgccttggcctcttaaagtgctgggattacaggcatgatgagccactgtgcacatcctggcctcagtttccttatatgtaaaatgaagaggtggtttgagtgattctgaagatacttccagctctggcatcctgtgactctatgaatttagaaatctgtcatgcaagaggagttcaggtgtaaattttgttactataaatcacttgctcatctaacaggaattgtttacatgtagctgatggtctaatttttaaatgttcagagtcctaaaattatgaacagattatatgtcaaaaattaatttgtaatatacaaggtatattatggttgaactagtttttgtggtcttaggctggaaattaaacacctagtatatagaagcaataatatttcaagtatacatattcatttatagcattatttctatgggaaaatgcacccagaattctaactaggatcttcaagaacaactctccccaggtcagtgcatggagcagaaagagaagggaaagggatagaatgtcttcatgactttaatcctagtatttgaaaaaaaaaaatcaaaccttgcacctacaaatttctgtcttgatccagaaagtcattagcataaaaaagataatagtggccttctcacctaacgccaccaacatggtgttcaggcgcttcgtggaggttggccgggtggcctatgtctcctttggacctcatgccggaaaattggtcgcgattgtagatgttattgatcagaacagggctttggtcgatggaccttgcactcaagtgaggagacaggccatgcctttcaagtgcatgcagctcactgatttcatcctcaagt

SEQ ID NO: 9931 - DNA, 2300 bp, Homo sapien
gagccacaaaattactaggctgtggccaacaaaccacttttgcaatacccagacactaggttcagtcaacattctttctcatcaggagcactaatagtgtaatttgtgacttaaaagaaagtgaattctctgagtcagtgactattacctaattgcttgaaggattttttccagacaggtggtctggaaaccttttacctattaccttccatccctgaaccatttcaatcttctgcctcctggatatcttggagaaaatgaaccaacacaacacagctttcagtttttagagcatttcccccatacagaacattgtcttacttgatcttcccgatgacctcaacaacaggaaaggcaggtcctttcatttccatttataagacgcacagacccaggattatctagccacaggaagcaggactccagatttcaagtccagcatctcaacgtgacaaccttggtaactctgcatgaacggactggatagtaaagtggaattattactgagaactgcaatgaataaaatcttttgcattttttgcctacgtttcacagagggtgatatttttctgaggcaattaaatttataccacggccacaatactgaaacgttctgaccaacaaagtcatgctcctgcatctacacagcagataactgcagaaacggcttcctttcttccttgtaaaattgcctgaaaacagctcccccttgctgtccgtcgaggcatatcttcaccaacgttaaaacagagctgagggagatcgcatttctgcctccctcccgccctgcagaggggctccagctgttcagagtaacggattactaggtaggtggttgtttcccctccttcccagggcctctttcctctctttgagattgcctctttcttactcctgagcacaggagccgggcgggttttctgtcccttgccctggacagcactgcctggatggccgctgtccggcagctgctctttgtccacccaaaaagatgtccccacgactcagtagtaaccagacggtccccacggaccactgcggccaaatttccgccatccccgctgtgggaatcaggcttttcccgcagaaaaccccaggaatctagagaaaactccttaagtccctagtctccatagagaaaaccaggagacactccccccaaaccccgctgtgaatacaggcacagcagccactggggctgcaaagtgatgagtgcgttcttcccgtcgcaaacatagggtaataaatagcatgcatcaaagacgttactaggaagagatagctctttaagtcacgagcggggagaaatgtttgccccgggaaaatttgcctggggaataaaatttgccagactgctgcacgggtgagctcggtgagaaggaagaaacccggactggaggaggtgaggtcgagagccaggttcaggtgcaggagctagatgcgtggacgccggtgcgtggactggaggtttccaggtaccgcgcttagcgtgcctgttgaagtcaaatgcatggttaaggaggctagcgaggaaggctagtgagggaagcttgtggaaacggctacgagcccagaaaaggcatgactcgtccagttgtccaagtttttggaagggaaaagcgggaaagcgccacgatcccacctactgtgaggaggaatctgcgagtctcccagctccaccccctccacagtgatgcagaggacaaacaccgacgtagggagaggaaaaaataaaactccagggagcggggagtaggcaaccagcagtcttccggcaatagggcgggagggagcgcgtcccaaggaaacaagcaccgcataaatacttgagttgggaacccagtgcttccggaagctcggagctcaccttcccgacctcgccgaagttgaaaaaaggcagagcagggagaggggccagctcaccctgctgagagctgctcagtgggcaggcgggacgctgctccgggagacgcccactggagggatcgcagagcccggcaagctgcgagcgcgccaaagaccctgcgcttcggacgaggagcccaagtcctccgagacggggagggagcggcccgcgagggctggagctccgaagagggccgagtaggagctgcatggacagcatgcgtctctccgccggtcccgacgcggggccctcgggcaactccagcccatggtggcctctggccaccggcgctggcaacacaagccgggaggccgaagccctcggggagggcaacggcccaccgagggacgtgcgcaacgaggagctggccaaactggagatcgccgtgctggcg

SEQ ID NO: 9932 - DNA, 2300 bp, Homo sapien
tgtgttcttttgagtctttagtctttcactgaatagataacttacatgtgaagagggtagaggaatagtcacttatgccttagtctggctcagtgaatctgcatttttacttaaacaatagggcagaagaagcaatcaaatatgcaaagaaacacaaaaagtggctcaacattcaaagacaggtttattttggagaataaacctgagaggggcttctggccaatttcagtcaggagcattctctgttacagactaagagtattaattggtttaagggtgagagaacttatcaccggcgtggaatgtttctgtataacggagaagtcagttgcagggttggaatgtatctggttggaggggaggttatcttggggctgatatgtctctggtcagggaggggtttggaatgtttctggtaagagatgttatttgtggctcatggtcattctggccttagccattaggctgatgccctttggatttaggtggtttttgatcaaggtgaactttaaaatggcaggatggtgatgctcctgctctgtcaccttgtcttgtgacatgttcatcaccattccatggggaaagtaaaaaaatggggagtttccatggtaaaataaccttggaaaacattgatgaacaaggttaagtaagtttcttttctgaagtttctcaggtcctttttatgtataaatcaccaggagagggtgggatgcatacacagcacttctccaacatatttaaccataaaactcttctcattgcacatatgtaaattgggaatattttgctttaattggaagggaaaatgttaatggtaaaatagctggtaatttggaggatttacatgtatgaaaaaaagaaaatgttttgaacaccgataaaatgccagaaatttaaacaaccatttatataatctttgcagcaactgcattgtgtttaatcaccaagattttacagtgaagaatttgaaactcgaagatgaaaacaaagtcttactgctagtaagtgaaggagatagctgcttccatgaactgaagtacttctcaaatatctggaattatgaagtgaaaggaaagaagattggtaaatgaaagagaatgattattccaggatatgtatgcacaacttccttatttttttcattatttcacccctaaaatttgttaactgaagtctacaaagagtaagagggaaaaggtaagtcttaataatacaaaaagtacagagaaaatgtaaattgctctaagaaaaagcacaaggtgccacataaaatattgtctgttgtgttttctttttcatattttaagaccacaattattttactctctatggggtaatttaatagcaggtccagtgaggcatatgagtagtgcctcatatgtaatagtcctgctttcctttgtatataaaaccagttaaattaagtcaaaaacatgtttaaaactatatggattaaacaaagggactggttctacaatctgcaatgaacatttttttttcctgctttccaggccccatggcatccagcacaaccagcgagagacagatagatggatgatagatagatagatagatagatagatagatagatagacagatagatagatgattgattgacacatgatacatagaatggccagatgcatacatataaacatacatctatgtatcaagcatatatacatttgatatatatggataattggtactgttgtcactgaacaataatatcttccaactgtatccaccaacataacttgagaggttatttttataatttggataattggatatagttttataattggatcagattgtctgacacagatgatttcctgagaggccaccaccctatctcctggaataagaacctccacagagatattggtgagcctgtattgcagatttcctctcctgaaaaaaacctaaaagctcaagtgtgtagggccaagagccacaaaattactaggctgtggccaacaaaccacttttgcaatacccagacactaggttcagtcaacattctttctcatcaggagcactaatagtgtaatttgtgacttaaaagaaagtgaattctctgagtcagtgactattacctaattgcttgaaggattttttccagacaggtggtctggaaaccttttacctattaccttccatccctgaaccatttcaatcttctgcctcctggatatcttggagaaaatgaaccaacacaacacagctttcagtttttagagcatttcccccatacagaacattgtcttacttgatcttcccgatgacctcaacaacag

SEQ ID NO: 9933 - DNA, 2300 bp, Homo sapien
ggaggcctcgttgagctgtggtgggctccaccctgttcgagcttcctggctgctttgtttacctactcaagccttggccatggtgggtgcccctcccccatcctcgctgccgccttgcagttggatctcagactgctgtgctagcaatgagggaggctccgtgggcataggaccctccgagccaggtgtgtgatataatctcctggtgtgccgtttgctaagactgttggaaaagcgcactgttagggtaggagtgacccgattttccaggtgccttctttcacccctttctttgattaggaaagggaattccctgaccccttgcgcttcctgggtgaggcaatgccttgccctgctttggctcatgctcggtgcgctgcacccactgtcctgcacccactttctgacaatccccagtgagataaacacagtacctcagttggaaatgcagaaatcacccgtcctctgtgtcgctcatgctgggagctgtagactggagctgttcctattcggccatcttggctccacccctcaccaactcatcttactttgatttatccacatttccccagttcctccattgacaattggtccttgctactcacacattctttctttcaatttcttcctctttgaagttcatcctttgtattttctgagtgaaactttattaaatggtaaatcatttcccatgagctttcctctgctgttttcttcctttcttcattaattcaaccagtatttattaatcttccaagtgtgaagctggggatatagtaatgaacaagacagataaagaacctgtccctgtcctcatggtgcttagaatgtgttaggctagggaagtggtgtatggagggaagataaatggaagcatagaaacgctacacagatgtgggattgagcatctgcattctcatacacagacatgatcacaaaaaggcaatttaagaaatggtttttggccgggtgcggtggctcacgcctgtaatcccagcactttgggaggctgaggtggccggatcacttgaagtcaggagtttgagaccagcctggccaacatggtgaagcaccgtctctactaaaaatacaaaaatcgccaggtgtggtggcatgtgcctgtaatcccagctactcgggaggctgaggcagaagaatcggcttgaaccagggaggcagaggttgcagtgagccgagatcgcgccactgcactccagcctgggtgacagagcaagactctgtctcaaaacaaaacaaaacaacaacaacaataacaacaacaaaagaaatggtttttatctttcatctgatttttgtattctgcattattgcttctctgggactcaagtaaagaatatttgcagtagtttagacagttctaagttaatgctacatgaaactgttagaatctcatcttcatctctcagtcccttaaatccaatttcaaaagataaaaatttgcttttattcagagtattcaaaggatgtgatctagactctaaagtgctagtctgtttcttaaaaatgattttatgtggctgggcacagtggctcacgcctgtaatctcagcactttgggaggccaaggcgggtggatcacgaggtcaggagttcgagactagcttagccaacatggtaaaaccctgtctctgctaaaagtaaaaaaattagccgggtgtggcagcacgcgcctgtaatccgagctacttgggagcctgaggcaggagaatcgttggaacccaggaggcggaggttgctgtaagctgagatttcgacactgcactccagcctgggcaacagagcaagatcccatctcaaaaaaaaaattatgttcacaccttatgtattttatttagaaagtattttagctataacaaattatacaattgagattaatttatacgtacactttttagaattatacattcaggatttaaacttcaaccacatgggtatggtttagtactatgatgttttaaatatagaaaactgtgattttaaattctgaggtaattttgtgaaaaactcactgtattttacatgaattttgattgtattctctgttttttttgttttttttttacagtgggactcaactgggaggtcttattacagtactgtgcttctttttcaaccatggagaggtttgttttctagaaagcaatttttaagaaatagaagaggctgtagaggaacaaggaaatatactcatcaaaacaatatttaattgtatactacttatgacttcacaatattttaaagacccttgtgtaataagttgatattttaagcatgttgat

SEQ ID NO: 9934 - DNA, 2300 bp, Homo sapien
ttaaatatccatgcaaaatgactttagtggctgtaatgcttcactatatgaatgtttcataacttagtgtttgatactgaggccacttctattttttaacgatataaataatagcacaatgaacattcttataaaaagattaattttttaaatgataaaaatgaccagatttgtactttcaagggctagaccatgggtaagagcattttgtatcccatcaggacaccaagtgatgcaaaaggcaattggaaactccagaaaaaccaaactgaccaaaaagaaaaacaatcactccacttcacttattgttccaaaacacattaaaacagtcatattttaaaataaggtgctttgagtttgcctagccattcaagaatatattcttcttaaccaccgtaaatactttgtattttaaatgcagtattggatagatagaatttattagctgttaaaacttgggcaaataactacatcctgatgcttgattttaaaatttgcatacagtcattgcatgattaagtgagaaaacattttgagcaccaaacacaatgccaggaatgcagaaatgctgcttgaaaaaaatctcccaaaacaaaaaatgagcagtagtagcacttactgaatttaactgagtgagaagataaatagtactgtcagttaagtgctctagaccttcagaaaaagcataattaatatgggctggagaaatgggctggggcttggaaggtgacagcattcagatgggcagggagaaaaggatgcaaaagccaagggatggcttttccacatgaataaaggaattcagcagttatgatgtctcaggttgtggactttacctgaaatgactgagatggaagattttgtgcccgaggaagtgggaaattaaagttgaaaaggtatattgggcaaatattgaaggcattggtgagcaagcctaggacttgatttgtgggccacgaacatttttgtgctgtgttgcatcaggaaaaattaacctggccacaatgagccaggctttagattggtcagttagggtatgggagttcaatgtgatccatcatcaaacagatgggaagtgaagcggtgtgggctccagcatgtggcccgtgacagaggacatggaaaatgtcagtggccccagtgcatctgtgccagccgctttggcctcttgtagggctgtgcggtgactgggagctaagcgctcccctcttagttggtcctggctggtgctgaaagcgcttgagcacaccgctcctagggctgatgacttctgaggaaccttattggaaaagcattttgctctaagattcagtaaacgctgtcccgtgccaaggaagtggcgtcaacctgaggctctgggatcagacccaccggactcacgccggctctgccacttgttgcccgcagtctcggcccgttccctctgcgttggcaacgggcactgactgtccgatacctcagcgatcgtaggggagtagagacgttcctaatgccgggcgcaccgccggcgggccggcggttccgttggcttccctgacacacttcctacagtcatttctttcagctgagatctttccctttaatacctcgttaattaacgtgtaatcttttggttaaaatgtcacagctaagactaaacccgaagaaaagaatgaaaccacgggaagttcttcagacagtcgccgcaaggttatgggccgaagtggtgcaggggcggcgcccggggaagcgactggcagagctgtgcgcactgggggtgctgcaggcgctggggagagtgtggagaggctgcgtggagctgcgcgctcggggtgggggctgcactcccaatgaagcgcgtgaagggcaagcggtgatgggttctgcgccagtggggctgggagcccgtccggggctgtacatggggctgcgcgcaaggtgaggactgcgcatgtgggcttggggcctgcgcgcaccggaggctgcaggcgctggggagggtgtggggggctgtgcgtggggctgccctcaccggaagctgcacgctctgggaagcgcagaggcgggggtgctgctcgcgctggggagcacgtgaggggacactcagggactgcccgcgcgaatggcttccaacgcatgcgccccaccccacatttcacagtcgccatgacgaccgggaggtccgcaacggctgcggggacaagtccgttgaggctgccaggcgagtcaggtctctctggacctcgcctgactcggctgggctgtgcctgaaattgacccagctccaccatactccttgattatgagaaaacaaggagtaa

SEQ ID NO: 9935 - DNA, 2300 bp, Homo sapien
aggcgttataatttgcttactatttcccaatgccaatatatttctgtagagttttattacttatttttgtgagcattgtactcacatgaaaaagaaaaatgtatcttcttaggactgattcttacaaatttgaaatagctatagtttataacttacatggccaagccctgctagaagtatcttgcaaagggtttgacacagaagcttggccaagctgtgaaaaatctctcaaagtagttaacacacttcttgagtattactggaaacttgataaactaagaagagaattttgaccaggtatcacaagaaatttgtactggggacttctaagaataagcgtgtactatttcacagtcaactagaagaaggcattaggacattagggctattttctcaatatcttgttgattaatagttcttccctttgcagacagagtagaaaatttcaccaagtaaagattttagccctgctttagtttaattcatctcatattcctttatttctattcttcctcccacatctttccttctcaggtctggttccctatatgcggagcttcaacccccagaggatatttaaccttgtctccccctccacactgctgcattccccaccacatctctttccctctctttccatccacctgaagagatgagagcatatacagaaagtagctcccagctgtagctcaaccattaaacaccaagagaaaggaaaatgaactctgccagacttagatcaattagaagattcctttgtaacctaaatacatttttaaaagcttatcatcaaattatgcagtcatttgcagtttgaggtaaaacaactccttcattttcatggccctctcccctattcaagatgacatcaactgcatattagttttaccttgtatgcatttctcaatagtaaaaccattagtcagtagcatctgaatgtacattgatacagtgggtgttttgtggtaattataaggtaattacttcctatccttaaataattgtcatttccacaaacaaacaaaataggataaacaacaatacagcatacataaaacaactgccatctccctaagacaccagaatagcctgttaatcaaggaaagctaaatttattaaatctactacagtaagggaggccacactttgacagaagcttggcagtctcagaaggagaaggttgggggtgatatttataggatttggggagtctgagcaaaaatggtttaaaacaggtcttttgaggcagggaactgtttgggggattgggtaaagtgtttgacctaatagtttagggtcggtgctagagtgaccaattttactgatttcctaggactttctcaattttagcactaaaaatcctccaactggagaatccttacagtcctgggcaaactgggaccattggtcaccctaattagcagacataccgtcgcaagactgctgggtaatttgaacagtagtaccagagcaactgacaaaacattgtagcccatcttcccaaggctggatacaaagttttctgaagcattcacatttacagcctctatttgacaaaatactgcatgcctatgtgcgttcaactcacataataatgaaacttaactttaaaaatgtttttattgcagtaaggtatataaaacatgaattcgacagtttaactatttctatgcatacaagtgagtggtattaattacattcacaatgttaagcgaccatcatcacttaatttttttaaaggacgtttatattcactcatctatcaacgtagtaggcactgtcctaggcgctagggattccatgcagagcaaaaaacgtcacagtccatgccttcacatggccttcatggaccaccgcgggtgttctttttcccccgagtctttatgtacttgggaaaagtggccagggttgaaaggtgcaatgagtacacggcagaggtcagagaggttcccactcagcccggcgtctggaagcagcgtggggtaggggccgctccagtaccccctcctccagtgtcgaaggtgggcaggccctcggccgggtggatgagccgcgactggagggggcggggcctgggcgggaggcgggcggtgggcgtgtccggggcggggctgtaccgggcgctgggcggaggagccttggctggggactgcctggaaacgggctgggcctgcctcggacgccgccggtgtcgcggattctctttccgcccgctccatggcggtggatgcctgactggaagcccgagtgggatgcggctgacgcggaagcggctctgctcgtttcttatcgccctgtac

SEQ ID NO: 9936 - DNA, 2300 bp, Homo sapien
aagaataagcgtgtactatttcacagtcaactagaagaaggcattaggacattagggctattttctcaatatcttgttgattaatagttcttccctttgcagacagagtagaaaatttcaccaagtaaagattttagccctgctttagtttaattcatctcatattcctttatttctattcttcctcccacatctttccttctcaggtctggttccctatatgcggagcttcaacccccagaggatatttaaccttgtctccccctccacactgctgcattccccaccacatctctttccctctctttccatccacctgaagagatgagagcatatacagaaagtagctcccagctgtagctcaaccattaaacaccaagagaaaggaaaatgaactctgccagacttagatcaattagaagattcctttgtaacctaaatacatttttaaaagcttatcatcaaattatgcagtcatttgcagtttgaggtaaaacaactccttcattttcatggccctctcccctattcaagatgacatcaactgcatattagttttaccttgtatgcatttctcaatagtaaaaccattagtcagtagcatctgaatgtacattgatacagtgggtgttttgtggtaattataaggtaattacttcctatccttaaataattgtcatttccacaaacaaacaaaataggataaacaacaatacagcatacataaaacaactgccatctccctaagacaccagaatagcctgttaatcaaggaaagctaaatttattaaatctactacagtaagggaggccacactttgacagaagcttggcagtctcagaaggagaaggttgggggtgatatttataggatttggggagtctgagcaaaaatggtttaaaacaggtcttttgaggcagggaactgtttgggggattgggtaaagtgtttgacctaatagtttagggtcggtgctagagtgaccaattttactgatttcctaggactttctcaattttagcactaaaaatcctccaactggagaatccttacagtcctgggcaaactgggaccattggtcaccctaattagcagacataccgtcgcaagactgctgggtaatttgaacagtagtaccagagcaactgacaaaacattgtagcccatcttcccaaggctggatacaaagttttctgaagcattcacatttacagcctctatttgacaaaatactgcatgcctatgtgcgttcaactcacataataatgaaacttaactttaaaaatgtttttattgcagtaaggtatataaaacatgaattcgacagtttaactatttctatgcatacaagtgagtggtattaattacattcacaatgttaagcgaccatcatcacttaatttttttaaaggacgtttatattcactcatctatcaacgtagtaggcactgtcctaggcgctagggattccatgcagagcaaaaaacgtcacagtccatgccttcacatggccttcatggaccaccgcgggtgttctttttcccccgagtctttatgtacttgggaaaagtggccagggttgaaaggtgcaatgagtacacggcagaggtcagagaggttcccactcagcccggcgtctggaagcagcgtggggtaggggccgctccagtaccccctcctccagtgtcgaaggtgggcaggccctcggccgggtggatgagccgcgactggagggggcggggcctgggcgggaggcgggcggtgggcgtgtccggggcggggctgtaccgggcgctgggcggaggagccttggctggggactgcctggaaacgggctgggcctgcctcggacgccgccggtgtcgcggattctctttccgcccgctccatggcggtggatgcctgactggaagcccgagtgggatgcggctgacgcggaagcggctctgctcgtttcttatcgccctgtactgcctattctccctctacgctgcctaccacgtcttcttcgggcgccgccgccaggcgccggccgggtccccgcggggcctcaggaagggggcggcccccgcgcgggagagacgcggccgaggtaggactgggtcggcggcttccttccggctctgcgctcctggctggggctgctgggcggctggggccgggtccccgcacccggctctcaagtccgggattacccgcagggcctgagaagcgctttgccccctacagcctctcgagccagcccttggctcggaattggagaatggtcctcattcttacccagatctcacacgccgtc

SEQ ID NO: 9937 - DNA, 2300 bp, Homo sapien
agccaaggagttcaagaccagcatgggcaacatggtgaaaccccatctctacaaaaaaatacgaaaaattacctgtgtgtagtggtgcacacccgtagtcccagctactcgggaggctgaggtgggaggatcacctgagccagggaagttgaggctgcagtgagccaagattgcaccactgcactccagcctgggccacaagagttgagaccctgcctcaaaaaaaaaacaaaaaaacacaaaactatcacattttgtattatcatatgcaaattgatctgcctacagccaaagcttaccattaatctacagctatgccccatcattcaaacttgttcaaaagattgtattatagaaattttacttctagatagaatgtggattaaatctcattgtagattttgtataaaatgatgaatttctgataccacatacctttgttcaggctttgtttgtctcttgtttttgttgtgttgtttttaacagcttcatcactggtccagctgtaataccagggtacttctccgttgatgtgaataatgtggtactcattttaaatggaagagaaaaagcaaagatcttttatgccacccagtggttactttatgcacaaaatttagtgcaaattcaaaaactccagcatcttgctgttgttttgctcggaaatgaacattgtgataatgagtggataaacccattcctcaaaagaaatggaggcttcgtggagctgcttttcataatatatgacagcccctggattaatgacgtggatgtttttcagtggcctttaggagtagcaacgtaagtacaaaatatgattaaacatttttaggccctaacacctgaatttctgaaccaggaagacttattcaaaattgtaataaatttagttcttctgggattattgaggccaggtacagtctttctcagagataaaaacagggtgtggtcgcatccttcaataacaattatgatgtttttaagagtattttattctttaatgaggagatgagttactttttttcttttaaaaccccaaggcatagaatggatttttcaagcttattaggagtgccataaaaatatatttagcagagaaatggcagatagatttttttaaaaacaatgatagtatctatatatagtaaaaaaaggcaatattattatatcaggaatataccgtaccattgtgtttgagactggctgaatttatacaaatctcttctataaaaggagggattaattaaatgatagctaaggtttctcaagatacagtcttttaggccaggcgcagtggcttactgcctgtaatcccagcactttgggaggccaactaggcagattgctcgagtccaggagttcaagagcatcctgggcaacatggcaaaaccctatctctaaaaaaaaaaaaaatcaaaaattatccgggcatggtgacatggactcctgtatggcgcctctagtcctagctactcatgaggttgaggtgggaggatcacttaagcccaggagattgagctgagattgtaccactgcactctagcctgggcaacagagtgagatgagactgtctcaccaaaaaaaaaaaaaaaaaaaaaaaaaaaaaagatatagtctttctccagctataaaatggaaaacatatatttttatctttctgttaataggatgtttttaattaagagcaagttgactttaagataagttgccactagtatataaacctcctgagagcagggatttttgtctcttttgttcactgttctatccacagagcctaaaacagcacctgcagagtaggtattctgtatttgttgagtggataaattatgaaaaatctcactgacatgatttttgaatcatacattcattattcatcattctgtccctggttgcgggatgtggccttagactgctgcctagttagcgacacagatgtcactggcacatctgtgccagtaatgagatgtattcccaagcctactcctataacaccctaactcagtaggtttggggtaaggccagacaaaaaggttcttgttaagtaaagccaggtttaagaccctcttaaaaatctattttttgagcagagcctgcatttgtaaaatgttttcatatagtataagatggaacctcttggtaatcatgatgttgttgcactaggccagtatatttcttatataggtctgtggttctcaaccaggggcaattttgcccaccgggaggcatttggcagtgtctggagacttttttttttttttttttttgagacgaagtcttgctctgtcaccccagctgga

SEQ ID NO: 9938 - DNA, 2300 bp, Homo sapien
tgaaccatgcaaagatggcaaggtaaattcttcgttatattgttcaaaaagagactagagtttgagaccagcctggacaacatagggagacccccgtctgtactaaaatgaaaacaaacaaacaaataaaataaaaagagactagacacgatagatcttgtaaaaggtatctattaaaaacgtggccgggcgccgtggctcacacctgtaatcctaccactttgggaggccgaggtgagcggatcacttgaggtcaggagttcaagaccagcctgaccaacatggcaaaaccctgtttctactaaagatacaaaaattacccaggcacggtggcgggcgcctgtagtcacacctactctggaggctgagccaggagaatcacttgaacccgggaggcggaggttgcagtgagcggagctcgtgcccctgcactccagcctgggcgagagtgagaccccgtctcaaaaaaaacccccaaaaaacaaaatcaaaaaacaaaaacaaaaacaaccgtaaaagtactaagtgcaatgtagtgtcctgtgttggatcttggaacagaaaaaatgacactagtcgaaaaaattggtaaaattggaataaaatctggagtttagtaaataaataagctaacaacgccgttaagtgtgacgtgtttccataccatcgctttcctaccatcctagcttccctatctactgtaggaatagaggatatggtgttcaaggtgggtgtttttctccgcctcgattgaagagcttcgcgctctttggattaacagccaggtcattcacaattcagtgttcagtttttctattggggtccagcgtctcggagtaacatccctttgtgtcatggatacatccaactctggacttccccattagattctggcaaaagccccaccagagcccccgccagagccagaaggcggtccctcaggtcaggaaggggttttcctgccgccggagccgcgacctcggctagcggtggagcggggcttcggcggagggaggtgcggggcctcggcggagggaggtgccgggggcgccgcccacggcctcctgggctcggcgcgcggggccgggctgcggttggccacaagaggcatccatcttcccggaccagccaggcgtttcctagcggagcaggggcgggagcttggacggagaagggcacaggccggagcgcggtccgctcccgcgagcctggccccgcctggcggagccccgaggagccaccgcccgcagatcgctagccgggcgcccgcgaggcgcgagccgtgtgcgcaccctcaactttgctgccgccgggggcgcggctcccgcgtgcgtgtgcgagtgtgcctgtcactagcggcctcctgggggcagcagcggaaagggggacgcagagaaaggcagcctcggcgcaccgcggccagggaggcagaggcccctcgcggcgccggctctggagacctaaactccgccggggctgtgcccagggcgcgtctgagcgtcgccgccttcaccctctcagcagcagcggggactcgcgtcaggactgcgattcctttcgcctgccgagctgtagcggcagtgtctgcgggcagaggagcggcggccgtggcagcagcatccccagcccgggcgggacccttgagcgccggagccgacagctggaggcaggaagggagggttgtggcgcccgagctgggcgcgttcccagcgcctgccctccgccgctggccctgtcccgggcgcccggtgcgggtctcgaacaatggtgcggagcgccggcgcgagccccgcgcccgcccagcggccgtagaggaagtggccgggctcccggcgaggtgggcagggagacgtcccccgccactcgctggctggagtttgcctgcgcgtccggcctctcccccggggatcccctgggattaccgacggagctcaatttcgagagtatggtgccagcgcccgggctaatctagtcctctctactcgctctttttcccctcctcctcctacttctcctctccctcctcccttccctcgggtcggcgctgcctctggattgcctgcgtgtgggagtacaactctgcctctccaaggagaacgggttgtgaccactgaacaaaacttgcccattgaaagcaaacccggaacagctggataatgtccaccccgagccgattcaagaaggacaaagagatcatagccgagtatgaaagtcaagtcaaaggtaaggatgggagcggctgccttgctccttttgtgtgccttcttgtcattgtgctcgtggagttgcgtatctaactt

SEQ ID NO: 9939 - DNA, 2300 bp, Homo sapien
acactcacggccactattccccttccctaatcaccccaaggccaggtataggacaacttagggatagtccctatgccccaaagcccactggaatcattccaactagcctattctaaacctgcttgcccagcttctcccattccctccagtgggaaccacaataaagactcctgcccacattttcctttgtgccttctgcctcctgacccaccccggtgcttccttctgtggcctccctggtggtggggcacatccccaactctttaacaaactatcttttcagtggtagttgtctcctgaacgttggcctccccgtacctgaataaaaatgaaatccacactttaaaacacttttaaaatagtgaaaggagtggatgaaatcaagtatgtagggttaaatgctttggtggttggttgttttgttctttttactcctatcagattatttcctccatgaatggccagaactcagtgtataaaagagatctcagaaatttcatccgtggcaggagatgacatgttgcctggtagaagtttccatattctctcctagacacttgcaaaggcttcttttaacctcgccagcactgtagaacttcaggtgctgcttgctgtgcaccttgttcatcatatgagcccatctgctgggagggtcttagaatttagctgtggaaggctgtaccagtaggtttgtttccatacatgatagtgtctaaggaagctagtcaggcttccacgtaacttcttgggatctggtatatgaaccagactttctgaacttaagctaaatgaactaaaaaagataaattttcctagagtctgaagcttaatgaagggctttacacaatttcctggtgtggtgtgtatcctcctataagtcttgcagttaaaaaggagttttacattaaaacatccagagacaggtctcagggctctccttccatgtatttcattcagcacagtagtagaagttgagtcaggtaattctggccttctttccactaaagggagagagcagaagaggttccctctctgcagtcacagggcaagatgtcacagtttctaaatatactacatgctgcactagatgtgcatatgtcagagagaatggtttattcaccagagcaaatgggcagactggagaggaagagagtctgcagtggcataaacaagtacatcctcagatatttaggtggtggaatagtttgttctaaagaaataataactcatgcgagcctgtatgtcccccaaattagaaaaagcagtgaacccaaattatttttctcacttgtgacctattaatagttacttttgcatgaaataaaattccattactgctggaggggtatcgaacagatgtgatgttacttgcattggtttgctgggctgagtgaggtggctcacgcctataattccagcactttgggaggccaaggtggaaggatcttttgagcccaggagttcaagaccagcctggaaaacacagggggactccgtctctataaaaaatttaaaaattagctgggcatgatggcatgcgcctgtagtcctagctacttgggctgaggtgggaggatcccttgagcccagaagaaggtggaggctgcagtgagccatgatcattccactacactccagcctgggtaacagagcaagactctgacttaaaaaaaaaaattatgtgtacctaaaaatgttatatttaattcctcatttggggatctaccggagccctaatctttatgaccggttgtatcttactgtgtgacttgtaaaccaaataacaagaatgctggtttgtaacatttggccaaatagctaacgagtctacttggtagtgcttattttaaaacaaaccagcaaacaaacaaatgtcagctgcagcatacagggaaacagcagtgtgaataaacaatttgtatgttttttgatacagaagtgaaagtaaataaatgggaaatgggagggaatgttttcccctgtgattgggggaggggaaggaacccaagattcccgtgttttgtaatattgatgtgacctatagatgtttcatttattgtttgatttctgccatgctcagtaattatattcccttcccttaggcctccaaatgttccccctaagccccagaaacacaggaagtccaggccccgctcacagtataatactaagttgtttaatggggatttggaaacattcgtcaaggtactggcaccagccatctgggtggctgatctccatgcttcttactataatggtctcagcctcttgtaagaggaggaaggtcattatgtccaagt

SEQ ID NO: 9940 - DNA, 2300 bp, Homo sapien
gccttcctaacaaccctgtttctcgctgttttctggtgtgttcgttgtagaatgtgagccaatagaagcaatagccaagtttgactatgttgggcggtctgccagagaactatccttcaagaagggtgcctccctgctgctgtatcaccgtgcatctgaggactggtgggaaggcaggcacaacgggattgacgggctggtgcctcaccagtatatagtggtgcaggatatgtgagtagtctcaactttgattgcctgagtgctcccaatagaggactccagccattgttcttaaactgaccttggtcttgtgagaaaggagcagaagggattacagagataaaacttcagagctaggcacagttccttaccttgccagtggctctttgctaacagtaagtcagggcccaggaggtttggaacaagaactctggggagacatcttctgaagctttcagattgttagaaaaataacctatgcatagaatggtgttaagagctgaagtgacattggtaattccaaaaacagcagtgctcttctcttgatgtctgtttaccgtttcaattccagattccccagaggaaggacactgacctaaagtcagagggaatcattgctatgctgttttttgttttgttttgttttttgctgaggagaaagctctaatttcaaaagtatttaaagacatgggaagatagtcataacatattaagtgaaagaaacaggttgcaaaataatgtgtagtccaaaagtagctttttaaggaaaagacaaatatagcacacaaaaggtatacagtgactgaatcattcagcctaatttcagaaatgttaaaatgtgtatctcggaagccaagaaatgtgtgtatatgcagacatgtagtcatatatatctgaaatatctacatataaatatattcatatataaaataaatttgcataactatctgtacagtcatgtaccacacaatgacattttgagcatcaatggaccacatatatgatggtggtcccataggatttaatatcctatttttactgtaccttttctatgtttagatatgtttagatacgcaaatacttgtttacaccattgtgttacaactgcctgtagcattcagtacagtaacatgctgtgcaggtttgtagcctaggagcaataggctccaccatgtagcctaggtgtgcaataggctctaccatctaggtttgtgtaagtgcactctatgatgttcccacaatgatgagattgcttgacaacgcatttctcagaacgtatcctcgccgttaagcaacacgtgactgtagtataaatgccatacatatgtatgtacacaatcacagatatgtatcccaggcatagaatagaagatggaggaggatatttcttaaaattctaacagtagttgtctctggatgttatattatgggtgattatttcagtcttttttgtataactgaaattgctgttgtacctgtaatgaaattgtattgcttttataatgaaaagagaaaagttattttaataaaagaagggctttcatgcataatgctatttcatacataaatgctatcacgtaaattttcatctccactcatctagcaaattttgtaaaatttgtaaatctagtaaattttgtctccattcctcttactgcttcagggatgatacgttttcagacactctgagccaaaaagccgacagtgaggccagcagtgggccagtcacggaagacaagtcctcatccaaggacatgaactccccgacagaccgtcatcctgacggctatttagccaggtaagtagagcctgggaatcaggcccctaagcctccgctcctcctggggccatgaggagccactgcacctcagccttgcagtactgcccggtgtgataagctcttctgttttctccctgtttctgtgaatgtctaggcaacgaaaaagaggagagccaccccctccagtaaggcgtcctggcaggaccagtgatggccattgcccgctccaccctccacatgccctttctaactcctcagttgacctagggtccccaagccttgccagtcacccccggggcctgctgcagaaccgtggcctcaacaatgacagtcctgagcggaggcgcaggcctggccatggcagcctgaccaacatcagccggcacgactccctcaagaagatcgacagccctcccattagaaggtccacgtcatcagggcaatacacgggcttcaatgaccacaagccactggacccagagacaattgctcaggtacgatgcttttaattacatattgc

SEQ ID NO: 9941 - DNA, 2300 bp, Homo sapien
agtgtgactctgaaagtaacaatatctcatcaatttaatctcttcctgcaatagaatgactacactggcaaactgaggtagagatcaaagtaatgatcttgattttagtacagatcccagttcttttctgcacgatgcattcaccaatgggctgatgaagtaaaatctacactgtgtagctcttagatgggcgtgcaattggctgccagtttgaaatgaaaccaagaaggaaattaatggtgggccagagggattagttgtgggaaatccatttctcccaacaacaacaacaacaacaaaaatctttatcagtaacttcaatgatagaatagataaaatgctcataggtctacaggtgatatcagctgctgctagtaggagaatggaaatcaaagcaaattttcttaagatgggggaaaatgtagcataaatataggcttaaaaaattgcctgtgtgctaggatgccagagaaagagggtctccaattgagagttcagctgactatgggagttacatagagcccacatacaaaaccaaaaccaaaaaggggaaaagggacaaagaaaaagaagttgtggttgtgaggtacacaactgggtgagaaccacaaggccatgttctgctgatggccctgcatggctcttactcaggtaccagggccagttcagggttggctcaaagacaaatggagaggacagttgggatttcaaatttaggatcatcaggactttgtagcattttttttttttttaagagacagggtctcacactatgctgcccaggctggactcgaactactaggcccaaagccatcctcctgtgtaaaccacccgagtagctgggagtacaggtgtgcaccaccatgcctgggctttgtagcatgtttaaaggaacctaggtgatttagtcaaaagagaacactgcatgaaccaaggcctcaggtgcttcttgctgccttcatttccacagaggagaacacagggatttagaggagatggaaacattttctaggcagttattgaataacggatctttggaggagttcgtggagtagtgtaaccagaaagtctttaaaattaaacccttctaatcgtttgtaagtgtagatggggggacttggaaatctccggggcctaatcatgctcgcaaaaggagtgacattaatagctttggagatggtgtcttcctctcctttcccaggttaagttcaagcagtaacagcagaggttctacctccttccatcgagtctttaagctggacccggggaaataactgttaggaaagaggcaagcatccaacccactcgagctgtgggctgacagtcccactgggatcgtcccatggagacaattgcaagtcttttgcatgagctaaaccccgctccacatggaaccgaaggtgctcattgtcagctaccacgcaatgccattatcacctttcagcccaagtgccacagaccaacactggctatactccaatgaggtgtggcattcgggttcttctgccttcaggtcacaacctttctgactcagctgggctacattaaacctgaagctctgtacaatgtggagagcggtgttgccttcattacaagtggtgcagcattggattttcaagtaagtctaagtgtttctattgtccttaaaatgacatatgtccagttatttaaaaaaattacaaaatacaaatgcccgtgttaatttagctagtctcagacattacattcgacaacatagaaaagccaaaagatctccagttataagcacaaaactaaggaaagttatggatcagtgacttttgtcactaatccattttcttttttaagtcacctccctttatggccttgcttggctggtttttacattgtgcatgacttgtctgttggaccctggggaggtggggcaggtcctatggtaggatttgtttttggaagaacagcaggttttggcctaagggctggaggcttcagctgcacgcccattctgggtgccaccataggcttgaaagtactcattgtgtcactggaggagctcgtgctacgtcgaatctgaggctcggagctcctgagggcaacgttgtgcaaagggctgagagattccgtggaagtggcaggggtgggagagtttttcacttgctccagggtatccagcaccacatcaggggcatgctttgctgtgctctgtctctccagttctcggagttcattcaaagctgtgttcatcgtttcttcaatatcctattgaagaataatcggaaagagagaaagcacagactgataatgaatactaatgtatagaa

SEQ ID NO: 9942 - DNA, 2300 bp, Homo sapien
agctggggttcaagcagaactaatcaatttacacattgaggaccactttacagaacccaagtcagagacagtgaagatcttatacacacattcttacacacagggcagccagttctgtttacgtaaaaacctggctcattcaacttaaaactagagtagcagatttttttaaatggagtcaataaatagactttagaaaattcaactgaacccactcaggttatacgcaaaattatatgtacatatatatttttctggagagtaagtacacagctttcatcaaatttccatggataagttaataaaaaaaaaaagcaaagaatcatggcacttgaatcagtcaccattctttgaggtgggggagtctaaaaacaactgaaactgcctaaatattacctaccttcagtattacagctagaatccaccccattttcacatatataaaaaacatatatctgtatatattatacataaattataattttcatacacatttttaataagttatatgaatgcaaactcaatctgagagtacaagggcagatattttggtttcgactctatcatctacccaacataactgcatatataatttgctaatctatagaaaggggaataataacaccatagcagcaactgcaaatttgtgagaaatgccattgtaaaaaggggaggaaaaaaataaggtgaaactatctgaccagtttttgctaataaattagcatactaaataagtatgtataaatcaacatacttgctacagcaattacgaactcaggaagccctgtctcttgagtgtttactgaaagctcaataagatgtacatggtcaccttcaggcaatataaggaaagtagggggctggttagggaacgggggggggtggatcaaaatgaaatctacaccaattttacatttctattctctgtattttatatacgtgtccttcattcacatcagacctcacgcttctgaaaattgaagagtctaaaacaggtcaaagtactgactctgaaacccctaggattcaaatatatttatttgtcataattaagcagtaatattattttgtatgcatattccatgccttttacatctattatttccttctcatctacttatacttattgcttctactagtaaaaatcagttgaatcagctcttgaatcttatttcagaggcaagatgtacatgaagtgctaagagtgtttaccattttccccttaagtctcttcttgctagtgttaggcatatttcttgcctttcctgcccaatattcatttattactttagtcattaaatatgtattgggggactatgaagacggggtaggactctaaatgtgactctcgggccttaaccttaagaggccacacaacagtgttcagtaatagaactaggttgttttgcaaagttttgctcttctggctgcagcgtcactaattaaaacaatgaagacatagtttggttaacttctcatttatggcatcaatccatgcacgaggcaaaagggcaaacccttcggtttgggtcacagccctgcaaagagcatctacccagttcgccaatctatcagcagcgcaggccggtgggcggggcttgtggaagcccagggaaggaaaggaacggtgggaggagatctgggaatgccgagtcgagcctgcgactagaagtgacacagagacgggaaacccaagccactgccgactggggaatataccccctttacttcctcctcaaggggctcggggggcggggcggaggtacctagtttctgccccaggtaggtgaggctgtgatagaccttctcggccgcggccaggtgcgccaaggccgccagcagcgacagccagctgccccccgcgctcttgttggcctctcgttccttctccacattgtccttagccttgtcgtaagagaagatacccaggtgagagaagaacgtctccagcaccgcctgttccaccgggaccggggcggccagcgggatagactcccccatgcgagctgcgccccagctcgacccacgtggctctcctcggcctcgcacttccgggttctgagggaacgggcttgcgcacaagcgtgcgtgcgcgtgaccgcctccaccggcggactcgtgagcgcgccgctgccgggaccgctcctgggccttagagaagacgcggataagggccaaggaaagagggaggtagcggttgctgagctccttcggcgcttcggctcctgtagctctgactattcggaccgtcaaggtagaataggaggcggccagttccccgctctaagaagttgcctgcg

SEQ ID NO: 9943 - DNA, 2300 bp, Homo sapien
tctgccttggccaggcgcggtggctcacgcctgcaatcccagtactttgggaggctgaggcgggaggatcacctgaggtcgggagttccagacctgcctgaccaacatgcagaaaccccgtctctgctaaaaatacaaaattagcagggcgtggtggcacatgcctgtaatcctagctactctggaggctggccttaggcaggaaaatcacttgaatccggcaggtggaggttgcagtgagctgagatggctccactgcactccagcctgggcaacaagaccaaaactctgtctcaaaaaaaaaaaaaaaaaaaaaatcttccttgaagctgggcgcagtggctcatgcctgtaatcccagcactttgggagtccgaggcgggcagaccatttgaagtcaggattttaagaccagcctggccaacatggtgtaaaccccaattctgttaaaaatacgaaaattagccaggtgtggtggcactggcctgtaatcccagctactccagaggctgaggcaggagaatcactaaagcctggaaagcggaggttgcggtgagccgaggtcatgccactgcactccagcctggggaaaactccagcctgggggaaagagtgagaccctgtccaaaaacaaaacaaaataaaacaaccaaaaaaaaaaaaaactgccttgtatcattgttaacagggttgatcttatccaattacattcttgagtatagggaacaggtgcacaatacctattcattaaaattagattagtgggatttcctttaaaaggtagtgatgatggcagaacagctctagtttgagaaaaaacgaaaataggcaattctctcatttgttcaacaaacatggctgcgccgtccaatatgaaaagattataactgtaagtgaaccctactgtaccctagggatctcaccacttggggaaagagatatgtaaatatatgcgattaaatagtgtgactaagaagcataaaataagtatgcacaaagaagaaaggaaaaaactattgagtagtgggtagtgtttcaaagtagtggacatacaagtatgagccgggttcatggggtttcttaaatgccaaaggaacttgtaattattctaaatgacaacgtgcacaatttacattaatgtattcttcattctggccaggggtggtggctcacacctgtaatcccaaaactttgggaggctgaggtgggaagattgcttgagccaggagtttgagaccagcctggctaacatggtgaaaccctgtttctattaaaaatacgaaaattagccaggtgtggtggcgctggcctgtaatcccagctactagggaggttgaggcaggaaaatcgtttgaactcgggaggtggaggctgcagtgggccgagatctcaccactgcactccagtctgggcgacagagcgagactccgtctcaaaaaaaaagaaaaaaaaaagataactttttaaggaaggttaatgcagtttgggccaggggctctacttattagttgcagggctaacacagacccgggagaactagaacgggatacaggtgagagttaaccggtggtgtgtgatgtgatgaaaactaggcaatgggaaggagatcaacctttacccgtcagtcttctaatctcagcaaatcacttccatgagttggtgtagaaggtgtcagggctgactagggtccctgctgtgagtgtgggcacaactccaggcacttccccatctcccagccggcccagcgaggtgcctggagagcccaggccagatgttctggccagggctgacgtcacgtttgcatgacgtcaccagcgctgacgaaccacacagagaggggcctgtcagctcacctcagagcgcaggcaacttcttagagcggggaactggccgcctcctattctaccttgacggtccgaatagtcagagctacaggagccgaagcgccgaaggagctcagcaaccgctacctccctctttccttggcccttatccgcgtcttctctaaggcccaggagcggtcccggcagcggcgcgctcacgagtccgccggtggaggcggtcacgcgcacgcacgcttgtgcgcaagcccgttccctcagaacccggaagtgcgaggccgaggagagccacgtgggtcgagctggggcgcagctcgcatgggggagtctatcccgctggccgccccggtcccggtggaacaggcggtgctggagacgttcttctctcacctgggtatcttctcttacgacaaggctaaggacaatgtggagaaggaacgagaggccaacaagagcgcg

SEQ ID NO: 9944 - DNA, 2300 bp, Homo sapien
aggggtttcaccatgttgcccaggctggtcttggactcaagtgatctgcctgcctcagcctcccaaagtgctggaattacagctgtgagattacacaggctgagaacactttttcatagattgactaaactccaagttttagaagaacagacacatgtctgtctgtttcgctcaacatgttatctcattatctagcatacctgccacatagctggcaatcaataagtatgcattcagtgaatgaataaatgagtagataaaatagttctctatgttctttttctagtttaaattttttccactggcacggtggctcatgcctataatcccagcacattgggaggccaaggcgagtggctcacctgaggtcaggagttcaagaccagcctggccagcatggtgaaaccccatctttactaaaaatacaaaaattagccaggcgtggtggcatgcacctgtaatcccagacaggaaatcgcttgaaaccaggatgtggaggttgcagtgagccaagatcatgccactgcactccagcctgggcgacagagcaagactccatctcaaaaaaaaaaaaaatttttttttcttcatatgatttttttttcatttttaaaaattgtggcaaaatatacataacacaaaatttacttccttaatcatttttaagcatacatttcagtggtatcaagtttattcacaatcagccatcaaaaccatcatctccagaacacttttcatcttacaaaactgaaactctctacccattaagcaacaactttccatttctttcccccatcccacccctgcaacccacagcccctggaaaccaccattctactttctgtctctgattttgactattctaaatacctcatatagttggaatgatatagtacttgtctttttgtgactgagatttcacctagcataatgttctcaagtttaatccatgttgtagcatgtatcacaatttccttttttttaaggctggataatattccattgtatgtatataccacattttccttatctattcatctgtcaatgggttgcttccatgttttagatgttgtgagtaatgcagctatgaacattggtatgcaagatatctctttaagacggtgctttcaattcttttgggtatatactcagaaatggaattgctagattagatggtaattctatatttaaagttttgaggaaccaccatactggtttccagtgtctgtgctattttctacttccaccaacagtatataagggtttcgattcctctatgtccttgccaacacttgctattttgtgttttttttttaatagtagctatcctaatgggtgtgggataatatctcattgtacttttgagttgcatttccctagtgattagtgatgttgagcatttttcatgtgcttattggccattcatctatcttctttgaagaaattattgcagtataatttacatgaaataaaatgcacccatatttaaagatacagtttgaagagtcttgacaaatgtctctattcatgtaactattaacactacttcaatcaagatttagagcgtctctgtcactccagaatgtcaccttgtgccctttggccaccagttctctcacactcctggccttgtgcaactatcgatgtgctttctgtcactgtagattcattttgcctctcttagcactgcacttacatggaattctgcactaagtactcttttgcatttggcttcttttggcataatatttttgagattcttccatgttgtttcaggtagatgcatgatattttataagtgaaaattcatgaatcagtgagcagatgggaggtcataataacagtgatacttattagacacttgttatgtgctatgtgttatgtgctaagcactgttgaagctttataaatacatactatcttatttaaacttacgtttaaatcaaccccatgaggtgatattattaacccatttgaaagacaaagaaactgagcgacagggagtataagtaatttgccaaatgtcacacaactgcccagtggtagagctgggatttgagctcaaagaatataactccagggtcagtttgtaaaactgccacaggggaggagccaagatggccaaataggaacagctccggtctacagctcccagcgtgagcgacgcagaagacgggtgatttctgcatttccatctgaggtaccgggtttctctcactagggagtgccagacagtgggcgcaggccagtgggtgcgcgcaccgtgcgcgagcagaagcagggcgagggattgcctcact

SEQ ID NO: 9945 - DNA, 2300 bp, Homo sapien
accaaaatctcacaaattaccactaaagaacttactcatataaccaaatatgaccactaaagagcttactcatgtaacaaaatatgacctgtaccccaataacctatggaaaaaataaagaaaaatgaaattcaagtttgaatacgtcattgcattagtttgatagggctgcagtaataacgtaccacagagtggcttaaaaaaaatctattttctttgcaataggatgcaactggagaaactggttgttttaccaaggctttgactggaagagtatgcttccctttaaggagtcaagcttgacttgcagagctgataaaagcctcttgggaaaactggcctgatacattgtctatacagtccccatacagggttcctaatttgtggtgagtaaagaatatcactttctaacagttccaggaatcccatgctcttgggacctcaaaaggagaggagtttactcaacttacaggtatttgagagtaaaagcccctggctgggctcagttttaggaagtcttatctgagattccttgtggaacagagtttcatcaaaaccaatctaaaaagcctatgtaaaaataattatctttgctgcactttatgcaaataatcaggccaaatataagactaaagtctattttgcaaacaactcagtcctatcatgatttgtttttaacaaaaaatgaggactggggagaaagaaattatatttcaaaacttatacatttgtcatgaaattctagactttttagataagctgtttttaagtttttgcctacattttagactaaccctgtttattcctgtgaaccaaccagcaacctctggccatagctcataaggaacaaaagtggatgggtaatgtaaaaatctggatcaatattctagttctgagaaactatcccacacatcctgccatttgggaaaataaggccaagggagttaaccaaagccaagccccatgcacccaaatcttagcaagcataaatatagccaccactcatctgggcatgtcacaagacatccttttctctcacttgttagaggaggactcaattccacagttacaccttagcaatcagcttatgataaggagtctatgcaaccccctcccctgcagacacatttttgtcccaaactcaattccaagctttgggtcaaagccctaggaaagaaagcagggtctgaaggatccaggtgcaggcaataacagaagttaaaaggcacagcacaggtgagcgtgactgattcctgccaattaagccaagcttcgcaattcatggataaaggtcatgctgatatccatggcataaatgaagggaactcgacggctactgacagcaggggatatagggtgtacatgagtaagagcatatattcccagcccctagtcctccctgttaatgtcagtgaaagccgctttgatacccatggatggcaccctgatgtggtccctgagactcagggatactaggatggaagaaagagggatgcctcactttctctccctcatgtatactgggtattcgctaggaagagatgggaatgtgggatgatgcctcattcccctccttctattaacagaggagtagccattcatcttcaagctgtacccctttcaaatgcaaccagaaaccctgggactcctttggaaaaaaaaaaagccactttctttcctctttccttctctgtcctcgcttcacagataggaaattgtatctctgtactacaggatactcccttcggatacatccttcaaactgggaaaagttaatttcccaaaccttaaactggttggcttaagattgggctcaggggaagggagcccagaagcccaacatgccagcaaaagagtaaaaggtttttttgtttttgtttttgttttttttttttttttgtttttttttttaccagtcaggcttttggctcccctctccctgggcaaacaagtaaaagacctcaggatctttgagctatccttacccaccacccttgtttcattttgatacatgttttctaatatgccagtttgtctcttctcactttcaggccaccaaactccaaatggtcatgcaaccagagccccagaggatggccccttctacagggaaccctgagacaggcctctgagggagatctgactgccattttcccaaaacagcgccccctgtcagctggaagcagttaagatcattcttcgttcttacccttattcttattctaatggcagctagatgtacttctttagacaggggaaagatagacgcaggaggaagataagggaacctgcccagggtc

SEQ ID NO: 9946 - DNA, 2300 bp, Homo sapien
cccaggagtttgagactagcttgggcaacactgcaagatcctgtctctacaaaaaaaaatttttaattagccagctgtgatggcatgagcctgtagtcccagctacttgggaggctgatgtgggaggatcgcttgagccctggaggctgaggcggcagtgagccgtgatggtgccactgcactccagcctggatgacagagtgagactgtctccaaaaaaattgttttagttcaagagaatggaaacaatggtagtgaggaaaagcaatgttgtatcccgaacttttcctcaacaaagaaaataaattggcacagttacattagttcacaaaggtattccgagtagaaaaaaaatctttttttttcatttaattttattcttttcttacagactcgttcaaaacaagccatgactcctcagcaaaacagctccatcaagcgtctcgccaacctctcccttggggctcagtcaagggaatgaaaaaacgaggctagacacctgtccccaacggaaaaaccaagaacacacctggagagcagctcagacaaagggagccaggcggggaaaacagtaattggagaggagaccgtgcttccagtctgttgctggtttacaaggtaaatctattcctggacgaaaggggtacaggaacagcacccgaaaaccggcgacaggctgtggcaggcccgacgtctttcaagcccagctcctagcgtcgacgcccctccttccaagacgtttcccagcaggccctgcgcccagtttggatcaagtgagccgcctgagattgccaagcgtcctgtgcgcatctcattaacgcatctgcttattcatgcatttattcttttgctggggagggggtggaggggaacggtgtctcactcattctgtagctcaggctggagtgcaggtggggcgatctcggctcacggcaacctccgcctcccaggttcaagcgattcttgtgcctcagcctcccaagtagttgggattacaggtgcacacgaccacgcctgggtaatttttgtacttttggtggagacggcgtttcaccatgttggccagcctggtctcgaacccctgacccccggtgatctatccaccttggcctcccaaagtgtaaggattataggcgtgatccacggcacccggccttatgcatttattcttattgagcatctaacatgctctaagcatcgggggcaaaaaagtaaatgagatataacagcacttaacacacagcatttatttgcacgggtgttggctttctagccctccagcgactgcttctaggtaggggccctctttcgtttttgcatcctccgagtctagcacagtgcctggcactgactaggtgctttgttaacaaaggaatgactttaaaaggtatttttgatagggagctcggttctcaaacctgtagccctacgtggggtaggggaggcgggagaatgggtgaacaggcagacacgaggagaatgggagacgtgtttgtattaggagtgctcacagcaatccacagcttccctgtgttcctcgttctcaaataagaggaggggagtcgagggcaggatggggcagccctccccgcgcaggagggctgggtttgggggccccagccgggagttctcactgcgctcccgagcccgcctgcccacccgcgccgctcaccaggtcaatggccacgacgtcccgcagagccactacccgccggatggacttgggcgggttctcggttaggtagacgagccggtcgcttagcaccacatacttgaggatgtggttctcagagttggacaccacgatgcatggctcgtaggcgcggaccgcgtcgtagacctcgggcggcagatgccgccgcaggaacacatccaggcggctgttcctgcgcgcggggaagccggacggcaaggggctggccatgcccggcgcccgcagcgtggcggagtgctgggactcgaggccctcagctcgccctctccccgcccccgcgctggaacccgcgcgccacaaagccgccggccacgcgtcgcctcctctccaggcgcggggacccgggccgcaactgcaggaatcgacgctaggtcggcttccctggagcgccctccccagccctgtccagcctctcgatctttgtcctaacctcagacggcgatgggcggggcaagacgctggtccttcaggcccgagttgatgggcacctcgggctcatcaccgtgaagtcccctgcggccgaagggcggtggatttttagggtctctcccgcccacccctaatgccagtccccaccactgcgtac

SEQ ID NO: 9947 - DNA, 2300 bp, Homo sapien
atgagtagtctttattttggaggaaatagccatgcggcatcttttatcaataaaggttgctacggatggtgtagttcattcatttttcatccatttatgaagttaggaaggctcagatgtgtgatgagatcctaagaaaactttaactactaggtcatttaagattttgccagcaggtggcacttctctttactcacttgagttccttaacatgatcttagacttaagtctagccagacccttacatggcggtggttcatgcctgtattcccagcactttgggaggtcaaggcaggcagatcagttgaagtcaggagacaagccatggccaagatggtgaaatcctgtctctactaaaaatacacacagaaaaaaaattagccaggcatggtggtgtacacctgtagtccaagctacttgggaggctgtggcaggagaatggcttgaacccaggaggcagaggctgcagtgagccgatatcatgccactgcactccagcctgggtgacagagggagactctgtctcaaaaaaaaaaaaaaaaaaaaagtttagccagaccaaaacatttctctttccctttgtactagtgtagtctacaatatctgtttatggattgtaatatatttataccttctttccacaagggatttgaagttgcttataacatacagtatacaataataaaatatgtagaaagggagaatataaagaatatatcaaatttgattcagggttgctggcagccacagcaatgaacgatatggtttcattatcaggtttttgggtcaatggggaggggaagagaataacttttctaggattcgaaataaaaaatggaacttctgacttagagcatttctgttgtgcccttctcatttctctaacctaattagtaagttattcttggcctgtaaaaactaaggaatacttactcctctgcagcctcagggtatgtaatccgcattcttcagtctatcagcttcaacttttcaagatgccagcatcacccattcattcttcctgcatagattgtcctgggcattggaaacaaaaccatatgccttaggttggtttgggtgtgctcacatcaattcatgtgaagaatccctttctcaaaggctgggcgaggtgacttaacgcctgtaatcccagcactttgggaggccgaggcgggcggattacctgaggtcgggagttggagatcagcttgaccaacatggagaaaccccgtttttactaaaatatacaaaattagctgggcgtggtggcgcatgcctgtaattccagctactcaggaggctgaggtaggagaatcgcttgaacccgggagggggaggttgcggtgagccgagatggcgccattgcactccagcctgggcaacaagagcaaagctgcgtctcaaaaaaaaaaagagaaaagaaaaaaaaaatccctttctcactggttggagaaagaagacctatgtttacactccgacaatatcagaaagctgtgccaggccatgttataaccaaaagctaaatctgtgtgattgggtttaataggtttctagggttgttaaaaataaatcggtaaattaaactctttcaagtttctaacaggaaaccagattgaagctggcttccattaccaataaagtttgtattggatggtgtgatccgcaacagagtacgcagtggtggggactggcattaggggtgggcgggagagaccctaaaaatccaccgcccttcggccgcaggggacttcacggtgatgagcccgaggtgcccatcaactcgggcctgaaggaccagcgtcttgccccgcccatcgccgtctgaggttaggacaaagatcgagaggctggacagggctggggagggcgctccagggaagccgacctagcgtcgattcctgcagttgcggcccgggtccccgcgcctggagaggaggcgacgcgtggccggcggctttgtggcgcgcgggttccagcgcgggggcggggagagggcgagctgagggcctcgagtcccagcactccgccacgctgcgggcgccgggcatggccagccccttgccgtccggcttccccgcgcgcaggaacagccgcctggatgtgttcctgcggcggcatctgccgcccgaggtctacgacgcggtccgcgcctacgagccatgcatcgtggtgtccaactctgagaaccacatcctcaagtatgtggtgctaagcgaccggctcgtctacctaaccgagaacccgcccaagtccatccggcgggtagtggctctgcgggacgtcgtggccattgacctggt

SEQ ID NO: 9948 - DNA, 2300 bp, Homo sapien
gtaccaaagatggagttactttagcttccagattccacccatcaatccagctcttacagtttcactcgccctcctatttggagatggtccctgagcttttagggagggtggtttcatatgatatagctttagcagcagcgccctagcagtggaaaacagattgggcccagagagattccaaatgagggagattcacaggctttgttgaattatctctagtcttgagaataccatgactttggttttctcagaagtaaaacaagagatacttcttgtttataattaatttgaataattaataatttgaatagtagaaacataatgcatgcaaggattacaatcaaaagaaaatttgtatgccagaacaacaaagaacctatttcgttgggaagccaactgagagcagcgtgaagaaaattaaggcctgacacagggactcacactcgtaattccaacactttgggaagctgaggtgggaggttcatttgagcctgggagttagagatcagcctgggcaacagagcaagtccccatctctacaaaaacaaacaaaaatagccaggtatgatggtatgcacccgtagtcccagctccttgggcggctgaggcaggaggattgcttgagcccaggaggtcaaggctgcagtgagctatgaccactctactccagactgggtaacagagcgagaccctttctctaaaaacaagaaaaaattaaaacccagttctcctttagcgacatcttgtagccactagcctgacattttaaacacataaattagaaacatgatgcaagagtgattcaaggtattttatataggaaatgcctggtgtagtgtcttggacagctaaataaaggtagctgttaaaacattagttttattctatgctcttaccattcctccctctccaagttttgtttgtagtctgtggcagcaacctagtctgtatttagtacacattgaataatcaacaatgaaatgtaaatattgagcacattgtgtgtcaaacacatgtattaactcaaacctcacagaaaccctttgaggtcggtactattaacaatccccattttacatacgagtaaactgaagcatggatagactaaagtaaagtgcctgaggtcaactagtgaggaggcggagtggcagtcaagtcgaggcagcctaagcctacactgcctctatgttgcattaataaattaataaatctgtgaccaaataaatgaagtgacatttagtagcatcgaaagatcccgtgagtaggacttcctaagaatgctctccttcttttcatggacaaaattttagtctgtttaaaataaattttggaccggacaccgtggctcacgcctgtaatcccagtactttgggaggccgaggcaggtgatcacttgaggtcaggagttcgagatcagcctgtccaacatggtgcaaccctgtctctacgaaaaatacaaaaattagctgggtatggtggcgcgcgcctgtcatcccagctactcaggaggctgatgcaggagaactgcttgaaccccggaggcggaggttgcagtgagccaagatctcgccattgcaccccatcctgggcgacagagcgagactccgtctcaaagaataaataaataaattaattaattaattttgaaaacctgtcagcactcatcagagctttacactgctgtactcgggacacttggggccgtagacaagcaattaaattgactcacacgtggttagaaccacgtcatcctgattcgtgaatccgtactctcaactactagaagccctttgtggaatgctcggggcgaacctgacgcttgagctctgacaccacgcagacacagccggggatttaggagctgggtagggactcctgggccggatgcctcatcccggcatgcacctcaagccccggtgaccacgccttccggcgagcgccagggagcgcgtgtgcgcctcgccgcccggaagcgccggccgctccctgcatgctgggagttgtaggcctccggcgtcagcccgcgggctgccgcccgcactctccaagagactgctggcgccggcgcccgcccgcgcggcaccgacgcggggagcgcgcttcgcgctgactcagcggcggcggcggctgcggcggcggcggcggcgttagccggccctcgcgctctttcccttcctggggcgccgaccccgcccgcttgcttgcttgcttgcttgcctgcctgcctgcctgcccggcgccacgcaagagaaggtgccaggggacgcagagcgactagaggcgcgcggtcccggccagca

SEQ ID NO: 9949 - DNA, 2300 bp, Homo sapien
aaagggctgagctgtcttcaaagctctcagtccatatcctgagttatttgattcaggcaggctcagaggaaaacagaaaagcctattgtaggtatcctgtaacctggacctgagcctggttttgctattcccaaaaggcctttctcccctacccctgctattcccaaaaggcttttctcccctacccccaatccaattagttttttggcgtctttggttaacggtaattgaaacaaaaagccccacagcctttttttgttttttttgagacagagtctcgttctgtcacccaggctggagtgcagtggcgtgatcccagctcactgcaacctccacctcctgggttcaagcgattctcctgcctcagcctcccaagtagctgggattacaggtgtgtgccaccatgctccactaatttttttgtatttttagtaggggattttaccatgttggccaggctggtcttgaactcctgacctcaagtgatccacctgcctcggcctcccaaagtgctgggattacaggcatgagccagcacgcctggccccccacagcgtttaatggaagtagtaagacttggtctccctaccttataggtcttgagagaataatatcatttttcacatcatttagagtttgttccatgtttgctcaaatgaatatgcattctatcaaaaactaggatgccttttgcagcttattatttgagaatgttggaacctatattgtgaagaagtggattacctctcagagattaaaaaaaatccttaaataagagtagtcagtgttaagtcatttgtggatttttttttgtgtgttttgttttttttgagatggaatctcactctgttctccaggctggagtgcagtggcgcaatcttggctcactacaacctctgcctcctgggttcaagcgattcttgtgcctcagtcacccgagtagctgggattactggcatgtgccaccaagcctggctgatttttgtctttttagtagaaacagggtttcaccgtattggtcaggctggcttgaactcctgaccttaagtgatctgcgcacctcagcctcccaaagttctcagattaccggtgtgagccactgtagctggctggtttgtgggtttttgtatctactattgaaaaacttttttttttttgaaatttttagaattggctggcaagagcagagatctgtaaaatgcaaaactaagtccattgctcaaaagctaaatgactggtttttcattatcctgttcctttcattagacttctgtcatagtacttagtaaacactccaaaggatattgaactctgaggtcagccattctaatgttttaaagaaggtttgtgatatttgtatctggaagtagacaaattattataattactgtaatagtctgcatttgtcatttttatacttaactgcagttgcacaattgcatttttaagtactagagataagtaaaacactgcataaattaggtacttctactatttaaagtagaaaatgattactttctataccttattaagaagatcttgaagactaagaaagcttgaggacctttatggcatactttaagatttttaggggccaggtggggtggctcatgcctgtaatcccagcactttgggaggccaaggcgggcggatcacgaggtcaggagatcaagaccatcctggctaacacggtgaaaccctgactctactaaaaatacaaaaaattagcccagcgcggtggcgggcgcctgtagtcccagctactcgggagggtgaggcaggagaatggcgtgaacctgggacacggagcttgcagtgagctgatacggtgccactgcactccagcctgggcaacagagtgagactccgtctcaaaaaaaaaaatcagatttttaggaattacacattagtggagtagttagcagagcccatttttctgagaattaggctctaacttttagttgtaatttagataagttccaaaataagtttttaaacatttaagcttctttgcatgattttatccatttacgttattcaggataagcatctatttgtttatcaagtaatgttttctttcaactttgttttttgtggcagatgtttataaattcttctgtgggatcagagggcacgcctattacaaccagaaaactacaagtataacagcgaggatggatgaacaggctctattagggctaaatccaaatgctgattcagactttagacaaagggtaagttactctgctgaatcattttttaatcatgtcaccacagattggcattagaggacttgaata

SEQ ID NO: 9950 - DNA, 2300 bp, Homo sapien
ttggtattttagcactgttttgagcactgttattaattgtgatttcctttttctgtttttcagtaagcaaatgaatcctttcattgaggatattttgaatagaatacaagatttattagagctttctccacctgtaagtatctgtctctttaagatattttacccagaattcattgaagccacacgtgccattagccttgcctttgttggcatttaaaaaaaaaaattggtggtggagggaagtgtatgtgcaaagattagttctatttaccaaaattctgttgacatagtaaacaaaacatagtaataggaatcaagagttgacagatcaatttggcagcatggggtatattgttaaaatgttgaagcattttatgaagaagaaaaaattcattaaagatgagcttgctgttaaaatgaaaagtatattaaaaattttaaaaaccaaaagaaaataaaaatttaaaaaattcaacttctaaattattctgtttaatcctataattgtattagccattcttagcagctgctactgttagatcgaaggttttccctgtcatttcaggcttagggtaaaaaaaaaaattaagtgctagtcgatctgaatattttggtgttgggattgggccataatcccaagtgttaaaatcctgaaatcctaaaaaccacaattctaaaagatcaaaatcttaaaaatataatcctggaaaaagtaattttaaaaaattatttgaaagatattactttacatttttaaaagggaatgtatttgagaaacatgtaaaaacatgacagcacttcataggccactttacacaataaaataggcaataataacatgcttttgcaagcataaacagttataaaaatgacagttacatgtgtaaaacaggagcagacaaactgtattcataaatcagaaagcaaaatgtgtaagtgcatgtcactatggttagtagttgtgtgccactctgctttataactgcgctcatctgaaataaccatgacagacaacctaagtcttgaggaaattgataaaaaacggcaatgggtcactacaacatatgcagtcacccaaagaactgagatcacaagaaattttatgtttcacagatgcagatgtacagaaaggacctttcttgtgtacatgcagtgtttacacacacagttaatgctgtgtgtaatgtacttttgcagagtcaaatttctgatgttcaaggccgcagaagaaaagtctgtccacctttcagagagagaccaatttgccttatgtatttgttctctcagagcccctggtcaattggatggtgcccgccaacactgagggcaggtcttccccacatagtctacttggactgactaatctttcctggaaacacccttacagacacatgcaaaataatgctttactgtgtgttgttacttaattatttaaaagaagtatagcactctagtacttttttttttttttttgagacagagtcttggctctgtcacccaggctggagtgcagtggcatggtcttgactcactacaactctacctctcaggttcaagcagttctcctgcctcagcctcccgcgtagctgggactacaggtgcgccaccacacccagctaatttttgtatttttagtagagacagggtttcaccacgttgaccaggctggtcacgaactcctgacctcaagtgatctgccggcctcggcctcccaaagtgctaggattacaggcatgaaccaccacatgcagcctagcctcataacaatcttatataaataagatctttacaaaagaaaacaagttagaaagctaactttaataattatcttacatgatcatttatagagtcttgtcagggctggaattagaaccgtgatctgttgacctctaatttagttttcttttcattctatggtcctgggagaaaatttgtctttataagtatttgacatatgagttggtgtgatagattacatttcctgttcctaatgcactttttctcattaaatgaagggaactcaaaaaataaaagctttaataagactgaatttcattctaggagaatggccaccagtccttactgagcagcgatgatcaactttttatttatgagacagctggagtgctgattgttaatagtgaatatccggcagaaaggaaacaagccttaatgaggaatctgttgactccactaatggagaagtttaaaattctgttagaaaagttgatgctggcacaagatgaagaaaggcaagcctctctagcagactgtcttaaccatgctgttggatttgcaag

SEQ ID NO: 9951 - DNA, 2300 bp, Homo sapien
aaacctcattacgaattcaatgagttaaacttgaaaagacttattacagtagctggcacataaagacttgatagtagtttatatggatgctatctcatattagcatatatggaattaatagtgtatcactatactttttttttcttttttttttttgaatagagatcagtctatcacccaggctggagtgcagtggtgacatcatagctcactgtaacttctcccatactctaccaatcctcctgcctcagcatccagactagctgtgattacaggtgtgcaccaccacacccagctacatttttttttggtagagacagggtctcactatgttacccagtctggtctcaaactcccggcctcaagcaatcctcccactggcctcacaatgttgggattacaggtataagccactgcacacggccttactatgctatcaattccatatatggaaaggtgttttccctttcagagctctttaaagctctgcagaagatttacatgtgtttatagagctaagagaaatcagggcatggaaattgagtgtgtaataaaaattaaactcttcatgttatataatcatgcataacttctatcttcattctctgaagttgcctagagcaccatcacagctaggaagcttccatcatgaattaccttatttccaaaagcaagtactcaaataattgtctcaagagaggaaggacaaaactgttacaagctgaaatatttggggatttgtttgacttgactagggaaccacaagttttcatataatgcctgatttagccctgtgcctaacagtttaaatcttaatgctaatgttaattgcttcccagttggttgaccttataagaaaacactgtgtggtattttaatgtggtaaacatgtgaatgaaggcctgtggctcagttaatcactcccacaactttgagctgtgagttttactggtggaaggaactttaacaggtcttcgctcttgtcattagatatcaaagaactgaaattagttggaattgtaagcagtgaatagatgtgttgttagaatgattccatcacttatacattgtttaaaatgctaataaagtaacttgctttgtaagaattcattagagtggacttttgttatctccattgtgcatttgataaaactgaggcttagagaggtaagagattagcttttaagtcagtaattggcagccgagacagcaaccctaggtctgttacattcaaaagcctctgagccactccgcatgacttcccattcattcgtgtttgctgctgctactctgggaaacaccatcttcctcttcccctccactcagaaatttagccctagattagcagcggtctctgctccctcatgttgagaaaggcctgttgtgctgtccgtgggcagaagggaccccttcagaaagctattccttattgggaatagcggcttgagattttgactgcacgaatattgcaggacctaattttagtatttaagttttagttcttaaattcttaagtttagagttagatactccaatacggccgttttccaaaataccgagagggaattaaatgaacatttttacattaagaatttaatgtatttctgggtgatgggaaaatgaaaaaaacaatgtaaagtctgaattactgcgagacgataatctggctccactgcagccaaagtgggcccttaaaacatagaatccatccctcccagctctgccggccgtctgtgcctgccccccacgtgtcccacgttctgcacacctgtaaatcttgggatgtaatcccttgctcagcgtcggtccgccctactgtcggccagcgctcggggaaggggcgggatttgcagttgcgggaatcccaattactgtgttcgctgctcagggctcctcattcccctttagagtaaagggcgagggcaacagtggacggggtgtctccagacatccccctcattaccgtggccgcggaagccgactcggcagttgccgccgcggctgtggtgactaccagacgggccataggcgtgcgcacgcgcacccgcaccggcgcgccggccgtcggtcacgtggcctccggccagggcttgcgaagccggaagtgtcctgagtctcgaggaggccgcgggagcccgccggcggtggcgcggcggagacccggctgggtaagtgagacggccgcgggctgaggggccaaggcggcgcggggcgcggtcggtcaggcctgcgccgcccggcggggagcgctcccgccccctgtgggaggctgggatgctgagtcagagcgggggcggggg

SEQ ID NO: 9952 - DNA, 2300 bp, Homo sapien
tagcttgtttcttaaactgtaagttttacaaaagtactttcattgctgtgccttctttcaagttacataatcacataaccacaaatggcatctaccaataaaccagccaggttttgctaagtgtactatcctgccatgttaaaatatcaaagcctaagtcttcattgttagcatggttatttgcctatgataaccctatgcagataatatggttactattaaccataataatggttaaagcacctggctccggaaaaataatcagtgtttgttttatgtaaacaaaaacacattacacccatgtgattaaaaaaaactacccatgtgataaaactgcatataaagttttggtcaatgatggaccatatatacaacactggttccgtaagattataatatcatatttttactgtaccttttctatgtttagacatgttcagatatacaaatactgtttctaattatgttacagctgcctgcagtattaagtacagtagcatgctgtacaggttcgtagcctaggagcagtaggctagctaccctatatagcctaggtgtgtagaaggctataccatgtagttttctgtaaatatactctgtgatgttcacacaatgatgcagtttttagaactattcccatcattaagcaatgcatgactgtacacatacatatacttgcatgtaaaactggggaaatttgagtaagttgggtgtatcaatgttaatagctggttgtgatgctttgctatatgcaggatgccaccattgggggaagctgggagaagaatatatggtgtctctcttcatcatttcttagaactgcatgtgaatctacagtgatgtcaatgttttgtaaaaagctcacccagtgtgattatcgttaataataacttaattgtacattttaaaatagctaaaaaaatataatttgattttctgtaacacaaaagataaatgcttgactggatggataccccattctccatggtgtgattattatgtattgcatgtctgtaacaaaacatctcatgtacctcataaatatattcatttcctatgtacacacaaaaattaaaaacaaaaaattttcaaaaggtgacacagtggaggcttgtagagccaaattacaatattgctgctgaaacatttcttttgatgtcattgatctattcatggggaagctgtcttttcccccgaagcatcattttgaaaatacctagttttattaatgtatttaacaaacatatagtcacataacaagtgctgttcttggttctttacatatttaagccatttaatcctcacaacaattctgtgaagtgggtactgttattatttccattttactgatgaggaaacagtgcagaggagttaagtcacttacggttttataggaagttagtggaagagctgagatttgaacccatgtatctgattcaagtcagtgctctaaaccgctctgctatgttggttctctatttgaaaatattaataatcttggccaggcacagtggctcacacctgtaatcccagcactttgggaggccgaggcaggtgtatcacttgaggccaggagttcgaaaccagcctggccagcatggcgtaaccctgtctctattaaaaatacaaaaatcagctgggtgtggtggtgcatgtttgtaatcccagctactcaggaggctgaggcacgagaatcgcttgaatccaggaggcggaggctgcagtgagtcaagatcgtgccactgcactccatcctgggcaacagagcgaaactctgtctcacatacacacacacacacacacacacacacacacacacacacagaggaaagaaaatattaagaatcctgtatattacacaggtatccaaacataaaaatactttagaattgcttactgtatggacaggttatatggaatggagtttgtagtatccacattaacaaagcaagtttatatggactggttatgatattagggatatgaattagaaatggatgttgttgcactcatttaaaatattttgcctctcactttatccccagttatagtgtccttttgaatttttctcacacagtgctactatatttcatgaactggtatataaacaaaccaaaattatttcttcaaatcaagaacttatctacgaagggcgacgcttagtcttagaacctggaaggctggcacaacatttccctaaaactactgaggaaaaccctatatttgtagtaagccgggaacctctgaataccataggattaatatatgaaaaaagtaagttgggatttttcttgtcgttc

SEQ ID NO: 9953 - DNA, 2300 bp, Homo sapien
ccgggttcaagcgattctcctgcctcagcctcccgagtagctggcgcacgctaccacgcccaactaatttttgtagttttagtagaggcggggtttcaccacgttggccaggctggtttccaactcctgacctcaagtgatccacccgcctctgcctcctcaggcgtgagccatcgcgcccggccaataaagcattttaatgcatttttcctcaaagtattcataaacttcaacttgttctaggtaaaattattttcccctttctacccacaataaaatgagtaatttaagcccttaacctacacattattcttaccttggaatatttaataagagctgcgctaatattatatctgaataatgaaataagagaaaccaaataagaaaaatttgtcataaagccctattctcctacattagattatgtgcatggcacacacacggatcagcttaagctgggtgaaactatatggagttagaattcctggcttcctatcattcagtagctgtgtggccgagaagaagactttaatgttgtaggacctttaaaatgggctgtaactcaaaggccctccttctggagttgttgtgaatcacgtggggtaatatatactagtttacaagatggatgtgtaagcccgaaggtggagcaggtttgcaagccttctttcagcctagggacagtaggatgactcatgagtcaattcttctctccttcccgtcatttcgggtccaactcttcctcctgtagtccacaaaagagcacggctgaccgataccaagcagagaacccagtagggtatgtgaccacgttcagatcaacagaacgcaaagcagaacggtccgagtactgcctcctacagccactttcctttctttaagcctcagctgctgctctaggtgtaaaaccggcataaaatagcactacgtaccttgcagagttgctcggaggattgaaggagataatgtaagagagtttggctagtttggctatgatggatggacattttctcttttctaacgtctctcttcccctcctaatgaaacctcttctgaagctcgctaactatagcagggcttgcagcttcaaaaaaacctttcagtcaagatcttgaaattagtattatttaaatcagtgcagtaacaccaaggtgtaaaagactgttacccactggtggctttaagaggattagctgactgaagagttttagaaaacatggaaactttttttgtacgtggatggatggaattccctgatctccttatccccaccacttaaaccatgccttgtgggtgaccgtggaaggctgattgtggcggggacatttacaaagcacatttaattgataagcactcgattgttctgtaactatagaactagttcacctttcagttgcactgagtgcgcctaagataacgatcttatttggaagtgagccctcgctagaaagaaggggaaaagggtaagaccgaagctcaaatgaatgaccagaaaggatgttttcattcgaataaactcaacccagtttttgacctccccacccatctctgccaacttgaaatcctcctggaggggcgagctgctggggttcaggactgggcgttgcggctgcaggaagccgtgggacctggggggtccctcggccgggcaacccccacccacccctacaggaccctggtgcgggggcgagcagggagtggacgcagagaaagttccccgctctgctcccgccctctccgaaactcgagccagcgaggctgggggcgggcggacggctcgcagaggaatttgcagtttccgggaggttgaggaagcgacccgagcacagccccagcagacgcagccctagcgcccggctttccgggttccgcgacgctgtcgggagaaacccgcgcgcctggaaggggcgggccgggctccccccacctgcgggcgggcggggagggtcgcggccgcgcggggtggggctcggccggtcgcccgtccggggcggggcccagggaggcggggtcgcgggcgcaccggggccgagccgcgcctggagcctggcggggaggcggcaggaggggccgggagagcctgattgagcggcggccgcagctgcataaggactgcccggggctgcgcgccgggaacctcgcggggctggcgggcgccgcaccccctccctggccgcctgcgccccggggaggccgcccgcgcgcgacgggaccggcagcatgagcagcggctacagcagcctggaggaggacgccgaggacttcttcttcaccgccaggacctccttcttcaggagagc

SEQ ID NO: 9954 - DNA, 2300 bp, Homo sapien
tacctcagcctcccaagtagctgggactacaggtgcttgccgccatgcccagctaatttttgtatttttaatagagacaaggccaccatgttggccaggctggtctcaaactcctgatctcaggtgatccgcccgcctcggcctcccaaagtgctgggattacaggtgtgagccaccgcgcccagccagtttccttagtttttaatctctgagaaggaaagataattgttacgtaaggatgtctcagttatctatgtgtggatgatccagggaaaatttctctttccagactggcttactctttggattttcctcaagcttctcggtctgcctgtgcgaaggggcctaaggctgggtgttaagtcccatagcatgagcaaaacctgtaatttagggttaaccagctttacttaactcccattaccccttttccttctcctcattcttagaattctcacgtgagtggtagtaagcccctaggatgtatgtatgctgctgtgtatgtgcttagccatttcctgtgtatttaatggtgaacctttggtgattcctcacatggaacccttttgcccttggtcacacttgtgaaagcacctccacatctttgcaatcagatcagcctaggccaggaagcaccttagaggaggtgattgactctagttccttgtttggtagagaatgagggaacaggctcagaaaggttaagcccaaggcacagggttagttggtgacagacccaggactggggcccaagtcttgcaggtgtggtgcactttctgcaacacccctttgccctgccaacttcccatcccacatccatgagattttaagtcccttattgtacactttttagtatatgctttgaagagtctttggacagttaaaactgaatgtacaagccaagactacctcattttcttcttcagctatgactggtacccagctaattgtggattggtaagagcaagacaatcagagatatgatacatgtttaaaacttcattggggctcagtgcagtggctcatacctgtaatctcagcactttaggagactaaggtgggaggactgcttgagcccaggagttcgagagcagcctgggcaacatagccagacgtcatctgtacaaaaaattagctaggcgcagtggtgcttgtctgtagtcccagctattcaggagactgaggtgggaggaatgtttgaactcaggaagtcaaggctgcagtgagccgtgatcacgcccctaaacactagcctgggtgataaagtgagaccctgtctcagacaaaacaaaacactttcttggaagtagtctctggagcttttgaaagtttattttaatccacagcttttcccccaccaaacactaataccaaaaataagattactttggggttttaccttggcaaataggatgctcccaagggactttgaagcctacccctgaagctagggaatgaacacattatcttgtgctggtatttatccagtattacccaatatactgacccattagacttcaccaggatggtgctgacattgaaaagtcacggagataggccgggcgccacgagataggtggctcacgcctgtaatcccagcactttgggaggccgaggcgggcggatcacaaggtcaggagatcgagaccatcctggctaatacggtgaaaccccgtctctactaaaaatacaattagccgggcgtggtggcgggcgcctgtagtcccagctactcgggaggctgaggcaggagaatggcgtgaacccaggaggcggaggttgcagtgagcccagatccggccactgcactccagcctgggtgacagagcaagactccgtctcaaaaaaaaaaaaaaaagaaaagtcaccgagataatttgtagtcagcacacccctcttagggtctaaagtcaaagatcttgaggcttcaatggatcaagagccttttcttactctacgtggtattgacgcaagttctgtagtagcccctcctgctgtatttacgacactagcttccagtgggcagatggaaaccagtgcctgcctggagactatccagctgtgagaatgatgtgatgtgtctggcagaaagaggcgtgtttacaaaggctttattttgcaggagtaaatcattggattttaactgttcttcctctctttgtgttgaatctgattatgcagcttttctgtaagtttttaaatgtttacccacaccagacctttggggactgattggatttagtgggagcaccctagaagacctggattaaagtggaacttggtctctcaactagttgggt

SEQ ID NO: 9955 - DNA, 2300 bp, Homo sapien
tctttactgctacctgtttcatcagtaaggtctttatgacatgcatcttgtatcttgtatctttatgacctcctatctcatcctgtgacttagaatgcataaccatctgggaatgcagcatagcaggcctcaggcttattttactcagccccttttcaagatggagttgctctggttcaatcgcctctgacagcagcatcctgaacaaagtgggcaactaattacacaatttctggcctcaaatagtttataatctaaccttgaaaaaaatagaaaagaaacaattttacaatttggggcttcgatacagatgaaataggttatttttttgtgcaagaaagtcttcctggaagtcttgaaacctgaatacagaaggattagttattctaaccagcttgaaaaattggcctaggccaaggctgtaaccaagtattctggttgtctaggaactgctctgaccacacttccggcataattgtttcttgcagaaaaactacttcagtttttttaaagcttcttttgccttctgtaggcttacttaaaaaaaaaaagtattaagatccttttgtggttcataagcctgatgattgggttttcatgctattgtgtgagttaccacccctacctcaaaccttgttaggactccgcgcattacccctctgtgtgaaaaaaacaaagtaataaaggtaatttttttttttttgcataagccctatccttgtacacatcaggtttcaacgtgtttccatcattatttttaccttatagtatagtgttttcacgagtttttttttttaatactttaagttctggaatagttttcacgagttttaagagactcttcttggcaaacagttcaactcagagaaaatacttttaccagcaaggaggtataccttgttatatcggtctggggatgtgacttgacagttcaccttgccaggaatatctctgtgattttttgtttgtttgtttgttttgagacaagagtctcgctctgtccctgaggccagagtgcagtggctcactgcaagctccgcctcccgggttcaagcgattctcatgcctcagcctcccgagtagctgggattacaggcgcctgccaccacgcccagctaatttttgtattttagtagagacggggtttccccacgttggccaggctggtctaaaactcctgacctcaggtgatccacccgcctcccaaagtgctgggattacaagcgtgagccaccgcgcccacggtgggcggtgagaggagaggggcaaagtctaattattccagagcgaccacagaaatatctggagctagtttcaagggctattccccgctaaagattacttaataatgcagttggatgaccacgtttcaagatttttgttcgatctgcacatcctccaacatgttccaagagggtgtttaaaaagtcaccaaggaccattaggataaccattaggataaagctgtcaggacatccctaaattgtttgaaactacgatgtctgctgaggaaagaagaacataattaggctttggagttaagagagctaaccagttccgaatttaatgtctgagccaaatgagaatgttaagatttatctcacaagttgtagagaaaattaaaaacgattaaacatccgggccttgaataagtgcccgtcgacttggggattaaatatggtagagtccactttcctcaccagctgatgataatttctgttatgtacagtcctcctttctcttcctttatcggttggttagtatttgccaactctttcctgcttttcatcttctcttccccccatttaaatctttccaccaagcgctcagaaacacgtacgtcctaccagaacgcaacccgagcctgcgcgagaggtacgtacaggtcttgaccttttcccggttctccgcccttttcccggttctccgcccttttctccggttctccgcccttttctccggttctccgcccttttctccggttctccgccccttttccgccactgcctgatgcctccctccaggctgcgccagtccgcagccccgcccacgccggccgtcacgtgaccgcgcagcgtgctccgccccctgtccctggctcacgtgatcgcgcctagggagaaaacgtctgactccagccaccggccttcaaggcacggctttttattccttcggctggtcggcctctcgcccttcagctacctgtgcgtccctccgtcccgtcccgtcccggggtcaccccggagcctgtccgctatgcggctcctgcctctagccccaggtcggctccggcggggcag

SEQ ID NO: 9956 - DNA, 2300 bp, Homo sapien
gccccctgaagtgctgggattacaggtgtgagccaccgtgcccagcccaaaatattgaaatattcagagaaagatgtttgttctatctgaaggcatctaggaatgaagagcctctggttgcctcttgtaggctttttctcatatttaatcatattttcatttaacttaaatgttctcttttcattatatcctactatgtttaaaattagggggacaggaagaactagcctttgccctcttcttcatggtaattccttatttttacttaaagcgttatttatgttagtgtttataaagaccatacccatttgtttctcagcataatcctgtatgctaggcataatttgagacttggagcacacttccttgcctaaaaatcactcagagagttggctgatccaaaagcagtcctttttaactcagggccaaatgcattttccatggtgaggtcaggtttgagaaccctgcatttgtttgttacagaccccaaaagttgactttgatctctagagtgcatttctacttttgagcatttattttcttctcttctgattctctttagtttctccatatccctttaaaaatgagtagatccaaaccccacagagaacctctaatggggggctagctaaggttaagttgagtggaaggctttgcctgcctactagatcatgctctagtgactaatcatatcaaatgtgaccaaaaaaaacctcctcccaaatcgtaatgatcatttatataaagacagtagacaattctggttcccaaatttgttttgacctatagaaaaactgctgttaaggggagggagagcattagaacaaatacctaatgcatgtggggcttaaaacctaggtgatgggttgatgggtgcagcaaaccaccatggcacatgtatacctgtaacaaacctgcatactctgcacatgtatcctggaacttaaagtaaaataaagtaaaaaaaaaaaaactgctgttgtgaatattagttttatgaatgtagaattattgtaatttatctgtgtaaaggaaatttattttctaccatatttgaaaaattgctgaggctctaagatgaaatattgtacctctaagacaaaatgtttttaggctattggaagactggatattcaaaacaaaatcagtattgccacattcatctacattacaaaatgtggtaaaattatttacttttagctcatcatttgtaaacatagatgagtactttaaagactttttttttttttttttctttgagacggagtttcgctcttgttgcccaggctggagtgcaatggcgcgatcttggctcactgcagcctcctcctctcgggttcaagcaattctgcctcagcttctggagtagctgggattacaggcatgtgccaccactcccagttaattttgtatttttagtagagatggggtttctccatgttggtcaggctggtctccaactcctgacctcaggtaatctgccctccttggcctcccaaagtgctgggattacaggtgtgagccaccacgcctggcctttaaagacttttttttttttttaattagctgttaggtttattattaatgtaacagactaaaaaagattcttttctagcaagcttaccatctgaacacttcagtggtacaaaatatacatgccagttttcaggcaatgaaaagtaaatttgcagccagagctagatatggtaaaagtaggagtttttgctccatgttacagataggcttaaggataaatttaccttacagtatctgtctcatggacagggcagataaatgagtgacttatttgatcggaatgtccgagctgaatgcatacatgtaatcttgagtgaaaacctagaattagttggtttaaatggatgttctatttatctttggactaatatcacactggaatttgtattcctctcaaggtattaatcgttattcttatttttctttactgatagacgctaatgaactgaagacgatccttcgagagctaaagtacagaattggcatccagtcggccaagttacttcggcatctgaagcagaaagataggcttctgcataaagtgcagaggaactgtgatattgtgactgcctgcttgcaggctgtgtcacagaagagaagtaagtactggaattgggttacttcttttgccacatgcaactagaatgttaggaaagctgagccaacagtctgtgtttgtgaatatattgagaagttttaaatgcaagcttataccctcagaactaagaacaaggaacaactcagacagtttcctatttttcagt

SEQ ID NO: 9957 - DNA, 2300 bp, Homo sapien
caccatcacccaggctggagtacagtggtgcgataatggctcattgcagccttgacctccctggcctcaggtgatcctcccacctcagcctcctgagtagctgggcctacaggtgtgtgccatcatgcccagctaatttttgtagctttttttttttttttgtagagatgggggtttgccatgttgtccaggctcagccattgtttttcaagttcaaattgtttcatctttggccaataggaaggagcctatttatgtgactcttgtgtctttttgacttgaccccattaattgtgaaacatttcctttctttttgagctcatcaaaatgtttcagggtcatcttgtactttttctgtcccaaacctggaatcagtcactcctcaaaggagccttagttcctttgagtggggaatggtttttagagaccataacctgggtgctgtgggtgttcattgctgctgagttgtccttacttctaaacctattcaatgaatgtatgtatttttttgaaaagaaaaaaaaatgagttcatactagtgtttcccatataaatatataattgtaatattttaaagaaaacttaattactttggttatacacatattttctattacactgaaaacatcttggctccatttgatgttagcatacttatttatttgctttatcctgtagtggatataagaatttaagaaatatgaatattattaataacaataatactactgaatgaaatgtaaggtttctttgcagttttatttgctctgggaatatgtacaactgttgatgtacagtcataatattgtgttctatgtcaacttaagagagaattatttttttctgtgttcttatgctataagtgggatagtccattaggttgatttgtttccattaattttcaattgttagggttttcttttacaatttaaaaataatttattcatttatagtcagggactaggtctgttgctcaggctagaatgcaggggtgcaatcatagctcactgcagctttgaactcctagtttcaagacatcctcctgccttgacttcccaaagtgctaggaatacaggtgtgagccaccgtgcccagactattttatgtattttcaaattttatttttatttttatgtctttttaagagatggggtctcgctatgttgcccaagctggcctcaaactcttggggctaagcaattttcccacctcagcctgccaagtagctgggactataggcatgctgttccatcatcctggttttttaaaaatttaatttgttaatattattaatatagtgttattccagagccaaaactacaggaggcacatcaagagaggactcagttttccattcttgtctcctccacgatgttccttctcctatacaagttttctaatttgtttttggtttatccatttagtgtttctttttataaatattagcaaacacaagtatctttatatcccccccccacaccctttctttcatccattttaatggtaaatagtctattggtgaatattgccgtttgagaatgacttttttttttttaaaccataatgatgggcaatagttcagaactactgaagtctggctggagagatgaggaacattactttttaatactgcttgaaaagagaacactttttttctggaagcccatttttctaaaagaaacaataatttttttttccttcattttctccgcgcctctctaatctgccaggaaataattcaacgcaattcgggctgaagcgtgtgcctcgccgcctgcggttgggtcatggccccttctgagactgctcggaagtgggagaggatgcttgcccttacgggtgttctgcccctgagactggcgccccttggtgctccctctgttccctcccagatcttgggagaagcacggacatctctgtttctgcttttggtccccgaacgcagttacgcgcccactggctccctgtctctggcgcttctgggcacgggggagctggggcggccccgcctgcgcacggcggtgccgggattgggggcgggcacgccgcctccgtctcccacgcgctcgctcgctcgctcgctcccgccctccccgcctcgagcgatctcctgcctcagccttgcaggctccgcactgcagatgcctgctggcttccctgcgctcggcggctcccgcggtgccccgtaagtccccgtgaccctccagcaccagccggctgtgcgctccctgctcccacgggccggtcagccgcagacactcacccagctccgcgagctcagccgctcagcgagtggggta

SEQ ID NO: 9958 - DNA, 2300 bp, Homo sapien
accatagcacatgaggtccatcgttgactgaaacgtggtgtggcacatgactgtattgtaatggtctcctaactggtctcactgccatccattttggaccctccccctgcccaccccacctctctgctgcttggctatacactgctgccagaatgatctttctaaaatgaaaaactaattgggccatccctctggtcaaaatctttcttcaatttctggagggtaaaagctaaaatccttatcttagcatgatttgacccatggttaattttccgtcttattttcccacagcttccccattcattacctcgtgcaacctatcctcaccagcaccataatatcaaccattggtggagctccttgagctcagcactatactagctcctttgtgctatctcacttattcctcccaagagctctgtgaagcttactggcactgtattacagatgatgaaggtgaagtgagcagttacatccttggccagttggaaggaggtggatgaattcccctatgtgatcaacagttttctgggaggaaacttcctgatacctcaacctaggaatctctctatccctggagagtccagaaatctatattaaaatgtgaaacaaagcaaaaaaacaaacaaacctcccttagtaatttttttttgtttttgagacagggtcttgctctgtcgcccaggctggagtgcagtagcgcaatctcagctcactgcaacctgctcactgcaacctatttagctggcaaataacatctggatctatctgacaccagagcctgagcttttcctttgctacactgtcttataactttgcccataactccaagttccctgaaggccccccactccgctaatgccctcatactgctgtgtattcataaatccttgcttcgagcaccctccttgcttcagtctgcctggcagatacctacctatccttttggtctcatcgcacacattaatgaggtaaaatccaatctatgccactatatgatttggggcaagttacttaacatctgagaccttcaatttccacatctgtacaatgagaataatttcaatctcatagggtttgttgtggacaattgccgtctttgctgcccagaatttactatgctttggcaacattgccttaattttgcttggggagccagccctcctccacctctgcccatgtacttccggtgacagtgatggccctggagggagcacagggcctgagctcagacactcagcactcttcctcctcctcaccatggtgtctgacccatggatgagccacaggaaaagaagctcaattcctaggctcttgttttgaactctcacgtaagcagactcactcatttctactggatttggtcctaagttgctaaagtttggggaaaattgggttacatatagcttatgtgattaactccataaatgaatatgcaacagaatttaacctggaaggaaaaagcccaggagttgttgctggcagctctcttgtaaccatgaggggagagcttgttggagaagagttaacactcagcaagcagagctgagaaacagagagaaagcaggctgctttcagggcctgtgagctctggatcaggccacgcccaaagccaatttgtctcagcttatttactatatcagctaacattccaattttggggtttagccagtttggtcagattttctaccactcatgttgaaaaactcttaactgaaacagaggtgttgtgaagattacagattataagggcaaaatggtggctgtatcagtgaacagtagtcaggattattttttactttccagtgactcaaacctctcctaaactgctctctcagttttggctccgtcttcccatgataataataggtggtgtagagaggtgacagagtcaaggaacatggttcttgttttctgaagatggttctttcctcaagccctttgagtcttctttggtcttatattctcatcacagaaggagaggtgattgtctttccccagttttgtctaccattccggttccatctgcattcccggaggagtcctgttgagggcagagtgactgtgagcaaaacaagaagagctgtgtcaccaagttccataaaatctgggagcccaagcagcatatttgtgggatttgtctgacagaacgcaatggaaacagagcgtggcattcgctccatctcccccaggtgagcggcagctttctcacggggggtcgggggcgggggggggggggggctctagggcatctctaatggcgtctgcggggaagcagcagggctgggtgagaaagtggg

SEQ ID NO: 9959 - DNA, 2300 bp, Homo sapien
gttgggaaacaggtaaatatttttattgtaaaggaagaatcactgtgaagctttggatgcaaatagacttaattatgatttatttatcagtatgaggtataagttactaagagaatgggctttgaaatcagagtgtctgggatttgaacccttactctcatttaccagctggatatccacagtcaacttactggactttttgagccctctttcctcgtcagtaaaataagaataatagtagtacctacttaagagttgtgaggattaagtaagcacttaaaataaaagtactttaaaaattaagacactgcaagttcaaatcagtcatagacttcttgtctaattccttttttccttttttttttttctattggttggttgtatagctgcaaatatttcctcattggaaatctatattctcagaacctaacactgatttaacttgatgcctgcacatgtccaccatctcttctgttgtttctgtttgtttttccctcttgaggcatctgctactctataaaggactgattgaaacaccacgcccagccccagacatttgatccttgaggcatttgtcacagcttcgggtactaaagaacaaacacaagtaaatgaaccttttatgagtccgaaggctaagttttttaattaaaaacaaaacaaaacaaaacccttttgcttccgttttctttgtgcatccgaggaattaggcaggaggcaaaaatcagttctttctgctgggccaggtggataggttatgctgcagcccactgccggccaagcatgcttctcacagacgaggccagagccttggttttgcccccacgcacctgtgaattcggcaacttttaaaaaattattttatttatttatttatatattttttgagacggagtctcgctctatcgcccaggctggagtgcagtgccacgatcttggcttaatgcaacctccgcctcccggttcaagtgattctcctgcctcagcctcccgggtagctaggactacaggcccccgccaccatgcccagctaatttttgcatttttagtagagacggggtttcaccacgctggccaagctggtctcgaactcctgacctcaggtgatccgcccgccttggcctcccaaagtgcagggattacaggcgtgagccatcgcgcccggccgaattcagcaacttttaaaaaatatcagcaaacgtgaagatatccacgatgttagaggagccctaccccggagggtcaggtacagctatcgtccagggcccagggcactcttccgggcactgccgggttatcagggagacagacgggaatccccaaatgctgggtgtcgggcaagtaccagctggacgccctgcgcctcgagccaaggccagcgcctgccatcggcaccatcggacagtcgagcctcgagttttaactgcttgggagcgcgcaaagtgccagcctatcgcagaacggagcgcatagggttggcggagagaggaatcctactggctgaaagggagacgaagggcaatttgcgccttcagtgagcgccggaggaggaacaggagtcatcacctcatcatcatcatcatcatcatcatcaccatcaccatcaccatcatcagcactcagtcaagcccagcgttgtctgctctccccatttccctcccccgaagcctcccttggcccgaggaggtggcgagtgatgtcccaggggtctctgagtgcccttctccgggtccgccagccctacacgcccacttcgcgggcgctccactgggcgcaccgcactgtgaatgcagcctcgggggtccctcgcggccccgcccccgggggggccccacagcgcccccaagtggcggccgcccaggcctcgcgggccccactcctcgctcgcacctcgctcgcgccagcccttcccgctcttctgttctcgctctatttgccccgctgactgctggcctcgccagctttgccagtcttacgtctctgccgcccccactcccgcccgcgccccatcttcttgcgcgactcgcgcccgctggtccccccctcctcctcccgcgtcctgcctgccccctcctcctgctctcgcaggctccttggcacccaggccgggaggcgacgcgcccagccgtctaaacgggaacagccctggctgagggagctgcagcgcagcagagtatctgacggcgccaggttgcgtaggtgcggcacgaggagttttcccggcagcgaggaggtcctgagcagcatggcccggaggagcgccttccctgccgccgcgctctggctctggagcatcctcc

SEQ ID NO: 9960 - DNA, 2300 bp, Homo sapien
ggaaagatgaattaacttgcccaaagtcacaggcagaaacataactggttcaacagtccttataggaggtcacttaaaggttcatgaaaatcagaggctgagccaacagagctctatgattcctatcagaggagccagtatggcataaagcaaatgttgaaccaagaatcaaagtaagagacagggctgggtccatatctagttttgtttaactccaaagctcacagcttaaccactctgctacatggagacacaagtccactaagtttataataattttagttcccacccagataattatggcaataaaatctgggtcatcatcatcatagccactatagtttactgttcaaaactctcttataagtgcataacagtcatagattcaggaacatttataaatcttaaagtctcaatgatagaggacaaggaagtgtcctccacagaaaagcttttttttttttttttttttttttttttgagacggagtctcgctcttgttgcccaggctggagtgcagtggcgcgatctcggctcattgcaacctctgccttccccgggatcaagcgattctcctgcctcagcctcccgagtagctgagattacaggcgcctgccaccacgcccggctaatttttttgtatttttagtagagacggggtttcaccatgttggccaggctggtctcaaactcctgacctcgtgatccgtcccctgacccccgccccccgccccgcctcccaaagtgctaggattacaggcgtgagccaccgcgcccggccgtatttatgcttttgactaacgtttttctgtacaggtgtatagggtaatgtaataggtaaaataactcattcaacaacaaaaaattattgtagtattttgtagctactaggattgaagtactaaagaattgtctgtctgccaaggtttggggaaatgggaaaatgggacaagatcttcaccacatggggcacatttcacctctctgggattcatttcctattctgtaaatggcagagttggggttccaggtcttgtccttgtttttttgactttgtgtgaaggtttctccacctcacctggcactagtcttatttcaaaatattcatctcatactatcctctctttgcaattctttaattcattcaacaaatatttattgagcttctactagtattgtgagtaacagaagcaaggttcctccacacatggagcttattatagtccaaaaggataggacaataaataattttgaaagtaaacaaatatttattaataactgataaataactattggttggaaaggtgctaagaaggaaataaataggatcatgtgttatgtctctgagagtcttagaatgaagcagacaagctctttcactttcaagtgctgacgtagtaaagtcattaggtttcaaaaaaggaaaaaaagataatatcttacaattaactaatgaatgaacagccattacgctagaagaaaattgtattgtgattggtgtactccgtatcttctcagaatgagagaggtgaggcttctcaaaaagagcagcgagagaaagtcacttaaaaattttttttttttggtaggtcaagctaaagacgaactgaaaatagacaacctgaagtcagacgggaaagctgccaatctagtctggccagcagaatttctttcagtaggtctaggctccctcggcattgggaatccagatgtaaagaaaacttacgccataaacttcaaggtagatttcagttattactgcccggtggcaggaacctaggaaggtgaggtcaaggtgtggtttagtaagagacagctcccgggaacggcacttggaagggcagggcggagaacagctggagatgagatagagagcagggggagaatgcgccgacacctcaaggtgagagagtagaaacagtctccgccgtgggagccgcgcgctgctcaggtggctctttcccgctcaggtgagctcctcccgcgcctcccattggccgagatgcccgcggcgctgggagggcgacgcagcgcggtctagttcagggtctagggcggcgcgtcacttccggtagcgcggagcttgtaaaacaccctggagagaaaatggcggcggcagcagcttcggcgcctcagcagctctcggatgaggagcttttctctcagctccgccgttacggcctgtctcccggaccagtgacggagagcacccgcccggtctacctcaagaagctgaagaagcttcgagaggaagagcagcaacagcaccggtcagggggccgcggcaacaagacgcggaa

SEQ ID NO: 9961 - DNA, 2300 bp, Homo sapien
tgctaagaaggaaataaataggatcatgtgttatgtctctgagagtcttagaatgaagcagacaagctctttcactttcaagtgctgacgtagtaaagtcattaggtttcaaaaaaggaaaaaaagataatatcttacaattaactaatgaatgaacagccattacgctagaagaaaattgtattgtgattggtgtactccgtatcttctcagaatgagagaggtgaggcttctcaaaaagagcagcgagagaaagtcacttaaaaattttttttttttggtaggtcaagctaaagacgaactgaaaatagacaacctgaagtcagacgggaaagctgccaatctagtctggccagcagaatttctttcagtaggtctaggctccctcggcattgggaatccagatgtaaagaaaacttacgccataaacttcaaggtagatttcagttattactgcccggtggcaggaacctaggaaggtgaggtcaaggtgtggtttagtaagagacagctcccgggaacggcacttggaagggcagggcggagaacagctggagatgagatagagagcagggggagaatgcgccgacacctcaaggtgagagagtagaaacagtctccgccgtgggagccgcgcgctgctcaggtggctctttcccgctcaggtgagctcctcccgcgcctcccattggccgagatgcccgcggcgctgggagggcgacgcagcgcggtctagttcagggtctagggcggcgcgtcacttccggtagcgcggagcttgtaaaacaccctggagagaaaatggcggcggcagcagcttcggcgcctcagcagctctcggatgaggagcttttctctcagctccgccgttacggcctgtctcccggaccagtgacggagagcacccgcccggtctacctcaagaagctgaagaagcttcgagaggaagagcagcaacagcaccggtcagggggccgcggcaacaagacgcggaacagtaataacaataacacggcagccgccacggtcgcagccgcgggaccagcggcggcggcggccgcggggatgggggtccggccggtctcgggcgacctctcctacttacggactcctgggggcctgtgccgaatctcggcctctggcccagagagcctcctgggagggcccgggggcgcctccgccgcccccgcggctggcagcaaagtgctgctgggcttcagctcggacgagtcggacgtggaggccagtccccgggaccaggccggcggcggcgggaggaaagaccgggcttcgctccagtaccgcgggctcaaagcgccgccggcgcccctggccgccagcgaggtgactaacagcaactctgcagagcgaaggaagccccactcgtggtggggggccaggaggccggcgggccccgagctgcagaccccgccggggaaagatggagcagtggaggacgaggaaggggagggagaggacggtgaggagagggacccggagaccgaggagccgctctgggcgagccggaccgtgaatggcagccggcttgtcccctacagctgccgggaaaactattcggactcagaggaagaggacgacgacgacgtggcctccagcagacaggtattaaaggacgactccctttcccggcatcggcccagacgaacccatagtaagcctctccccccgctgactgctaaatcggccggcggcaggctggagacttcagttcagggagggggaggactcgcgatgaatgacagggcggcggctgccgggagtctagacaggagccgaaacctcgaagaggcggcggccgcggagcagggaggagggtgtgatcaagtggactccagccccgttcctagataccgtgttaacgctaagaaactgacccctctcctgcccccgccacttactgacatggactcaaccttggattcgtcaacaggctcccttctgaaaaccaataatcatattggcggtggggccttcagtgtggactcccccaggatttattctaacagtctccctcccagtgcggcggtggccgcctctagttcactcaggatcaatcacgccaatcatacgggctccaatcatacctacctgaaaaacacatacaacaaaccgaagctttccgaacccgaagaggaacttctccagcaatttaaacgggaggaggtgtccccaacagggagtttcagtgcccactacttgtcgatgtttctcttaactgctgcctgcttatttttcctaatactgggactgacttacctaggaatgagagggacaggagt

SEQ ID NO: 9962 - DNA, 2300 bp, Homo sapien
cagtctccttagctgtaaaatagggataaaaataatctcagagatatttgtaagaattaaatgagatatcagttataaaaaacatctagcacagtgtctggcacttatcatgcacttagtaactttagttcttttctgccactcttagcatatttattcaagcctttagaatagtggttggcattgctgacagtgatgtcagctatgttgatacaatgaactctctatttttactaacatgaattgggttgtaatgatattgcattttttataattctatatttttgtatgtaaggttcttcactaaaatattttaaatataggcataattattgcaatcctttgaaacatgctttacacttagggagcttctaaattcctttctacaaatggctgtgcccattttatttttgtttttaaacaaacatttggactatgggcaaagaactttgcaaagtgttgtgggggaagtagaaaaacagacacttatgtaacacaaggctataaaaaaagaggaaacggagggaatactgaagagcttcttcagtatttccaactacctaggttctaggtacctaattaaatagtcatgttatgtgtcatttaaatcctttattcattgcattacaatttattcaccattactttatctgggtcatctacccttagtcccattataattgccaatgcattaagggtgacatttgcccatttgctatatgtaattcacaggatgtggtgtttttcagtaccagatgttttgaggggagccacttgcaatggactgttttttggtgtatgtgttttaatagtttgccagaactgagtttgatttgaaacaacgttcttgattttcaaatacagcattttcaaacaaatagtgtgatgtacaaattaccatcactttagttcacgttgaaataatccacactctaaatctgtttgacatttaccccttaagtattttggatcaataaatcatttctgtatcatctagcatcttaaaatgttcgtaagtaactacttaataccctacatatccaggtcctgtcccattagtttgagggaaaaaatatattatagtaattaagacataattatgttgtcttgaaaagctaagggtcatttggacttgattacccaaggagttatcagtgccaaggaaaattaggcaactacaggcttgggcctgtaattaaacatctaggactgacattttgttcatcagaggtggcaccttctgaatgaattacaccatttcattttagacaagctacggtacatacaaaacaagtgtgtggagggggttggggggtggacatgaatagagattggaggtggagagaaagaccggtgtaaacttaagcattttgttgtgaaaaactactgttcagccagcctgcctgggctccatatatggtgttcaaatataagtttgggacgagcacctttgcaattttggccaagaacacacacacactcaccctcctctgctagagagggcccgctcacctggaacgcaggcggctggttctccgtattacagtgagtgctcgttctgtatgtataggatggccaagtaactaactggcagccctgctcctgcctcactctcccacaactttttatcccctcaccaccaacgctctcaacaacccctgacacgtcttcccacaggtccctggctcgctgtccggtctcttcgtgttggtttgtccgtttcccactccttcagcggtctcaggtggaacacgccaggtgggcgcttggctgtgttctggggtcccgagttggaaagggatgcccccaggcagaaggcggccggcagccctggggcagaggaggacgagggggaggagaggagcaggagggcagggcagagaaggaggaggaggaggacggtgcagaggaggaggaggaggaggaagaggacagggcagaggaggagggagttggcggccgccgagccccgggcagcgggccccgtccgcggccggcgcgctccgtggtcctccctcgctcgtctcctatgctcatatttggactcggctgcccgtgcccaggaatttcccgtcatgcctcccgccgccccgtccgtcgcccggagccggggagggagggagcgaggttcggacaccggcggcggctgcctggcctttccatgagcccgcggcggaccctcccgcgccccctctcgctctgcctctccctctgcctctgcctctgcctggccgcggctctgggaagtgcgcagtccggtaagttcgggctcccctcccctctcctcctcgcctcacccc

SEQ ID NO: 9963 - DNA, 2300 bp, Homo sapien
caagtctatttttgaagttttacactgggctatttcgagtcaaactatatgaatgaaaagtgctgttcctgccttatttggtttagggctaatagctatcggaagtggcagttatgaagtcgttacagtaagactttataagataatcttcttgaatcatgtgggaactgttggggggaatttaatatcagattattattttaaaaagcagttattttaaagtacaaaggtagggataaaggtaaatgtgaaattgcatggacttttacgtttgtgatgagtagtcgtcaaagcttcttgcttcttaattttatcgggaatggaagaatataaattataattccttagagctgagatttcttaggagattttagtttgcttttgttttttctaccaatagactaaattgtcaaataagatatggcaaactaggactcataaattagttgaaacatgactctatgaagcatagattatattcagtactctctggtttatctcttcatattttcatttgcagcgctggtggcaagatcgattttcaaaaacaattttgtctataaaaaaacttcagggttcatataacttataaaattgtcagttcagattaatggcagatatttacaatatttaactttattcaatttgcaatttgtaaatagtaacttgagcagtgatatcagtttcatgtttctttctgcatagtattgtttttcaaaaaaaccctgttttttatagattcatattttggaagtaactttaatagcacttcttgggaaatacaacaggttctaatttcacatttttcaatggatttctaaaaaatactgtgctggatagtgaagagtggattttattgccaggaaacatatgtatgctttctttttcctcagtgatgtgttgacttacctaatacttgtggtgaaacggccttcgaagaccagaatccactgtactggccccttgccagtaattttgaacatcaagtttatatttggaccatttaaacatatattcttttaattccggtcccagctgatatatcagtctaatttctgatgacttttattagggccctatatgaatatctggaaatttttatattaagataagtagctctttgctacttatctagaattttgtcacagtgcttaaactgcttgtatggcaaggttgcagcatacaatgtaatttagattttgaatcaacacactgctttttgtttttaaaagtgcttgttctaatattttaactaagatgttaatccattaagtcagaaatccttgctattttgctcaactcaaaagaatatccaaagactatcccaacagtaaggttcatcagtttttctaatacatatgccatttaataattaaaaatagattttaaggccacgtgtggtggctcatgcctgtaatgcaacactttgggaggccagtgtgggaggattgcttgaacccaggagttcgagaccggcctggtcaacatagggataccctgtctctacaaaaattaaaaaaaaattagctgggcatagtggctcactcctgtggtctcagctacttgggaagccaaagtgggaggattgcttgggccagggagatcgaggctgtggtaagccgtgatcacaccactgcatttttggttctgtcataatctggtcacaatccctctaatttatctgcacctgtataattaatttatcatagttatggatttggttgatgaatttgattcccatgtttagcttctcggtaaaattattaagttggacagtttccatgtctcttctaactccaagatcctataatgttgtttttgtttatgtaactcttcagagccacctactacatgtggttcaaacttctgattgtcagcctgtgacttgctatacatgtcaaactggcctaccttagccagatgtgatgggtgtggtccagtgttggagagtccggatctgtctcaggattgtgttaatacctggaacatgcacaaagatacatacatacctggacagattccgtgttaagcttctatcactttttcttcctcatctaatagcagaaagtgctgattatgtcatagggtaaatgcctaactggtttttggggatagttaagcccaggccttaagacagtttgatattcagttttgttatttaggtctgggttagggataccgccagagagcatccaaacatttctgtggttgggaaggctagttatctgtgagcattccagatgaaatagcctataatgggttatcaccttttgatcttacctcagagaagattgaattgg

SEQ ID NO: 9964 - DNA, 2300 bp, Homo sapien
cctgaagatccttccccctttacttccaacatcactgatctatccttttctagttcttcttcaatggctacttctttgagacaatttgaaatcatagcttctcatgggaaacactcccctgaatctgaacttttttaatgggtccaaggtgtcttgcagataatccttaaataatgggagagggcccagtgggcatgccttacaaaatgatagtaataataataatgataataataatgggagaaggacttagggtctttctggctaaggttgctactttgaagtcactatttctgcttctttggtgcagataaagaagcagttggccttgtcagtgtttcagtgctccatgtcatggagcttctctccatattgggttgtggccacagtcaaataacacctgccttgggaaggtagtattggcaagttgtaccatatatagtactttgtacataacaaaatacattttgccttctgtcttcctgcctgcattgagcccaattctgcatttttgattcttatagattttagattgaccctactttcatggatgaaattaattagtctcttttctttcttcctttttttcccctttagttgcaaactatagaaaccatttgggctggtttgagcataaaaggaaattactgggagttattaggtgctcggtgattcattgggaggtctggcaaaaaagaagctcaaggctaagctcataggaacacagcccggcatctcacacagaagtggcttgatgaggattctactgcctccacagctcctgccatcatcttcatctgcaccatagatgctcagaacccagtctgtgtctgcatgttgctgacttccaaatgagagcttcatgagagtgtatttggttggtagaacataggtcccagaccttctccctgggagctggaagagatgctgggaaattctgccctggaaaaataaaactcacaatgtgggaaacaaagaaaatgtacagcaggggtttaacagaatgacaggtatctgctaaagaaaatattgattttttttaaaaaaaaaaaagacaattttccctttagagccccagaaagattcaggccttagaggcactaagtactatagaaaatgaggctgaagcatggggctgaaacttggtttggttgaaggtctctggaaggcagagcagtttaacctctaggttccctcatccacccccatacagccagacaattatccctccacccttctgttctcctcccctcttcccttagaaaacttgaagtttattctctagagaagttccaggctcagtgacaccaggccaaggtgctggactgaaaacaattagattaagttaaaatctgcttgataagtgtacaagtaatctattttcaaaacctaagagatgttgtcagctatctctaactatatgccagcagtaggccttctaggaaactgtactatgattccaggaaactcgattgtgggctggggaaggacaataaagtggattgtatgatcatctgcttctgttactggaaagggatcctgatccagaccccaagagagggttcttggatcttgtgcaagaaagaattcaggagtccataaagtgaaagcaagtttatcagagaagtaaagaaacaaaaggatggctaccccatagacagagagccctgagggctgctggttggacatttttatggttatttcttgatcatatgctaaacaaggggtagattattcataagttttctgggaaaggggaggttcccaaaactgagggttcctcccctttttagaccatataaggtaacttgggtgttgccatggcatttgtaaactgtcatggcactgctgagagtgtctattagcctgctaatgcattataattaacgtacaatgagcagtgaggatgaccagaggtcactttcatcaccatcttggttttggccggcttctttatggcatcctgttttatcaccagggtctttatgacccgtatcttgtgatatcaatcctgccgacctcctatctcatcctgtggctaagaatgtctaacctcctgggaatgctgcccagcaggtctcattctcattttaccgagcccctactcaagatggagtcgctctggtttgaacgcctctgacacttccactctcaaggaatggtgtttttattctcttctccccagaatgtacttctggtctgtcccgctgttccattccacagcattttaggaggttctcaagagtgtcctaaacaagcagagaagaatggtgagacttacccattcctagtttaagaaa

SEQ ID NO: 9965 - DNA, 2300 bp, Homo sapien
tcctggacaagaaaataaagagatattattgggacagttggaaaaacttgagagtgttctgttaattagatagcagtgttatatcaatgttgatttcttaatttggagggttgtaaggtggttatgtaggagaatgtatttgttttggagaaatatacactggaggaattgggagtgattaatcatcaggtctgcaattactgcttaaatggtttataacagaataatgtaaattttgagagagagagagagagatggaggaaaggggtaaaatgttaataattgggaactttgggtaaggagatatgggagtttttgtacatatcttgccaattttctttaaatttcatttaaaaataaatgattgacttctacttgtagccaagatggaataacagggatcagattcagctctctgactcaaacaactgcaaaggtagctacagtgtgtaggacagagtagttgggatacaggagtgagtaactctggagatcctcagaggattccctttgagtattcagcagagtgctgattaaaacatgtatgtgagaaaatggtccaacgctggagaaactattagataaaaaatattcagcagttaaaaggctgggaatggggtctgttcccaatagccagactgaaaaatcttgtaatttatggagcattgggtagagtagttagaaaggtcctgtctcagtactagggaataaattaccagactaaatgctgccatggtccagccaaacaaatcttaaaaagcaagactcaaaaggatcaaaatgtttccaaggaacttaactatatcccagaacaaagctcaagaatatttataggtacacaaaaatatccaggacccaacaaggtaatattcacagtgtctggcaaccaataaaagagtgccagacattctaagaagcagaaaaaataagacccataatgaagagaataatcaatcaattgaaatctacccagaactgacacagatgttagcattattaaacacagacatttgaaaagttaatttaacagtattccaaaagctaaaaaaaatatagagtatgttataaaaatacaaaaaaaatcaaacagcgagagctaaaaactataatgtctgagatgaaaaatacactagatgggatttatagcagttaaaacattacagaataaaagattagcaaacttgaaaacatcaatagaagctactcaagacaaaacacaaagaggaaataaaaatattttaaaataattataagagcttcagtagttgtgagacaaattttatcaggctaatatgtaatgagatactcattaatgtacatgtaatatacattacactacatcatacattacataatatacattacatcattaatatacatgtaataatatacatgtaagacagtagggagaaggcaaaaaaattgacattatatagctggaaatttccaaatttgatgatatctataaacccacagatccaacaaccccaaagaactctaattacaagaaacataaagaaaattacaccaaggaatataataatcaaatttctccaaagcaatgataaatagaaaatcttaaaagtagccagagaaagaacatgtattacataagaggaacaaagatatgacagccagcaaattcctcatctgaaactatgcaagcgaaagacagtggatcaacatatttagaaggaaaaataactatcatctatattcagtgaaataaaaactctttcagtcatacaaaagctgaaataattgatcaccaatagcacctcaatacaagaaatgttaaaagaagcccttcaagtagaagaaaaatggtaccagatgaaaatctgaatctacttaaaaaaacaaggagaaccataaatgggaactatggaaaactatacttgatttatgttcttaaatttaaattcttaaaaagatatttgattatttaaacaaaattatagcaatgtgctgtgaagtctatgacataaaaaagatacaaagtgtcaaagtgcacaaaagaagaactagaaaacttgattagctttatacttattaaaaattgaacttataattccttaatataaaaaatttcggccgggcgcggtggctcacgcctgtaatcccagcactttgggaggctgaggcgagcggatcacgaggtcaggagatcgagaccatcccggctaaaacggtgaaaccccgtctctactaaaaatacaaaaaattagccgggcgtagtagcgggcgcctgtagtcccagctacttgggaggctgaggcaggagaatggcgtgaacccgg

SEQ ID NO: 9966 - DNA, 2300 bp, Homo sapien
atgacctcccaccgtgtccctcccaccatacgtagggattatgggaactacaattcaagatgagttttgggtggagacagagccaaaccatagcagcatgtataccaccaaaatagaaaagacactacctagtatgtgataacatagtgctaagacaccttgaattctaagatacatcccaaattccaagatgttaaagatgaaaatacaatatatcttaatagttttcatacatatgtactatatatctaagacagaaattttacatgtgatattctcaatcctagtctacttattttttaaatgatgttatgggtttgctaaattaattttaccacccactaatgggctgacctgatctaaacactaatctacatcatgtgtcacagataattaaaaaccttgttaacatatacaaccaaggtgctaattgcttaattctatggtgggtgcagaagaagaaaagacacaattgaatatggacagaaactacctggaaagttttcaaattggaaagaagaattgagccttgaatacatgggtaaaatatggtgtgataaagaagaggcagtgaatggttgagaaacataaactgggggaaaaaccctcagatgtaaatgtaaaaaaaaaattcctttccttaaaaataaaatctaaccatttaacattattttaaaaatatatgagaatcctttttgaatagtaaaagtctcaataatttcaaagattacaacaaattttaatgtttcacctacagaaagtatacagaattctgaaaaattaaatacagcttccaaagaatgaaaatatataaaattgatttaagtagaacttgatacaatatttgttttatacccttgttataaattcaaaaggggtcaaatagtctaatagcaaaatgatagcagcctgaaaacaagtggctgtatattcccccacccccaatttttctgtgcttctcttatattcaaagattaacgcaaaaacaaaattttggaatctgctctttgctgacctctgtacacgttaccaaaaaaaaaaaaatcctaggatataatgaggtatacagcacaaaactggctggctgaactcctcagtgactcccctgcattcaccttcagaatttctctctactcctggcaaaaagtgagcaaacaacacaaacccaaaaacctattttgtacgtgtatgtgaaatgtgcacaccacagtgcaaatatgtgatagtttttaaatgtgcacgattggcagttaggaaatgtcactgtaatcgttaggtgaaacttcaatccctttgatgaagataccatctttgagccaagccctgacagaaaacctttggttcctgttagacccctccctccccagtcagctgctgggctccatccggagggatggaggctctctctctccattacagctaagcgttcccagacccagcagaaaccctgggttcctgcagagcactcaacgtgcagcaaagtgtcccagctctgcaaagggcagctggaaatggatttaaaatggcaacgcggaccaatcagcgctgccgcgccaaagcagacatttacacgcgcctcctccacatgcacagcggaacctggcggtgcctaactcctgcttagggctgcaaagtaggcgtttttattccacggtggtctgtatctttgaaaaaaataaattcttccccaggtgaaagtttttattttggaattagtccaaaataattttgggtgtgatgtgtgaaaatctgaacctaattttttcagagttttgtgttattcaaggatgaaaagaggtacatttaaaaatgtactccaccttttaaaaacggactgtggccattatggtgttcacataactcagaacagcccaggccataaaattaggacttggcagaaagagagttctcaggcagaaggttaaatcgaggtaaactgaagggagagttgggcagtgagtgcaattgtggtgttaggaatctacaaggtgccctttaccctgggaacatcggattcccggggagggggatggggagggaacttcggttgcctctagtctttcctggagaaaaaagttcaatgaagaagctggggcgctctgtgtgtgcacattgtttgcatgtgtctgcgaatgtgcatgtctatctgcgtgcctgtgtgtatgtgtgtgtgtgtaaatgcgggtgtttaccagcgcatgaatgcccccgtgtccacgtgtatctgcgtgcatgtgcttacacgcgtgttcgtgtgtatctgcatgcatgtctccgtgtatgtgcgcgctcgcccgccc

SEQ ID NO: 9967 - DNA, 2300 bp, Homo sapien
ggacagaaactacctggaaagttttcaaattggaaagaagaattgagccttgaatacatgggtaaaatatggtgtgataaagaagaggcagtgaatggttgagaaacataaactgggggaaaaaccctcagatgtaaatgtaaaaaaaaaattcctttccttaaaaataaaatctaaccatttaacattattttaaaaatatatgagaatcctttttgaatagtaaaagtctcaataatttcaaagattacaacaaattttaatgtttcacctacagaaagtatacagaattctgaaaaattaaatacagcttccaaagaatgaaaatatataaaattgatttaagtagaacttgatacaatatttgttttatacccttgttataaattcaaaaggggtcaaatagtctaatagcaaaatgatagcagcctgaaaacaagtggctgtatattcccccacccccaatttttctgtgcttctcttatattcaaagattaacgcaaaaacaaaattttggaatctgctctttgctgacctctgtacacgttaccaaaaaaaaaaaaatcctaggatataatgaggtatacagcacaaaactggctggctgaactcctcagtgactcccctgcattcaccttcagaatttctctctactcctggcaaaaagtgagcaaacaacacaaacccaaaaacctattttgtacgtgtatgtgaaatgtgcacaccacagtgcaaatatgtgatagtttttaaatgtgcacgattggcagttaggaaatgtcactgtaatcgttaggtgaaacttcaatccctttgatgaagataccatctttgagccaagccctgacagaaaacctttggttcctgttagacccctccctccccagtcagctgctgggctccatccggagggatggaggctctctctctccattacagctaagcgttcccagacccagcagaaaccctgggttcctgcagagcactcaacgtgcagcaaagtgtcccagctctgcaaagggcagctggaaatggatttaaaatggcaacgcggaccaatcagcgctgccgcgccaaagcagacatttacacgcgcctcctccacatgcacagcggaacctggcggtgcctaactcctgcttagggctgcaaagtaggcgtttttattccacggtggtctgtatctttgaaaaaaataaattcttccccaggtgaaagtttttattttggaattagtccaaaataattttgggtgtgatgtgtgaaaatctgaacctaattttttcagagttttgtgttattcaaggatgaaaagaggtacatttaaaaatgtactccaccttttaaaaacggactgtggccattatggtgttcacataactcagaacagcccaggccataaaattaggacttggcagaaagagagttctcaggcagaaggttaaatcgaggtaaactgaagggagagttgggcagtgagtgcaattgtggtgttaggaatctacaaggtgccctttaccctgggaacatcggattcccggggagggggatggggagggaacttcggttgcctctagtctttcctggagaaaaaagttcaatgaagaagctggggcgctctgtgtgtgcacattgtttgcatgtgtctgcgaatgtgcatgtctatctgcgtgcctgtgtgtatgtgtgtgtgtgtaaatgcgggtgtttaccagcgcatgaatgcccccgtgtccacgtgtatctgcgtgcatgtgcttacacgcgtgttcgtgtgtatctgcatgcatgtctccgtgtatgtgcgcgctcgcccgcccgcaggctctgtggtgagggcattccgaggcggagtacggctgtcaggggacctctcccactccactgcagtcccttcccactcacagtgaaccggtgcgctgcctgaggtgcagcctagacgcttcctgcaaagtgttggctcggcacggtagaggcgcaggtaaaggccaagccccgaaacgtggctccgggacagtcacgttcccgcgccttcccaggacaactgcccaggggtgacctcgagaggcgggtggagctaggcccacggcgagccagcccgggatccccggcctgtccctttaaccccgccgccgggcgggagcacgtgagcggggctccgggtggcacccgggcgccgccgccgccgaggcagttgtatttcgaacgctgcctctggctagcagccaggcgccttggctcggcggtccgcctggcctccctcctcctcatacttttcttcctgcgcaaccccctcccct

SEQ ID NO: 9968 - DNA, 2300 bp, Homo sapien
ctttctaacaaatactgtacatggagtacccaaaaccggtgaaaaggtatatccaaatttagttctgatttttgaaactttgttctcaattactacacaaacctacaaatacaacgcagaaacttttttttccaatttatttataaagtcaaaaaagtgactggtacttctctatacatgcattaaccctgacatagttcctctttgctagcttaaacacagccaacctgaagttatcttaaactgcaagtttaaacttattaagataaacactgaatattacacttaactgggttccattctgcccaaaaagagatattaaatgagccaaatacttgttttaaaaagtctcattgtccaattcagacatttctatgtcacttgatgaaaaggcattttgagattatgatatactatactgcaggtttattgtaaaacaaacagtatactttattatcacaattaaagctgcaaaattcatggaatttttccactatcccacaactagatttacttctaattatcgtctatttggcaaagtactttaatagggggatttggtttgcagtagccatgtaataagcacaaagtaaatcaatctttatcatttttcagaggaaattgcaaaaactttaccaccaggcaaaatctatagttttgatttgtttttaactatttacaactggtgcaaatattaattgtgtcattttcatcccgccccccccgcaaccccttccttcctcacttctacccgttttaaggttcaaattatttggtggctgtttgtttaaaaacaacactgttaagtatcttcataaactttttatgctgagcatctgcttacaaaaaaggttaactcgcatctaactaatgttaaatgtaagaaatgagtcttgtgttacccagttgggacaaattcctggctgcggagttagaatgggaaagttacaggcaggctcctgtagtcagtcattgatgaagttaggagagcttgacttgagaaatctcaccttttgagctgctttagagggactcttgtttttgctgcctttgggtcttcccctgggtctcttaggagagggctcaccggttggttcctaattgtgagggaaaaaaaaatgctgttgtggcaagaatgtctgaaagaaattgaccctgactctttagctatattttctgcatgtgctgctcaaaagagctgttggaacacgttcagttcaagcataaatggatgatgatggtacagagtttacagaaaggggaaataactatacttttaatgcaagggttcaaagaggaaactctattttgtatatgaaaactagattctacttcaaacctaaaatggtaacaaagactgaagaggcatgttctagaaagaaagtcatatacttttaaggtgtaaagtttacagggctatgcatttggcaactcataggaataataggcattttaaacgaacaccactctgcattatactagcatttcaaacaacagaaatacgaagctaccatcacagatatttcaacaatcttccatattgaaaaggtggcctttaatcatctttgtatacctgccttctaggtggattatgattcaactgacacattttgagtgaaatactggagcaattattcaagttcttcagttcaaaataactccattccccctaaaatttccaaataattatagtaaatctatggtgggaggttttgcttgaatcatctagttaattgcttcaattctccacttccttttggagatgcaggcatggcctccagtctaaatttaaatatcttttgataaaaataaacatattttcttcaaaactttcttttgagaaaactcttatgggggtggagtggagaaaactaaaaggaggtaaaagcgaggaggaatggagtgtctgggaatgagaaatggaagcaatcacttggtttagcaaaactttaaatggctcctatgccaagtagtaaatactcaagtggttaagagaatgcgatgattaatattccagatcccaaatatttatccagtgaatcatctattcacatttcattcagattcggtgattaagtgagactaattaacttaaaacccatgaacgtcctcaatgaaaattcgcatcccatttagagaattcgggaaggttccctgcaagcttctgtgggaccactagcaccagtgggcacatcgagagcaaacacatcggagacaaatttttctttctttgtgaactctgccttaactcaaaggtaaagtatccaatcacctccagaccccattgtaatttcttttgg

SEQ ID NO: 9969 - DNA, 2300 bp, Homo sapien
caaaactgttagtacagcccttgatttgcaggtgaaaaaaaagcagtgcatagacattaacctaaattcaagttaggattaaggtcaacattaaggggtaagcaggacatagcacagtgactaagtgcataggagcatttattagctgagtgatcttgaacaagttatttaacttctctctaagtctcactttcctcatcacaaaaggaagaaatatttcataaggttgttgtggaaactgaggtaatatatagacagtactttgcacaataccagacacccagtaagggctcaagaaatggtattgttgttatccttatctttaacaagtgattcacaaccagttagtgtcagaacaggatgcaaagcacttttggagtatctgttgctataaaccgagttccttatcctttgcatctatctgggtctaaggaggcaagatcacatagcattaacattttccacaaatgtggtgtgatccatcgcctttcctcttctttcacccctagagtaagccttcagcctcttaggaagtgttttccatcagaatttagctttgaagttgaacattttaaactctgttgggaaggttcagacgcacattgacaaagaagataaacaaagagtcaggaaatctaaacggggaagatgccatggctcacattacctgcttcctcctagttggagttgagctcttcctggaagcggggcagagtctgccatttgattaaacaattcaacatcaaagctgaacaaaaacatataatcaatctgatcttaattcaagtgtgcctacccctccttgtgaaaagcagccttgttttaaaaaatatttccctagcagatcaggtatttttgaacaactccctatcgtttctgcttcacttccatctcaagttctggttcacataactagccaacatttactgagggcccattaagtggccaggcattgtgccaagtgctttgtttatgctttctcatttaattgtcacaacaacccttagaggtattttctcatccccattttacagatgagatggaggctggggagagtaagtcacttgtccagggttacactattaagagctgagcgattaaaaccaaacagcagtggggacaggccctcaggagacatttctactcctggcttggtcactgctcagatacgtcacatgtcttctaggcctcagtttcccggcttggagaggatgcagcctctctagaagttcccttccacagcctgcggcagcttcccagggcgggcgggctgctttgtttccacactcagctgctgtggctggggcctccctgggctctgccctgttttgtttttgctgctggacctgctacagacgcaaccctggcagcgcagcccggagcacagccgaggcttcctctttctctcagttcctggctgcttcagtatgaacagaaaaggtgggcaggggccaactggcaggagcctccgaaatagcagcacatgatcctcctaccagcagcagaaaggccagcccgcaagacctcgccgcctgcccagctctgtcattgactaaggttgcttttgtcagtacagccgccaggggtttccacgctcattcccctccggacaaggtggacagctttggtgatagacaactgggaggtaaaactccacagagccatgccagcgactgaccgcccagggacaggagatggagacgttcagctgcaaaggctacggaggaacccccgcaattggaatctctccatgccttctgcagcatggaaacatactccgggacctaccggggctctctcgggccacctctgagtgcaagggaaaagagtgcagttcaaggaagggaatgtgtctgtcatcccaccacttgcgcgcaaggccagttccgggatcagcaggcttccttcaccagcacgggctcttcattagcaaccactgggagggaatgtgtgcggagtcagtgagtgaagctctccttcagcaatttctctcctcctctcatatttctcccctctctctctctctttctccctccctccctccctccctccttcgctccctctgggtccaggacaatactcaggccaggacagttccagtcataactggatctttccattacttggtagcacacaggaggatttgttggagtggttttttgttttgttttgttctgctactattaagcaagattgcttcataatcctttaagggttttttttagccaagtcttatttacatatcctggccagcaagcacgtgattaacccaaggatgttggagggaaggcagatgctac

SEQ ID NO: 9970 - DNA, 2300 bp, Homo sapien
gtaatcccagcactttgggaggccgaggtgggtggatcacttgaggtcaggagttcaagaccaacctggccaacatggcaaaatctcatctctactaaaaacacaaaaattagctgggcgtggtggtgcgcgcctgtaatcccagttacccgggaggctgaggcaagagaattgcttgaacctgggaggttggaggttgcagtgagctgagattgggccaccgtactctagcctgggcgacagagtgagactgcgtctcaaactaacaaaccgaaccacgagattatttttcccagttttcaattgtgtcctgaactctctatcttaaacaatgcataggtatgaaaataacaactggtacattgattttaataggggagaatttatttggaaagcaagaatgtttattgtaaactgtgcctctttctggaaatatttacaattttcaaagaagtggccttagcaaaactgttagtacagcccttgatttgcaggtgaaaaaaaagcagtgcatagacattaacctaaattcaagttaggattaaggtcaacattaaggggtaagcaggacatagcacagtgactaagtgcataggagcatttattagctgagtgatcttgaacaagttatttaacttctctctaagtctcactttcctcatcacaaaaggaagaaatatttcataaggttgttgtggaaactgaggtaatatatagacagtactttgcacaataccagacacccagtaagggctcaagaaatggtattgttgttatccttatctttaacaagtgattcacaaccagttagtgtcagaacaggatgcaaagcacttttggagtatctgttgctataaaccgagttccttatcctttgcatctatctgggtctaaggaggcaagatcacatagcattaacattttccacaaatgtggtgtgatccatcgcctttcctcttctttcacccctagagtaagccttcagcctcttaggaagtgttttccatcagaatttagctttgaagttgaacattttaaactctgttgggaaggttcagacgcacattgacaaagaagataaacaaagagtcaggaaatctaaacggggaagatgccatggctcacattacctgcttcctcctagttggagttgagctcttcctggaagcggggcagagtctgccatttgattaaacaattcaacatcaaagctgaacaaaaacatataatcaatctgatcttaattcaagtgtgcctacccctccttgtgaaaagcagccttgttttaaaaaatatttccctagcagatcaggtatttttgaacaactccctatcgtttctgcttcacttccatctcaagttctggttcacataactagccaacatttactgagggcccattaagtggccaggcattgtgccaagtgctttgtttatgctttctcatttaattgtcacaacaacccttagaggtattttctcatccccattttacagatgagatggaggctggggagagtaagtcacttgtccagggttacactattaagagctgagcgattaaaaccaaacagcagtggggacaggccctcaggagacatttctactcctggcttggtcactgctcagatacgtcacatgtcttctaggcctcagtttcccggcttggagaggatgcagcctctctagaagttcccttccacagcctgcggcagcttcccagggcgggcgggctgctttgtttccacactcagctgctgtggctggggcctccctgggctctgccctgttttgtttttgctgctggacctgctacagacgcaaccctggcagcgcagcccggagcacagccgaggcttcctctttctctcagttcctggctgcttcagtatgaacagaaaaggtgggcaggggccaactggcaggagcctccgaaatagcagcacatgatcctcctaccagcagcagaaaggccagcccgcaagacctcgccgcctgcccagctctgtcattgactaaggttgcttttgtcagtacagccgccaggggtttccacgctcattcccctccggacaaggtggacagctttggtgatagacaactgggaggtaaaactccacagagccatgccagcgactgaccgcccagggacaggagatggagacgttcagctgcaaaggctacggaggaacccccgcaattggaatctctccatgccttctgcagcatggaaacatactccgggacctaccggggctctctcgggccacctctgagtgcaagggaaaagagtgcagttc

SEQ ID NO: 9971 - DNA, 2300 bp, Homo sapien
aaaagaaaattttagagagagtctctctctgtctcccaggctggagtgcagtgacgtgatcatagctcactgcagcctcaaactccttgattcaagcaatcctccaatctcagcctcttgagtagctggtagtaaaggtgtgcacaaccacacctggctaatttttttttaaattttgtagagaacctcgtccatgatgagcacttttagagttacaattcataaggtgtcaacatagaaagcagactggcattcacattagccatgaaaagactctttctatctaaatagcttaaagtttactggattaaaaaggaatttccttctttatctatagagattatagaattgcttcttttgtgatttccttctctgtctctcccggaaggctgatctactcctacttgattcttactgatccaaatcatcctactccaaagaagctgagttgaggtttagacagaccacagactctgttttattgtctcactactataaaagagggataaagatccaataagcactgctcacttttcttgaacatcttgagaccctggtctctttcattggtaacctttaattctggttcaagtggtgagaatgtatgtgtgtgcacatgcaaatgcatatgttagaaatgagaatactttttaaagcacaaaataaacttttcagaagcttacccgatattaagtcactctgggaagccatatgcttattgcaattttgaggcattcattcatcagcaaggttttgaaggctggctacactgagtggaatatggtcatttaacaatgtaatctttgtaagggtcatcaatctcatttgaataaatatatcagttaaatagatcaatttcagttaaataaaattatggtacatacataagatggaaagtatttccaactctgaagctcttaaagagaattatttagcccacctccaagatatgctgttaagtgaaaaaagacagacgcaacagtgtgtttcgtgagctaccatttatgtaaggaaaaaaaggatatatatgtatatgcttatattataaaagcccaaaacgtttctgaaagactacataggaaactataactgtggttgcctgtgggagggtggccccagacaaggcatgaaaccagagaaatgtatttgcgactgtgtatttgaatttgtcgtacatgtatatattttgcctattcaacaacaacaaaaaactcaaaataataaaaaagaagtcatctttagtcctatctttagtagttatgtggtagagcactctactgacatgaggctgggctttgggatcagacaggtgaaaatttggatccaggaagggctccgtggctcacgcctgtaatcccagcaccttgggaggtaagaggggaagatcgcttgagctcaggagtttgagaccagcctgggcaacatagtgagacatccatctttatttctattaaaaaataataataataaaataaaataaaaataaataaataaaagatttgaatccacatgttaactgggagacttcctggaggtgccttaccttctctgactacccatttacttctatgtaaaatgaggaaaatgataaccacctaaaaggatggcatccaggattaagaaaaataatgaaaggaaagacccaataggcactcagaaaactttattcctctttcctccctgcatgtaggaaggatcctggattggttatatgatgtcgttagtaatttttttttttttttttttttgagacggagtttcactcttgttgcccagacttgagtgcaatggcgccatctcggctcactgcaacctctgcctcccagattcaagtgattctcctgtctcagcctctgagacagtagctgggattacaggcacatgctaccatgtctggctaatttttttgtatttttagtaaagacgggtttcatcatattggtcaggctggcctcgaactcctgacctcacgtgattcgcccaccctagcctcccaaattgctgggcgcccggcctgcccttagtaatttttaaagagttaattgattgcagcctgtttacattcaaaaatctttgataagaagtgcctccatgtgctacaggaacagatcctgggagccgacctcggtgcctcaaaaccaagatcccagctgaagcattgtcttggaaggaaggtgggtgtgaagaaaaaaaggaaagaaaggaaaaagcaattttttctctttgtctcagtgcatgaaatttcaccattaaagttctctcttttatatcttggtggctagtaaatccctaacagccct

SEQ ID NO: 9972 - DNA, 2300 bp, Homo sapien
tgatctcaatacggcctctggaagaacacctgatctaggctgacttgatctaaggaaatacatgagtatcatgtaaacgctgaggtcagatctaaaggtcggctcggagctccctatctgacaagtagggtcccctggccaggttcactccataggttagtctcggggctaccctgcccacgtccggaaagcggacctacctggggcctaaccttgaccggacacccgtcagcattctccaaatccgacttctacacctgtatgggacggaccaagtttctaggtccgcgatcacaccaatggcggaagctcgtcagcgcccgggttccaaaatcccgcctctcaaggcttcttgagacattttgtctcccggcgtgcaatgcgtccgccccgggtggcctccgcccggaagacggaagtgcaaagacttccggtcggcgtgagcgtgaggtgtgggtgttcgtttctcaggtgagttcggttcctcaccggtccagtgacacatgggacttggggcttgattccgccacccttggagaatttcgtttcttgacactcgctgggctatacttgagctccagtccggagatgcaggccttgttgagggcgagggttccccttgctctttttggtgggggccctccggcttccgagtgcactggataaagtggagcccacccctgtcgttcactcccgctgaagttaacttcggccctcaaggttgtttgccgcccgctttcctagcccctcgcaagggttgagttatgtagacaagggagcggaatgactgtgattgccggcgttcaaaaaatgttagtggttcgttcaacaagtatgcaaaaagtgtgcgattcagcagtgaacaagacctttccctctaccttcgtggagtctacagtctggggagagggtcggggggcgtgacagaaaacaatggtttcaggttgtaacacttaataagcagggaagggagcttacggaggtcagaggagtcctttctgaggtagcgaatgaaggagcaagccttgagaagagcagttgccaggcatagggacagcaaatatgaaggcactgacgtagagatagtttggactctttacagacgtagttggtgcctgcggggatggggatggagaatgaaatgaaatagagttgaaggaggcaggggacagatcacaaatgaccttgtagatcttgaatatatatgagggaggaggtctttaaagaactcgaagaaaggcagtgaatgcttttttaaaagatcacactgagcaccttgtggaggatttagggcggaactgagtggaaagaaaacaagagtaggaatagataagtttacagtcgttaagttggcttgagaggatggataatgaagatgaggtgaagtgtttataaaaatcatttgtaatttgtaagctgttgcataaatgtaaggtgatgacgctgttgcattctggggaaattaaatttctgtattttgtaaagaaattcagccgggcgcggtggctcaagcctgtaatcccagcactttgggaggccgaggcgggcggatcacaatgtcaggagatcgagactatcctggctaacacggtgaaaacccgtctctactaaaaatacaaaaaattagccaggcgtggtggcgggcgcctgtagtcccagctgctcgggaggctgaggcaggagaatggcgtgaacctgagaggtggaggttgcagtgagctgagatcgcgccactgcactccagcctgggacacagaacaagactctgtctcaaaaaaaaaaaaagaaaaaagacatgcaaggtgctttcagaattggtttgatttgtagtttgcttatgaccacaagtttgatttgatatcttgttatttagtgactgtgtatgtaccatgttgatcttcatataagttgcatgttaagtcctaaaaagtgaacagattgaagagttttacttttcacttgttttgtagagatacctgttggcctggttttctaaggatttgcctgttttcttttttatattaaagatttgcttttgaatgtgtgtttttgttaacttcaggtaaaacatggctaaaagcttacggagtaagtggaaaagaaagatgcgtgctgaaaagagaaaaaagaatgccccaaaggaggccagcaggcttaaaagtattctcaaactagacggtgatgttttaatgaaagatgttcaagagatagcaactgtggtggtacccaaacccaaacattgccaagagaaaatgcaatgtgaggtaaaagatgaaaaaggtgagtgtgcttctcctttt

SEQ ID NO: 9973 - DNA, 2300 bp, Homo sapien
agtggtcaacagcctgcagctgcaggccttttttttggagcagctaaggacttagatactttttgctttttcctttcatttttctagagctttgtcttgaagtccccattatctagggaatgggcaacatggggtcactatctgaatcccagaagtcttcctgttccttactgattgtgcagatcagggattccatgggagaggcctgactgcaggggccccactgactgttctgcatcatgtagcatgccttttggatgagaaaatcagtctgcttcctgtaaggtattcagggccacccactgtgcctctagttctatatataggctccttccagctctgtgatgagccactgcaatgtttagttggacccttaagccttgtttgtccattaggagataaagtttcccaaaaacagtagtttagtttccttcatctttgcaaattcagcatagtgcctataatagagtgcatattcaaaggcatgaatgaaggaatgaattagacttttaaatatactaaggccacttttctagaactgcttttatataactggtgaggggacataagtaaaaaggagtaaaagggtgttttactcagctgtttaaagcacttgtaatgctaaatcatggcatggtattttaacaacatgacattttcataataggtaaattattttttctggtgccaagtgcctattcaaaagtcttgtcctggtatgttaaacaagatacagtaaatatggactatcagaatataagttttctctaaaatgcaatgtgcacttatatttttgggtgaggtagctaacttctcatttgaaagatgaggtacagtatatggttaacttgtaaaacagaaattcacttgctttataagaacgaaatctcatttaaataaaccaggtttcttaggcatgcttcctttttttatatcaaatgttctaggtttttttcagcctctttaaccttgctatattctgaattcagtaatttccatactatgcatggtttcataaaggacacaaatttaaagaaaaaaggtacccatagattgcctcagaacccctttttctggcaaccagcaggagtttaccaggccatcattaaagacatgttttttgggtatatgtcgtaaatctctagaaacattgcttacaaatagtactgtgtagctatacttttgaaactataatgtaaaaagggtaccatttgttgaactcttacagcatcaattaggttgtattatgttcactttagggacaaggaaattcaggcccttatgacattaattactcacccatatcgttcacaagtgttggaagcaagagtacaacacagacctatatggttccaaagcctatgccagtagaaatagttgtacagtaagtgttattcgtgagctaagacaatcgtcctaggcttagcattgtgtctgatacgtaagtgatcagacaggtaaacattgatagaactgaaatcctttgatcattttaccctttaaattcttctctggggtaggaaaagcttgttttctgtttttggtaaccgctttgagtataactgacatgcaataagttgcacatatttaaagtgtgcagtttgatacggttttacatatgtgtacatctgtgaggccatcacccgagatgagaaaatgcacaggctgcaaataaaaatgatctcaatacggcctctggaagaacacctgatctaggctgacttgatctaaggaaatacatgagtatcatgtaaacgctgaggtcagatctaaaggtcggctcggagctccctatctgacaagtagggtcccctggccaggttcactccataggttagtctcggggctaccctgcccacgtccggaaagcggacctacctggggcctaaccttgaccggacacccgtcagcattctccaaatccgacttctacacctgtatgggacggaccaagtttctaggtccgcgatcacaccaatggcggaagctcgtcagcgcccgggttccaaaatcccgcctctcaaggcttcttgagacattttgtctcccggcgtgcaatgcgtccgccccgggtggcctccgcccggaagacggaagtgcaaagacttccggtcggcgtgagcgtgaggtgtgggtgttcgtttctcaggtgagttcggttcctcaccggtccagtgacacatgggacttggggcttgattccgccacccttggagaatttcgtttcttgacactcgctgggctatacttgagctccagtccggagatgcaggccttgttgagggcgagggttccccttg

SEQ ID NO: 9974 - DNA, 2300 bp, Homo sapien
tcttttctaattgtttttattggcataaagtacaggagaaaatgaagcatttctataaaatgccagaaaaagctgttttgtattgagcatgtttatatgcatgttaatcagtgttttaattttacagttactttctatgatgtatatattattctgcaagctttcatactgactactacagtattttttggtttgactgtgtatactctacaatctaagaaggatttcagcaaatttggagcagggtaagttgtatatattcttggatataatagatagatgtctttaattattataggtggttttgaggaatgtgctacactgttatttttgggtactgtcttttaaaatggagggtaataagagatcatctctttgagtactagggccaggtcctactcctagaacatacacagaaatggaaagtggctttgacttatttgcttctctcctatagtgaaagggaagtgaattaaaaaaaaaaataagctttccagagagtttaagcttgtatgctttattaacattatggaatttactgaaattacttcagtctttgtcttagcataaatgttaccaagaccatccacgtcttcttggaagaagcgctgtaattagtacaggtattgaaagggtctgcatgaactttaagaccttttgatccatctagattaacctgtatccttcctcaaacaaatatacggaatgatcctttttatattaggattatggtacagcattgccctcacctggtaggaatgcatagactcttttctaagctcacagtggcttcctgttggcacagtcacccaaccgttttctttttcctgttacaacactatttacaaaactctgctcttgctaaactttctttcctcccccaccccttttattctggtaatccagaacaccagaagtctctattgagataaaatatagttggtcagccaacactgacaattgcgcgagctgcttaaatagtttcattagaatggagtttgatttagggagaggtaacattttctattttcttttccttctttggaaggatgtttcatacatatttgtgtggcatatatgatgaaagttttgttctacttcctcttctcaacccaatctccaactgttccctccctttcattaattccagtatcatctctcttaaatccttttctggtaaacttgccttatatttcagcctcttcataataaatttacattgattgatagaaatggtattacagtgatcatatatagatctgagaccagatatttctgaagtgcgtctgtctgtgtctgctgtttctgataattcttatgatattttctttctttaagtgttcagttatttttgactatgtaattgtccttgaaaaactatttgttgaatttctttgaggccttgattgaaggtgcacttttccatacagtatttgggttttcgcctagcatctgggaaaactattggattgggtccacttgaaactaaattcatggcttacgatgttttcccaaccacacaagtgttcttcagttagactacaaatcagcaaagggatagcttgtggtgacaatttcccagggatggttcttctctgcccccaccccgcaatttacccctgcttagtgcattgatgacttttcttgtagttgggcaaattcagctacagtactatgattacttctttgggtttccacttttacctagattttgatttgataattccattctaccttgacagttatttgatgtttttaagaacgtattctttgttttctcttttatgcatcatttcagtagtttttcggggtgggacaggggcagtaattagtctggaatagttcttacttgctgtagtactggaaacggaaccctttcaaaattgcctcttacctgtattactacaaccagcctctctattctccagtcttaacagtttccagcctcttttccaccaagcagttgggtgatacaaaaatggaaacttgattacagtatacctatttaaaaccctaacacttcactactgctcttggtatacagcccagttctccactgaatcacatctactgctattagttactggatattgccatgtaatgactctctagcaaaatcctaataataattatactttggtcagtatgccatagattcagctacttaagagtagcactttattgcattttaaataaaacttaatggcactacttactgtgacgcctcaaagccaaagtggttgtggaagctgagtgccaaaatggatataaagaccgagggaaaagattttctgtgaaaa

SEQ ID NO: 9975 - DNA, 2300 bp, Homo sapien
ctctatggcttccttttcactctcttatggtatattttgattactagaaattcctaattttaatataatttaatttggcaatcttttcatttgaagttaagtgctattttgtatctggtttcagaaatctttgccttcctccaaatcatattctcctgtatcattttctttaagttttattgtttttgcctttcacatttatatccacaatctatctggaatttatttttttttgtaactggtaagaggtaaaggatcaaactttgctgatgctgtttttagtcaatacaaaggtgggttcccaatttagctccagtttgtcctctataataaattccattattacggcggggcagagaaagaggggatggcttcgggttaggatgggagagaaaacggattacattcccagtgtcatctgaagtaaaacttttctcagatttttctcagcaagctttttaagtcctctcacctggagagtgactaaagagatagaggccatatcccattcacctatccattcaacaaactaaactaaaacgaggggccggacacagtggctaacgcctgtgatctcagcactttgggaggtcgaggtagggggatcacttgagcccaagttcgagaccagcatgggcaacatggcgaaattccgtcactacaaaaaatacaaaaaattacccgggggtggtcacctgacctcaggaggtcaaggctgctgtgagccgagatagagccaccgcactccagcctgggtgacagactgagactctatctcaaaacaaaccaacaaaaacaaattaaaatgatatgcttgtaaaatgtttgtaaaatcataaaagataaagtgtttttttgttttgttttgtttttcttgtcattgtggaagtgacgttagttcttttggcaaaggcttctgagaacatcaagtttaaggatttagtttagaatagactgttccacaactgttctgaattccacttgctaagtgttcgggtgttgtggttaaggtgaggactgggcaatgtgggtagatcagagtaaactcatcaaaacaattccaagggaccctaggatgacactactctgggtatgtctacacctctttatattggaatgacaacaatatcatgaatattcactctaatccattgtatttgccaccatcatctctctcttacagtaatacaactttatccccttttctctgcctttggtaatggccctcttcaatgtattctacttctggcctaggatgatctggcctttgtttatctatccagcctcattctttgccacctgtcccctacaccagctgagcttcaccgtctccctctttgcagacgttggtcccttgaggcccagcctacatcactgctctttctctggttggctcctacttgcctttcaggattaaatattacttcattcagaaagcctggtttatagaaagtgctcaataaatgtaggtattattattattttaaaataatagaagtaaaaatgcatcctcggtgtgattattgaaaaagtggatgaatgagatgggtatttgttgagtggatgggtgactgggacatgggttctatcactttagcaactctccaaggtgaaaggacttaaagtgtgttcaggctgggcgcggtggctcacgcctgtaatctcagcactttgggaggccgaggcgggcggatcacgaggtcagcagatcgagaccatcctggctaacatggtgaaacctcgtctctgctaaaaatataaaaaaattagcctggcgtggtggcaggcgcctgtaatctcagctattcgggaggctgaggcaggagaaccgcttgaacccgggaggcggaggttgcggtgagccgagatcgtgccattgcactccagcctgggcaacaagagtgaaactccatctcaaaaaaaaaaaaaaaagtgtgttgagaaaagtttcacttcagatgacgccgggaatgtaaaccgttttctcttccattctaactcggagccatccccgctttctccgcccagctggaatttttgaagcgagaaaatcgactcgctcggtgttcgcccgccgacgccgcacggcttgctggggctgggctcttcctcgcggaagtggggaggaggcggttgcggttagtggaccgggaccggtaggggtgctgttgccatcatggctgaccccgacccccggtaccctcgctcctcgatcgaggacgacttcaactatggcagcagcgtggcctccgccaccgtgcacatccgaatgggtacgttgtcccctctccagtgcctcc

SEQ ID NO: 9976 - DNA, 2300 bp, Homo sapien
aacatggtctgagaacgactgccaacactgaaaatacaggaaatttcacatactctagctttcacttaggatccttgcttcttggtaaattacaagatctggtaaagcaggcctttctgattgcttccctcatctgcagtgatttcctgtttcctctgagtgagtttgcctccctgtagtagcaattcaaaagctaccaaataattaatggccttttgcctctgttgctcagcatgttcaggtagtccctttaagagatgtatagagggccgggtgtggtggctcatgcctgtaatcccagaaccttgggaggcctagggaggtggatcacttgagcccaggagtttgagaccagattgagcaacatgggaaaaccccgtctctacaaaaactacaaaggttagccaggcatggtggcatgcacctgtagtcccagctgtactggaggctgaggtgggaggatggcttgagcccagggggtggaagttgcagtgagccgagatcgcaccattgcaccccaacctgggcaatcagagcgactaaaaaaaacaaataagaaagaaaggagggaaggaaggaagaaaggagggaaggaaggaaggaaggaaggaaggtaggtaggtgtacagtgtgtacagattgacaataaaaccttgaacaacgggatatcgaaattcttgcccacacagtatgggctttgccagttttcagatacatttttatgaagtattttcgctggcaaaaccattcaggtaggggcatgaaatgatagtgtttcatcactcgtgatctctaggggcagctattccaaagactacaatctgagaggtttcaaaacacctctggtgttttcacttgatggccactgcccactcttccagtcactaaggctgagatttttctcaccactttcaaaacaactttttgtcactggtaacatgcctcatgtgacctagaagattttgaaacaacaattttacttaaactccgtgaagatttcaaaacaacaattttacttaaactccatgttgaaggcaaaaaggaagattgtgtgaagcactttgaggaaggaaaaaatgatggaacgatatttcatcaaggaagcccatgaggaagaaaatttattaaaaccaagtaggtgtatggaggagaggccgcctcgtgaagaaaacgaacataattttacgctgatttggtgtcttttctgtttttctcttgttggtatctacattcatcttttccaataataatcccatatatgtacatttttatctgtttaaattcagtaaaagttgggaggaaaatgtgtcaaaacttttagagtgtgatgggctgagtggggttgtgagtgattatcttcttttttcagtttttttctgggttttccaagtgttcctcgatgaacatggatagtttttctgacaggataaaaaagaagtagtccgggacagtggctaacaccccgaatcccagcactttgggaagccggaggtgggaggatcgcttgaggccaggagtttgaaaccagcctgggcagcataacgacactccctctctacgaaaaacgaaaaaaaataattagccggacgtggtggcgtgcgactgtggtcccagctactcgggaggctgaggtgggaggatcgcttgagcccaataggtggaggctccgtgagctgagatagcgccactgcgctcctgcctgggcgacagagtgagaacctgactcaaaacaaagaaaaaaggaagaaaagaaaggaagggaagaaggaaggaagggagaagctttcaaaaataaacttttgtaagaagtaatgacaccgctagccgtccacaccaggagaccgcctagccgtggggcacggtgggctcctgggagctctgagctctgggctttctccagttcgcactctgcttgtctcggcagctccgtccccaccgcagaggtgtgaaggggcgcaaagccagcgaagggagaacccgggtcgggtaacccccaggcctggccaggcggacgcaggggcatctcgggcgaggcgcgccttgcgtcacgtgggcaccgcccctgcagtgaccggagaacggcgtgttcctagggctctgctgccgtcgtggaagcaggatttccgcggttgtgtaacggcctgtcgcaggcgtgcagggacctggactccgcctcgtccccggggctcgggcagccgagccatggcggggaactgtggggcccgcggcgcgctgtcggcgcacacgctgctgttcgacctgccgcccgcgctgctcggagagctctgcgctgttctgga

SEQ ID NO: 9977 - DNA, 2300 bp, Homo sapien
ccgcaaggtctgcctcccgggttcacgccattctcctgcctcagcctcccgagtaaaggtgggactacaggcgcccgccactacgcccggctaattttttgtatttttagtagagacggggtttcaccatgttaggcaggatggtctcgatctcctgacctcatgatccgcctgcctggcctcccaaagtgctgggattacaggcgtgagccaccgcgcccagccttcatctcttttactaggttgtaaactccctatattagttttctattgtttttgtaacacattatcacaaatttagtgacttaaagtaacataaattaattattttgcagttctggaggtcagaattccttagcattctttctggaggctgttggggagaactcactgccttgccttttccagcttctagaggccacctgccttctttggctcatggcctcttcctccgtcttcaaagccagcaacgtgacatttcagatctccctctctctgtctgtctcaccgcatctcttcactaccctcttcctctcattctggcccttctgcatgtcttttataaagacctttgtgatttcactgggcccactcatataagccaggaaaatctctgtgtctcagatccttaatttaattacacctgcaaagtccgttttctcgtgtaaagtaacatattcacaggtttctggaattgggacgtggacatcttcgggggaccattactctgtctgtcatactccctgagtgtgtaagggccatctcttcagagcctaatgtgtcatcctacacagagcaggtgtttccttataaattaagttgaattaaattacccctatgaagccacataatcaataattcagctataataaacattgccgaataaattaacaaagggaggataatgactccttatgatgatggatagaaacactgaagaaaaccattttcagaggatttactgaattttcctctccaaggagcttgtaatagaagggtaaacctctagtttcttgtccagcagaggaataggctcatgtcttttgttttattttatttttttggtgagtcagtatggttgggttaatcatattcacattagattccatgttgaagaacaactaatcaaagaagaaaatcatcaggaatcagggtgagattaacagaccaaggtcagaaacatggagttacaattttccaaaaaagcacgaagtgagattaaaaccacagtaagtcttagtctgactgacaggctttatacaggccctcggtaagcagttgggagaacccatgcccaccactgctctgtacggtatctggctgctcagagctctctgattcacaaaagagatcatcaagaattgactctgtgttaaactgtttttcacttagaatatggacccccaccaatacattcaatgaagggtcattaaggaagctctgattaacaccaggcccatgcagttactccgcacatataatctgtgggtattatgttgatttgaacttgcttagctgacttaaagcagggtttctcaaactgtagtatgcatcagaatgacttggaaagctggttaaaaacgcagattgctgggtccacccagcttctgatgcaataggtctggggttagaaattttgctttctaatgagttcccaggtgatgctgatgccaatgatgtgaagcccgctcttcacatccgtgaaaatcgctgccttaaggtgctcttaaattgttatagattggtagatcctacctttccatcactggtatgttttttgagaaaaggatcctttcttttcattctgttatattcatcctattacataggatgttggttagcacagagtgggagctctagaaagattgttgaccaatcatcttattgactagaccatctttctagagtataactattttggacacctcaaagatgaagtcagataagctggcagtgacctgattaacgttgtggtaagcagatgccactgtggctgggaagtaccaaatcttctgttgagtgattcagtcttcctgactagatttgccttctagtgggtgtattaataagcgttagttgatatgaattaaatgttgcaactttctatgggtaataagaggatacctttatagtttcatgatgtggagaccaagatacataagaaagcaagaatgagtctccgggtgttccctctgatcagcaaacatgaattcataatttcatttactctcatttttgtaatgcactctgagcaatcctccaggcagatcctatttactaagcttcaggcttttgtccca

SEQ ID NO: 9978 - DNA, 2300 bp, Homo sapien
cctgtaatcccagcactttgggaggccgaggccggcagattacttgagttcaggagttcgacaccagtctggacaccatggcgaaaccctgtttctacaaaaaattgcaaaaaattagccgggcttagtggtgtgagcctgtggtcccagctacttgagaggctgatatgggacgatcacttgagcctgctgggaggtcaaggcctcagtgagctgagatggtgccactatagacctgtaccaaaaaaaaaaaaaaaaaaaagggaggaggagttgaacacctgtgctgtgtagtggctcacatctgtaatcctagcaccttggtagactgaggcaggaggatcacttgactttaggagttcaagaccagcttgagcaacacaatgagaccttgtccccccaccccccaaaaaaaaagagagaaagaaaaaaaagtttaacatctagagatctagagttgattcttgtgcccaagtcatcatgttggtaacaagaatatcccatgtatatactcataagtgacccagatttgggaagccaatgataagttgcagtttagatatgctgagtcttaagtagccaaggggcatccagtagtgactgacagtgtttaggcagttgtttgtatggtttggagatcagattaggctgagtcattagcatgtaggtgaaggatgattgaggaaaggattatagagcaagaagatgcttgggatggagccttggggaataacagtacttacaggcaagcagaggggtccaagactgtaaatagccagaaaggagaaaaatctgagaaggcaagctgcaaaagccccggcagcagaatgctacaagaagaaaatacttatcagtatcaaatactgctgagaggtcaggtaaaacaaaggctgaaaagtatccactggtttttgaaacgaagaggacagtaagtgtgacatttgtcagaggagattcaatgttgtggtggaaacagtagccatgtgaatgtcaaaggaattcaacctcatatagccaatccttggaaacactggtgttttgtcagctgcaacagtatttcttttaaaagcaacaaaagtgggcatttttcaattggtacccaaaggaaaagaaatcaatttttatattttctcctatacatttttcttaaatatttggtgctagttgtcgtttatatatatttaaatatagcatcaggtgcttttggatttagtaaatagtgtgtgtttagttatttcaggaataatcccaaaataaacagtatcaatacagtaatgtagtaatatatttatggtatttcttaaatagtaccaagactttcaagtaccatcctcatcaagtaagagaatcatagccccataatagtttttaaaaccacgttcctttctcttctatttcccttctcctattcctgtctatactctgggctgcaaagagacacttttgccccactgtcagcaggtagcagcccagcttaaataagtttgggagaccagggtgtactcacagaggaaaggataaaaataactttgaatgttatctaatccagtggtgtccaaacctagctgagcatcaaaatggacagcccggaatgtacattaaaaagacagaattctaggtccctgccctagatccgattccagaagggcatctgctatactttcgttttgggaaggttggggtgggggttgcttttccaggttcttcaagctcagcagaagtggactttctccccgttctctctccgcaggagatgccgtgcactggcggttctgcaggtgccacgcctgtcactccccagcgctgatttcgtcccagcaccttcctgataatcaccgcccagcaccaggctccaaaaggagcggaagccccgcccatctcccagcccctcgctctcccttccccgcccctaacccgccttgccccgccccttccacatgccctcccctcggcaattcctggaaacttggggcggagcttcgctgcctttcaggttttatgtacgctggcggccgccaggccgttcccggaagttgatggccttacagtcgtagaactgattggctgatcatgaccatgcagttagccagggttttcccgagttgtttgggttgagttcaggagaagcatggccaggtcgagtccgtacctgcgccaacttcagggacctctgctcccacccagggatctggtggaggaggacgacgactacctaaacgacgacgtggaggaggatgaagagtccgtgttcatcgacgccgaggagctctgcagtgggggcgtaaaggctggcagcctcc

SEQ ID NO: 9979 - DNA, 2300 bp, Homo sapien
gtactggagcctgaaatcaaacctggactcaatttcaatacacaggttcctactcttcagtggtgcttctcaggttgataggaaaacctctcacctttagaaaattatacaaaaataaacattgtggccggatgcggtggctcacgcctgtaatcccagcactttgggaggccaaggcgggtggatcacttgaggtcacgaggagtttgagaccagcctggccaacatggtgaaaccccatgtctactaaaaaaatacaaaaactagccaggtgtggtggcgggtgcctgtaatcccagatacttgggaaactgaggtaggagaatcacttgagccccggaggcaggggttgcagtgagctgagattgtgccactgcactccagcctgggcaacagagtgaaactccatcatcatctcaaaacaaaacaaaacaaaaaaaaattgtgtaggactcaggctagaacattgaaatatattcaaaacaacaccaataatgcatatcctctttatttggctttttaaaatcactgtttattccatttggtagagggttttatttttttccatacaaatatttgaacaattttgaattccccaaaaccatacatagacgataaataccatgctattaaagtattaaatttgtacaaaaatactttacagtttaatacttgtttgttacaaataaaaatacatatttaagtgactcatgatctttttttcttttttcttaacatgatcctgctttatactttcttgccctggcggttctgaaatgtgattgaaataatattttttttgcacaaaaagaaaggtgattttttttttatatttccttaaacaaaggacacagtgttcgaatactttgcctaagtggtagtttgaattattgaccaaaatgaaaatgtttggaaaataatcatttcaatatggagagtctaccatcaatatacagatctatttatttttttatgttcaccaaataataacagttattagtgtagctattcaaaatatctgaacaaatgaaaacagttgctgacaaacatttaaagcaactgtcacaatttattgctttgagggatggtaataattggcaatgcatttgtgaaaaatgtatttacaatttcggtaagtggcatggctcagagcaaaagatagtccagtgtcatttttaagtacatgtgctgtacaccctcaatattaccagttttcaaaacatgtcaagcagtatgagtttggtttgcctatcattaagatgaacctcattttaatagactcttcattctctgaagttcttagtcttgaattttaaaaataagataatataactaattctcatgtttactacacactctaattcattatcagagattttcagctattaaaaatgtgtccttaaaaaaaaaacaggtcacaagacatatcctgtttgataatttgttgcatagggaatagcatacatcttagttaaaatcattcctatacgtgggcaaaacatttaccaccacctattatggtctcctacgtgcatcattgctgaaacattttaagataacttaattttatacctgtacccctcccattgtggtagtcccagcagtttaccaaacactagttcccctagtagagccagcctatgagaagaaaagctttgttggccaagttcttacattaatgacttcatagtaagaaactgatttcaaagtgaattaaggaaatcatcacagagaatattttcaaacagatgtttctctttttaaaaagtgatagtaagatgaacttgtaaaaaatttcctctgatgttaattgtagagttgtgggggacggcctatttttctctaccgttgggactggcagggcattgcccaccatataccatagtggtcaccaaaaaagaaacctcttcaacttgaaaagggaagtgaacatgagccatgagagagatttaaaagacccctgtgcttgcagttaatgccacgttgattgattatctgtgcttcaaaggtcacagaaatcttaaaggatttttagcaccatgtagatattgtcttttgtcctgctttataaaaagcgttgctataatgtattagtgggttctcgtgtctccaaattaccaccgtggctaggctgctggaaaaaagcactgttctgttcactccaatctcctggtagactctgttggtctatagacttctgtgaagccagtgggtttctactaataaccaggtccagcttattcccggattctgctatgaggggcacaacaaggcagcagtcaaagtctctggttcggaca

SEQ ID NO: 9980 - DNA, 2300 bp, Homo sapien
ggagacaaggctgtgagcatgataggtgctacagtcggcatatatataacatatatatgccgacatatatacaacatatatatgccgacatatatacatatgttatatgtgcatagtcggcatatatataacaacatgcatctggaagctttgccatatctactggttagaggtaagccataggtcatgcccacactcaaggaaagaggacatctaagggcagtgaacatcaggagttaaggatcatagagaactgtcatatagaaaacatatgagatcatagagaacaccgtcctccatggcataccaagtcaggcctactgcatataaagtttttaataaatgtgagttattatccatggaagctatctgaagaaggcatagatggctttctgggaggattagtttctcacactgggggtattcagaccattactgggtggagactgtagacacgtagcaaagaaaaccaaatggaaataggcgttgagccagatagctcctgaaggtcacctgagattaccctgtcaccagacaaggtgaaccaactgccccctcctccttcagcattgtcctgagttcattactactttcttttttccatgctgtcttttttcacttttgtctgatttcacctgtgtaaaaatggaaactagaacaccccatatgattttctctgagaattctgagagttgccctgatccctcatagaatagccatgcttgggggtggggtgggaggaaggaaacacactttacctttactataatttacaggtttgtttcttcctaaggaaaagggacccaggccctgtttactttttcagtgtctctcaaaattctaaccaggtaggtatgcctagactgtactcaataaacaccatctaacatctcctggaagagggagagataatgaattggactgctaggctctttctagatcttgccgctgatatacaagggtttttacctgtttgattcactccccagttcgttcatgtgcctccgctgtttctgaggaaggcctggtaaatataaactttctgttgagtaccccagccctggaagaggactgataaggcagttccatgggtgggcagcacagaatccagaagtgtggggtttttttaggcctgagaagttgatttaaaacatatgtatccttacgtattgatttcataagtgcatacaccagccctacttctgcattcatcctctgaaacatgtgactgaagaaccatgtgtgcctcatatgcaaacactcaaatacaccctctgccatgcccatacctaactccgagccctgttgtcctggggaaagtaaatggaaatgactgaggacagtcatgctagtaactaaactttagaaatacaataaccatgaagcatctctgttaattcaggcaatttcccagtagagtattaaggtgttaattgcttctgcacttttctatttgacagatatgtcctttttcacctaggaaagggaagcaattattgtaatgctctcctgggctttgtgagatattctttaatgacttttaaaggcatcaatagggcattgtgcttttaaagggaaactgtactcttttctgtttgtgcttgacaacaagagtgggtattatattcagactacatgatgaatctgtgaaaggaaaatatgcaatgaaaaaaaaacaaaggcagtagtaatacattttcaggaagtatgtatccagatttcagatatgagaaaaatatgttcttatatgtgcatatatcactgagcttaacaaagattaaacaaacacaacaaaaaagatactcagcaggcatatttttctggaattttaacacaaagttgttattctctggaactggtgtggcctcccaagtgagggtttggcaggtggtttactcaatacaaatcggtaaatattctcttacacatcgtgtgaaagtgactttcacaggctacttgagctacaattggttttacagtttcatgtttacattcagaataaaagaaaaatagtcttagaacttgcaattagaattcagaactcttttatgataagagtcactttggcaacctggtcaagccaagacaacccatgttaactaaagtgatagtgcagaaagaagactggatgtggaatgagaactgaagttagagttttaagtcctcacaaaaggatttgcctgatacctgtccttaggcaagttgtctaaccttcaaaagcttcagatttttcatctgtaggatcctgggtttctgtgagaatcaaatgtatgtgactcttctggccaacttaagtgctg

SEQ ID NO: 9981 - DNA, 2300 bp, Homo sapien
cctggtgaattcgttcattttctggaaaagaattactccaggaggctccatttctgtaagattcctggggctgcacctgggcagactaataggatagatatggattggcagccacagtattcaaagagagaaaaaacaatcccctagtttgggctctcagaaacctttcaaagagctccatgatgggttatttcccctgccaaagaaataggacattttagtagttctgaagacctttcttgggaccagaggatagagcttttaaaacaaaacaaaaaaaataagcatattaggaaaaggggaaaatatttgatcattttagtcataaggaaaaagcaaattggatttgagtctgcaaaatagcagaaggcaagagattcctgtatggttttgagttgtatttgaatagactgggctggggtggtggtgttccacaggcaagattctactaatagtaattgacagctgcgtattctgagtgcctggattttaggaaatatgttagatttggagaagaatcttggaaagagctaactgtaagtatttatctcactttagctagtaactcagttctctagtactaaggtatatttctatttaaagcaaaaaaatatcaaggaggctaaactatttctagggataacctaatagagatgaacataatatgggttgaaattcaaagaaagatttatgctaatcagaacaattataaaaatttgattttgcactgcagtccatttaatatagtattttctattgattagtggttgctttagctagaccatccttggtaaaagaattctgttcttttcaaaaacctttaaagtagatgcttatgatattcagatgtttttcacacacaaattatttttctattggactcaaaatacaaagcatatgcatttcaatagcagtggattgaaattgtttgagttcatattgaatttatgaatgaagaaaagaaagttttaccactaaatttggaatgttggaagttattttaaaaaccagcttgaaagttttttcacagcctgaagagtagagaataaaactgtatgaataattcataaagtcctagaaatattaatcaagtagtttagacagtgatatatcttttcattttgactaattgattttttttttcttaaacttcctggccaactgtctaattttttgtcctgaatgtttatgttaactcctgtgggagaattctggattttgattaaaattccctaccaaatgttagttcgtattgactatatggcgagcaggctgctgctggcagatgaggaggtgtgctccgccttcttatcactttgtgaatggattgtgaagggtttgttaatttgctcttcactccattggagcagatactcacaaatatctgctatgtcgcaagaccgttttatttgcataatgagaagaatggtttgggggatggttgtttgggaaatagtataataaagtatattaaaaatagaaatacttggccttgtttgcctttatttctggtatctttagaaacagtcttgactgtgttgctttccagccaagtccttttttggaagggtgattaaaggggctgggactccatctgcctgattgtctgcctagccctaaccctttcttgtattccctctataaacagacactgccttaactctcataggttcaggaagtaccaaagaggtctctgtcctagagctgcttccccgctataggcagaactgtgattctttcctcaatcccaaatataaacggccctccctctttttctttccttttttttttttttttttttggttgttgtttaaagaacatagtacatgacccatgcatttcttcctaaagtaagagtgtaagcatttcacttgcatttcccattaaatgagacatataaaggacactgacttgatgctgagaaggaaaggggctgatggtggctgaactgactggatacatcgccttttgccttaaacagaatgcactgttcagtgcttagcgttagatttatggaatggctcctcacacagtgtcgtccctgctttgtacaatttggtgctttgttgctatcgaaacggcattactttctaagccattgtgattgtgaagggggaggaggctgtggcaggcaggggtggtagtagtagtgaatgacacagatttgccagatgacatgtagcggacctctgcatcagccaagaggaattaagctttgtcactccccactgggactacctttctcctggtatgtgcgcaaggaattcatatgctgctgctgctgcagccaccagagcaga

SEQ ID NO: 9982 - DNA, 2300 bp, Homo sapien
gttcagctggaaattcaaaagtgaaagaatttacacacagaaaaagacaaaccatgatttgctttctgagtggacacaggctaaaagaaagtattattgataataccaaatgactgaggccttgaggtccacacatacaaaaaaagacctgcttctttgtgtgtgtgtgtgtgtgtgtgtgttttacattaaatatggtggaaaggctattcagagcaaaaggcaattaattgtggctgaagcactaaggacagtttgatgaaagatatattaatcatggcagattggtaaaatgaaatatggcattactggggagaaaaaatatcatatattacgtatatattattattatcattttaagacgttgtctcactctgtcgcccaggctggagtgcagtggcacgatctcggctcactgcaacctccgcctcctgggttcaagcaatttttctacgtcagcctcccgagtagctgtgactacaggcgcgccaccatgcccagctaatttttgtatttttagtagagatggggtttcaccatattggccaggctggtctcgaactcctgatgccctgatctgcccgcctcggcctcccaaagtggtggggttacaggcatgagccaccgcacccggcctttatattacatacattcaagtagaaggatacatgagagcagatcagaggtatgtgtgaaatttaaacacatattatgaggctaaaccaagtttcatctgttttattaactcctattgcctgactttgaagtactcagtaatagttgatgaatacagaaaacaatggtaaaggtcaggtagatttgatcggatttgagttatgtgttagtagagagctatttaaaggtttgttgttgtttttaacaggagtatcaagtgagattgatttttcatctcttcaccaggctctctgttcttttagaaaggcctgtcagctagctccatccctaacactttcagggatgttgacccctagctggcaaaacttgtgtttaaaatcccaaatattaagcagatgaaaaacttggatactaaatactttcataactcatctccacgaatttgtacgtctgagggagcaatacacagctgcaggtccatcaaggccacaaaagctaactacagagatagtcttttagctattttgaaatcagtagggcctgactacagccatctgtcgcatacccattactcttactaaggtcctgctggcgtcagagaggtggttctacgatgcacggtaggagtgtgtctggccagagaagtggggaggctcagctgccttgggaggtgcaagtagtagcgctaggaagctgctgctaggcctctggcaagaacaccaactgatccgcaatgcgcctggccaaactgcagcagcctgctctgcaaatactgcataacagaaaaagcctgtattggagaatataagaatccgcggcagaaacggagtgcgcgacgattctaaggtttttacccagcacggctcccccatcagactgcaaatcccagcattcactccttccacgggagccaatgaggaagctactagttcccgcagccaatcacattctgagccagtgtatcacccgactgaattctgggatttgtggtttttacgtggcaacattacaccacggtggctacggcaatgcaggccacgcgtctgatcccaaacgacacctccctgttataaattcttatgttggttccgcaagctaactccttaactgtcgttactcccaggcttcctccttctcaaagctcgtaatctttttctcttaatgtcattaaacaatcaagttattttcagattaaggcccacttgctccactcgtcccctgtcccttaaccgtcgctttagagtctcgcgagaacagccccttttttttgtgttgtcatgcctccaaaaggcgggtcacatgaaaactgacacaggcttcagccaaccgaattgttttttaactctcttctccacagcgtgcgtggggaggcctccgtgaactctgaccttagctttccgtagcgcccgcgtctgccgcccccgcccccggagcgaaggaggcgggctttggccttttgccctagggagcgagtgcggagcgagtgggagcgagacggccctgagtggaagtgtctggctccccgtagaggcccttctgtacgccccgccgcccatgagctcgttctcacgcgaacagcgccgtcgttaggctggctctgtagcctcggcttaccccgggacaggcccacgcctcgccagggagggggcagcccgtcgaggcgc

SEQ ID NO: 9983 - DNA, 2300 bp, Homo sapien
cttaatacctaaaaatctgactgttaatgttcagtctcttaccctgtaaatgctgacattgcatttaaaagtttttttaaatttgtttttaatcatgccagagtagtgaatgccttcatttcataaatagttatggagttccttagttcatcaaccagatggttaagtttttgaagataggggccatactgtctttgttattcaataattttgaatacagtgacttcttaatataggggtccttaaaccctgggccatggacccatacagatccttggcctgttgggaactgggctgtacagcaggaggagagcagagggcgagccagcattactgcctgagctttgcctcctgtcagatcagcggtggcattcgattctcataggagcacgaaccctattgtaaactgtgtgtgcaaggcatctaggttgcatgctccttatgagaatctagtgcctgatgatctgaggtcgaacagtttgtcctgaaactgcctcccctgcaaatctgtggaaaaattgtcttccatgaaatcggtccctgctgccaaaatggttgggaactgctgtcttaatgagattcatgtaccaaacttacctactaaaatctatgggaagaacacaaaggaaggactttcctccatcctcaagaaatggttcaattggtggacataatgcaaacttgtaacaacatccataatagtaatgagaaaagtatatgcaaggtgctttgggagcacagggtagtgtagtattgacttgttttcatctttacaaccagttactttatgcttttaacatttagacaagtatataaaaggcacattgttttataaatctcctcaaggaaattcaagggcagtggaaattcttttggttcatgaggtggtgtttggtaatagaaagaaagggtcaaagttggcaaagtgatgcaggtttagtgtcctttatctgaaatgcttgtgaccagagtgtttcatattttgtatttttccagattttggaatatttgcatatacaaaatgagataacttggggatggaacccaagtctaaacatgaaattaatttatgtttcatatatatctcttatacacatagcccgaaggtaattttatatgatatttttagtaattctgtacattgaagataggaagggaaaaaaataataattctctgcacgaaacaaagctttgactgaccagcacatgaggtcaggtgtggaattttccaccatggcactcaaagggttttgaatttttagatgagggatgctaaatctatatgttggatggaacttccattgtagaaaaaacttcttgttaggagcagactcctaattcgcctattgattgattgattaattgagacagagtctcctctggcccaggctagagtgcagtggtacaatctcggctcactgcaacctccgcctcctgggtttaagcaattcttgtgcagcttcccaagtagttgggactacgggcacataccagcaatgcccagctaatttttttttgtatttttagtaggcacggggtttcaccatgttggccaggctggtctcgaactcctggcctcaagtgatccacccgcctggtcctcccgaagtgctgggattacaggtatgagccactgcatccggccttaccttattattaaaaagttttgtgccagccatggtgttgtgcccttgtagtcctagttactcaggaggctgaagtgggaggattgcttgagcccaggagttcaaggccagtgtgaacaacagtgagaccctgtctctcaaaaaaataaaaaataagttttctgtatatttgtcaactaattagctttaggggtatgacgtggggtatgatacggaaagcagcttcagtttcatgatactaggatggaaatcaatgagaaaaacttggaaaccaactgcaaaaatcttaaccaatcacaattttttatgtcatttgtatactatttatgatacagacatggtatatactttatcttgaaagttctaggcggaaaggttaacatttctacttatgtattttcctgtttttgtgcttatctagctttttttaaacaatttcttctttgtattacagtcttggtcctttagtgagtaaagtgaaagaataccaagtagagacaattgtagataccctctgcactaacatgctttctgataaagaacaacttcgagacatttcaagtattggtcttaaaacagtaattggagaacttcctccagcttccagtggtaagcaagagcacatttttcttcctatttctttttgtgtggagg

SEQ ID NO: 9984 - DNA, 2300 bp, Homo sapien
ttaaagcgtgaagccttattttccttagaaataaatgttaaatgaatattttgattgaacttgtatgtaatatgaatttcagtgaaggatttttatatgttggagcaagattttatactgtgtgtaccatgactgcagactagagttatgccaacctatgcagtgagggaagagataaccaaaatattgcatcctgattagttcactgtttccagtattaattttactttgcgtcagtatttgctatgtaaaatgtaacaccattcagacatagctgtggaatagttcagtttactagtagctttaattaaagctgagccttttacagctacttggtaattaaacaaatttaaaactatgattaatgtatttgttaactaattagcttttggcctttgatagaaatgtgtaggtaatataaattttagaattggtcttgactactaaactattgctaaaattattaggctaaaagtttttgtctcatctgcaaaaggtgagattatcacctatttcatgggaagatttagattggtaataatgtagtctgggggccgggcgaggtggctcacgcctataatcccagcactttgggaggccaaggcaggtggatcacctgaggtcgggagttcaagaccagcctgaccaacatggagaaaccccatctctactaaaaatacaaaattagccgggcgtggtggtgcatgcctgtaatcccagctacttgggaggctgaggcaggagaatcactttaactcaggaggcggaggttgtggtgagccgagatggtgccattgcattccagcctagggaacaagagtgaaactccgtgtcaaaaaaaaataaaaaaacaaaaaaataaataatgtagtctgggtatgttatttccactcatgtacttgaatcattcactgtgctagttttcatgctaaaggctgcatacgtaaactagtctaaacatcaatcatatgggaggtcttactgttccttctagtttgtagatgggagaactgaaattcagagagattaggttaattcacccaaagttgggtgagtaattgggtaaagattcaaatccattttcttttaatcgaaaaaggatgctttcttcaatgtatcataccagtgttattttacctttattaaatagttacttatttcaataaaacatttcaccaactcagaagtatgttatttataattgtattagctatgtatatattttttaattttttttctctcattgaaatgtgtttgcattgagccaatttccggttcttacaagaatttttttaaccattcagattcttactttcacagtgacttgttctttttcttctctcatcagtaacaacatgacctactgtaagtagtaacaattctgatttatgagtcctggaacgaggtttctgctttataatgaagttacggaatctttgggttggaaaggaccttattaaaagttatggctgatttttttttttaaagaagctgctaagcattggagctcagaatatatgctttttaattcactgaagtttaaaaggctagtctactagaaaagactcaaatagagaaaactctccttgctgcttttcaatctaggtgtgcaagctctacagctactactggctccatagctagcattcataccaatgcatacagattatccagtagatagcatagttatctatctactattactagttatctataatatctactattatccagtagaaagaatctgctgacatctgtattgttttctgtgtcctttaccccttctgaagttgtcatctctaattcttgtttatgtccagtaagttattttattgaaaagcagcctgttttgaaagatgtgtttttctcccacagatctcctgtgtctcatgatcaggtgtggagttgttaaatatttggtctaattcttgtttatttctataagtcattttattgaaaagcagcctgttttgaaagatgtgtttttctgccctggatctgttgtgtctcatgatcaagtgtggagttgttaaatatttggtaactaccatgaatataagagggaattcaacatgcttgccttgaaattattattggcttcttattcatgcaggctctgcattagctgctaatgtatgtaaaaagattactggacgtcttacaagtgcaatagcaaaacaggaagatgtctctgttcagctagaagccttggatattatggctgatatgttgagcaggtaagtgtgcctgtttatttccgttactcgtaatacagataactacattaatttactaaaaac

SEQ ID NO: 9985 - DNA, 2300 bp, Homo sapien
agcagctgggactacaggcatgcaccaccacacgcagctaatttttgtgttttttgtagagatgaggttttgccatgttgcccaggctggtctcgaactcctggggtcaagtgatctgcctgcctcagcctcccaaagtgccgggattacaggtgtgagccttcacacccagacttgtggtttttgtttttgttttttaatattttcccaagccaatcaattagatatcctataattggggatttaggtctagattcccggagtcagtttggcaatgtaaatttcagtgctgcattcacttagctcaggtttcagttgcattggtagataaagtgataatttaatttttctttcactatgaattagtctcaactaaatttgtgttctgaatatttgcattgaggtcagaggccagacatttagtagtggccaggcatcttgaattcatttgttgttttctttctttttttattttattttaaggcaaggaggacttcttgttaatttccatccttcaattctgacctgtctacttccccagttgaccagccctagacttgcagtgaggaaaagaaccattatcgctcttggccatctggttatgagctgtggaaatatagtttttgtagatcttattgaacatctgttgtcagagttgtccaaaaatgattctatgtcaacaacaagaacctacatacaatgtattgctgctattagtaggcaagctggtcatagaataggtaagaaatctttaaaagttttacagttttctttaattaaaaaaattaatgcatgtttttaaagaaccattatgcttttcttaggtgaataccttgagaagataattcctttggtggtaaaattttgcaatgtagatgatgatgaattaagagagtactgtattcaagcctttgaatcatttgtaagaaggtaagtttttaagatctctattttttacaaaaagtttttccttaagagtagaatcataaggtctacattaggtgtgtgaggagaagcggccttttggatttcagatataacagacaatacagtatttgaaactaatgtcatcttgctattataaaatgtggtcatcacatttattttgaaaattttccttgtcattgttaggactttatttaaagaattttggaaaggtatttataattattttgggtttactttagaagggaagaaatgccagtgtaataatgtagtctgtactgaaagcccagcaggataaattattcgtcagaaataagtagtgaattgccttttcaacaatttcttaggtcacatccattttgctaggtcagtgattctcaatttggaaactgattctaatatattttttaaaagcttagtaaaagttgtgtatttgtgtactagaaggcaatacaagataagtaacattatttttcctcttgactaatgcagtagcatggtgtcttgagaccttactggttgttttctgcatttatcccttgacactcctggttttgagaagtggcttttaatcataccatattctgaaaatcagaaattgttagattcatttttgttcctttagttgagaaacacaaagtattcttttatttgctggccctgtgggcatttatatgttctgtcctctcattacatcggtagaagaccaagcctaggtgaatatgcactggcatttccacaaataatcctagttactgaagagcacattcatctgggtttggttttctaataacatgttgattatataccgatttctgtctatactgccatacattaaccataacatagttaaaatcgggattaggggagttcatcttaaaattgattaaataagtacaatttgaaaggtaaaccttttaaaatagtaagtccatgggagagaaagagcaagaatcattggtgctagatagtctgggaactactgtcctatgttattgctggtaataaagcaaaatgtggcaggtaatgaatcaaggagtaaaatgcagctcttcaaggcagcttttgtttttgtctttagatgtcctaaggaagtatatcctcatgtttctaccattataaatatttgtcttaaatatcttacctatgatccaaattataattacgatgatgaagatgaagatgaaaatgcaatggatgctgatggtggtgatgatgatgatcaaggtattgcaaattaaatagaatcttttgagtttttgtgaaagacacttatagatggagatgattcttagtccaaattgtactgtttgttttatttagttataatagtgaaaagggaaatgatctcaata

SEQ ID NO: 9986 - DNA, 2300 bp, Homo sapien
aattagggtatgtgtccatgtagtttggttgttgggatttttcttggctttttgtttttactctgtacttgctttgctgttgaggtattctagaagctccgttgatagctttgcatccgtaagatttgttagtagagaccctgtttgttttactgactagcaaaacattaggaagtttagagcagatgtcttttaatcatacccctgctgcttgtagctacatttgaagtgaggttgattccttctaacagcaaatggaaagtaagaaaaggacctgttcgatggttgcttttccataatttgtcttgtttcctttgatttttatctgtgctgttgtcattcaaaataccatttataaattaacctcctaaattttttattgaaaatatgatttgattaatttctttctttctcttttttttttttttttgagatggagtcttgctctgttgccaggctggagcgcagtggtgctatctcggctcactgcaacctccgcctcctgggttcaagcgattctcctgtctcagcctcccgagtagctgggagtacaggcatgcaccaccacgcccagctaatttttgtatttttaatagagacagggtttcaccatgttggccagaatggtctcgatttcttgacctcgtgatctgcctgcctcagcctcccaaagtgctgggattacaggcgtgagccactgtgcccagcctattaatttctttttagtcatgtatgtttcacaattaaaaattaagtagggaagactattttgttgctctctggaaagctaaatgatagcttttctgtaatttcttatcagtatcaagcaaatatagttacaagagaacatatataatacatgcaacaaacttgatcttgtgttagcaatagcaatagatagctgaattaggaatttaacaaaaaaagataaactcttccctttatcctcattctccataattcatgttaagtgtactgaggaaataccaacagctgaaccagctaatgactatatgataattgcaggttcccaacattgttaaagctcttcacaaacagatgaaagaaaaaagtgtgaagacccgacagtgttgttttaacatgttaactgagctggtaaatgtattacctggggccctaactcaacacattcctgtacttgtaccaggtatgaaagaaacataaatctcttttgggacttattgtagcctttttgttaggacttagataagcttaaataattgtttccttttaaaggaatatatgtgacaacttaatatgcacatagagctaactttttaatctaacaatcttgaatacctgaagttagaaatttgtaagtaaaaggttaaaagtctcaccctaaaatatttggctgtaatatttattgtagatggtgaaaatttctacttatagaaataatataatgaagtgggaacattagcagtactataggggttgatttttaatttttctttcttaaaagtctgcacagcaatgattggattttttgttggctttttaggaatcattttctcactgaatgataaatcaagctcatcgaatttgaagatcgatgctttgtcatgtctatacgtaatcctctgtaaccattctcctcaagtcttccatcctcacgttcaggctttggttcctccagtggtggcttgtgttggagacccattttacaaaattacatctgaagcacttcttgttactcaacagcttgtcaaagtaattcgtcctttagatcagccttcctcgtttgatgcaactccttatatcaaagatctatttacctgtaccattaagagattaaaagcagctgacattgatcaggaagtcaaggaaagggctatttcctgtatgggacaaattatttgcaaccttggagacaatttgggttctgacttgcctaatacacttcagattttcttggagagactaaagaatgaaattaccaggttaactacagtaaaggcattgacactgattgctgggtcacctttgaagatagatttgaggcctgttctgggagaaggggttcctatccttgcttcatttcttagaaaaaaccagagagctttgaaactgggtactctttctgcccttgatattctaataaaaaactatagtgacagcttgacagctgccatgattgatgcagttctagatgagctcccacctcttatcagcgaaagtgatatgcatgtttcacaaatggccatcagttttcttaccactttggcaaaagtatatccctcctccctttcaaagataagtggatccattctcaatga

SEQ ID NO: 9987 - DNA, 2300 bp, Homo sapien
ctgtaccattaagagattaaaagcagctgacattgatcaggaagtcaaggaaagggctatttcctgtatgggacaaattatttgcaaccttggagacaatttgggttctgacttgcctaatacacttcagattttcttggagagactaaagaatgaaattaccaggttaactacagtaaaggcattgacactgattgctgggtcacctttgaagatagatttgaggcctgttctgggagaaggggttcctatccttgcttcatttcttagaaaaaaccagagagctttgaaactgggtactctttctgcccttgatattctaataaaaaactatagtgacagcttgacagctgccatgattgatgcagttctagatgagctcccacctcttatcagcgaaagtgatatgcatgtttcacaaatggccatcagttttcttaccactttggcaaaagtatatccctcctccctttcaaagataagtggatccattctcaatgaacttattggacttgtgagatcacccttattgcaggggggagctcttagtgccatgctagactttttccaagctctggttgtcactggaacaaataatttaggatacatggatttgttgcgcatgctgactggtccagtttactctcagagcacagctcttactcataagcagtcttattattccattgccaaatgtgtagctgcccttactcgagcatgccctaaagagggaccagctgtagtaggtcagtttattcaagatgtcaagaactcaaggtctacagattccattcgtctcttagctctactttctcttggagaagttgggcatcatattgacttaagtggacagttggaactaaaatctgtaatactagaagctttctcatctcctagtgaagaagtcaaatcagctgcatcctatgcattaggcagcattagtgtgggcaaccttcctgaatatctgccgtttgtcctgcaagaaataactagtcaacccaaaaggcagtatcttttacttcattccttgaaggaaattattagctctgcatcagtggtgggccttaaaccatatgttgaaaacatctgggccttattactaaagcactgtgagtgtgcagaggaaggaaccagaaatgttgttgctgaatgtctaggaaaactcactctaattgatccagaaactctccttccacggcttaaggggtacttgatatcaggtaggtatctagattttcttacttaaaaagttttttattgatagttggttgccttaaaagacacctaataaagaagttaagccatgtctatattttcttaaacctaaaagctaagtatgtgatgaagaaaaactgtctttcgtagtatggagtgatattcaaatgacattttgttgttttaaaggatagtgtggtaattagataatggttaaatctgttctaattcctcatgataactacattttaatgttactatattgtgttaaaatgtggaaaagatgtatctaatgaattaacataatctgaagagcttgttgatactaattacaataagtataattggtgacagtacttttttcaaatggaagattctggaagagttttcagatttaccagtgtcatccccattagaacaagtaaaaggtagtaatattaatagcagtaatagccattcattcttagacattgctttctgttttagtaaaaaatttgaagatttttaagcggttttggatttagctagttctattttgtgagggcgagatcgtccactgctgcttcaagtccctccttcccagaaggaattgtttctttgaaatctaatgggattatattttgtgctcataagtaagttaattttgctcctttggattcatgtgtgcaataagaaatacccttcttggccaaggagaattctaaggcattgaagacactggtgttatttggagtggtttaaaaatgatgtccgtgagttttagtggactacataccaatagacttgcaatttatttttaactaggctcatcatatgcccgaagctcagtggttacggctgtgaaatttacaatttctgaccatccacaacctattgatccactgttaaagaactgcataggtaagtggaaacaaagataaacatactgatttttggactttagaattctcaagaaactcttgaacttagtaactagaaatatcgaggaattaaaatgcttataaaataattgtttaaaagaaaattgatatgatcttacaacttttaacaaattgcatttgcctgtattgtttgtaattattcct

SEQ ID NO: 9988 - DNA, 2300 bp, Homo sapien
tcttacaggtaaaggcaaactcagtaaagcaggagtttgaaaaacaagatgaattaaagcgatctgccatgagagcagtagcagcactgctaaccattccagaagcagagaagagtccactgatgagtgaattccagtcacagatcagttctaaccctgagctggcggctatctttgaaagtatccagaaagattcatcatctactaacttggaatcaatggacactagttagatgtttgttcaccatggggaccattacatatgaccatacaatgcactgaattgacaggttaatcataagacatggaaagagaagtgtctaaaagcttcaaaatgttccacttttttttccttcatggagactgtttgtttggctttcttccattgttgtttttgtagcatttatttcagaaatgtgtatttccataatccagaggttgtaaaaccactagtgttttagtggttacagcaacatttgaaatggaaactaaaagttaggattttatggagtatggagatagggtccagtatctatttaccctgtaatgtttaggattaaaatgttaaaattttgtgaccatgaatttctttcttttataaattttctcatttaaaaatcaaaaatcttgcaaaacaaaaaccatgtttctttttcttgtataactttttgttttcagcaacataaattgatttttagctggcagacaagaatatccatataagatttgttaaccatttcagagagtttggcaatttttaaaagataataaggtatcatttttaagtatgaaaattaacaatatccctgttgcgcacactaattttgcatgagtaagtttacaaatatgtatcgtctgtaaagcagcatgtgcagattattcataatatagaagttaaaataagtattagtgcaattttcagatatttatttttgcacagaaaacacattatctggagagaaagaaaggagaatttttgagacttgggttttcttaatgccagtgtgaatttgcagatgttttcagaaaatcaagtcacagtaacaatttgccacttttttctattataaatcttcttacttaaattttgaatatttagtttttctcagttacccatttgtgtgtgtgtgattccacttagaaattcttaaaaccagatttttctttcattccgtttggatgtctacattccttatcaaaggatataaatactgtgtatgcttttgaattttatttttaggaaaattctgaagccagctatcacaggtttgttagctaataatagtattttcttttagttgagttaggtttttccccatctcctgtagagcgaatttacatattgtattgggtaagtgttcactacttttcctgattaagggatctgtgctggggaacaaagcttttgcagtaccttatattgtagttaaaattttatttaacatatccttcagtgagctcatttcacactgtagcctcttccttaaaatttgtggtgctcctgtaacagtaagaactaattctgaaataaaagacatctcctaatgctgtgcaaacatagtttacatgtattgaaggaggcagttgttaaattgagtgaccaatttaagcaatcagatatttgaaaactgcaccctttagttttgaaactgtgaattagaaacacttttcctgctgtattactacctgctttaacatccaaatatacagtgattttaaatgataacatactgtggttattagattaacagcttgattttgaatgttcagatgataatgcagaagacatcacttctagtaaggattttgactagtgcattgatgttgaagttggtgccatttcaaaatgtggcaggtgataatcttttaccataatttgcataaaactgtaatagaagtttattttgagatgttagtatattatgtactatgcatttctgtggtatagatgttgtggatatatttaagtatttggttacatggttttacaataaattacaatactgcaggctctaggactgaacaggagactgacatgcatatgttgtgtgaatgtcttagttgggtaaagttaaatccaaatacttcaactggctttttcttcagtttgtttgtttttaactttcaagatgcatgttttgttttgttttgctttgtttttgtctcttaagccaattcatttttctaacagttgaaattcttttagtactaaagaaatagatactgctcttttatggctttagtgtttatatacctgtttatatgcatacattaacaaaattagtaacagcagtgcttag

SEQ ID NO: 9989 - DNA, 2300 bp, Homo sapien
gtatatgcaaatattatagcctgcttttacactcaaaataatatgaccatttattccttaaggaatatcctttccttcataataattacactaacagtgaccagttattgctgggtttctgaaaattgaataatctatgaactcattctatagaaaaaaatttgcatgaacatctaccggtaaaaattgtttttatctttacttaaatatacaggacctaaaacaagtactttataacataaagatgtacatctatatgttatatatctacatctgtctctccttttttataaggcctaaaaacaaatgctttattacttgcaaaccacaacatcaaaacaattttatatgttaaaaataagacaacagggaggctgaggtgggtggatcacgaggtcaagagatcaagatgatcctggccaacatggtgaaaccccgtctctgctaaaaatacaaaaattagctgggcgtggtggtgtgtgcctgtagacccagctactcgggaggctgaggcaggagaatcgcttgaacccaggaggtgaagattgcagtgagccgagatcgtgccactgcagtccagcctggcaacagcgagactccttctcaaaaaaaaaaaaaaaaaaaaaaagcaacaaaaccaataaaattcacaattatatattgatgaaatgtgacaagcattgtttagtgaatttaactgttgctcattgctatggtgcagatatgttgccttcttggtgccagtaggaccagtgctgtgagctcactcagttcctataccacttttctctgttctaaactcttaggacatttatgtgcacaacctgaaggcatcctgggctttcacttggcataaacacttcctttatatcaactctgatttccttctattttctctagctcatgacacttcaagtagtaccatctggtaccaattgtaatcataaacacagattatgaattgagttcccaaactgaatccaaatagatctttcagctgatccgtaatatggctatattaatttttaaattgattgaaaggtaaacagaaatgtaataatgttccacagagaacttccaaacctagaagacttatcatcacactcctgtcattttgagaaacactgatttattgaatgcctcacttataccaggtaactgagctggagccacttaccccctgtaacaacatatcattcccatttctcagatgaggtagccgaggtttgtagaggttatgaaatgtgatgaagaacatggagctgtcaggtgaaggagctgtgattcgaatcctggtctctgccattccaaagccagtgtccttggaccatgatctcacgtggccttccacaacttcttacaaagtgttcttctcccatgtggggtttagcatgtttatactgactgagaccagagttagagataaatgattggttttttccctttagagaaagcctagcgtttgtcatttatggtgtatttatttgcttatgaaaataacctaatgaggatggaccctttaagatatttcagtagatctggcagtagcccaggtgattggcagtagcttgccagctattaaatcattctgaatatatgaagaattgtcattttcttctcaaaagggctttgtcacgtggtgtaatccctgcacacacattggcataagcaggagctgtctctgtgcaaatccattcttggaaccaatcatattaacttgatatttcatgttttggcccaataccataaactggcacaaataacactaaccttgccacgcactaaagattggaataataaatcagccagcctgtaattatattgggagagccagctttattctttagtgagcagattgatgtatctgtttagactggttgcctttagggctctctgggaacctggtctgactttctagtgcccaggcaggcactgccccagatcactgcatatataggtgagttcccgctgtgcaggtctgtcaggaccaaactggtttccaaacctggctggcttctccgcaaggtgcatagctgtcaaaagtgaaacaaagcgaagggcttgggatgccagaaagacaaaagctcatccatcaggctcagcaggaaaggcaggggaggcagcggcgggaagccttccttagctgtgtgatcctagatggctgttaacttagcatttgaggactgtctcagatagacacaattggaccaggtaattcctttgtctgaattcatgtcatttcttcagcaatggcagaaaggacttgaagcagcaggtctaagtgggcaaaataagacaaa

SEQ ID NO: 9990 - DNA, 2300 bp, Homo sapien
taatttggaaatcgtaaactatggcttccagtaactagcatttattttattcatgagaaaacagtggcatatttagcttctactgaagtattgtacgaataacttaagcaaaaaggggtgtcatattatattaaaattgatttttttgtttcatttttttatttgaacatcagttgtatggagtactcattttaaaaaggaaaatggtatgaaaataattgttttgaaaggagaaaaaagaggtgtgagctttcttgaaagtgtaaggaaagtagtgtgatggaagtcatagtgaaatcagactgggagtcagaaaaccggttctagtgtcatctctgctacttagtagcccttttcttttagtcgattctaaacactaaatatgcttccgcatgtggatttaaatgtgatggtcgccagtgacaagcatagggggatatttcttgctagggtcagttcaggtcatgattcctctaaaggcatattattggattattttactgtgggtctactttattaggagaaggccccgaaagggtgttttgttttgttttgttttgttttgttttgtttggagggacgtaatactagggaaaattctttttgtcacaggttccctctcccagtgaccctaacttggaggcctctttaggagtcccagagactctgagagggtcacactgtaccttgaaacagtttttggcgtttgtataaagctgcggatgcgctctgtaggaggttgctatgacaatttgcaaacagtagagtggatgaaactccgcaggaggtggctcccttccgactggagtctgcactagttcgggcctgcacagtaggtccagccaggagccagagatactcgggcggggcagagcataatggacccctggccccaagagaacttcagaaactaggcacctctcgagaaggaagtgcatggcataactctgccccgtcatccgggatttgtcgggctttcccaccccacctcctctcacagttgaagtggcaaaacctgtgacctttgaacagaggcgcactgtgtgccacgcacgacgaggcgcggatgtgagacgggaaagcaatttttttttggtcttcaaggaaaagagaggttgtatatggcgaataaaaaaggcagggaaattctccacgtgtcttggaagggaagggggaaagagatgtgtcgggtggggtgagaggaattcgaggtgtcgctccctcaccgcagagctgaaaggaaggtgtgtctctcccagtggccgcgcaggggaaaggctcggagttgtaaggaaataggagatgtctctgatgtttatttttgcctagcaacccacagccaactgcttccccagctgccgtccacacgcgcctctctgcctccccttgtcctagcgactggcgagcggtcacttggtgtcagtaaaccggggagggtgtgtggtggaggtgggagggcagccccctctttcgcccctgctcagggtcaacgagctcagcggccgcccctcccgggacttgcctctccgaggtgaccctcgcacaactaagttatctacatgatgaattggggagaggggagtggctaagtcgctgggaccaagaatggggggacggggaagcagtactgtctgtgagcagccattcagttcgaagagctgaaaatgcatttatgtttaggggtgcgcatggcaggggaggggtctctgcggcgctttcggccggagggcagcagcggtaggttgagctgtagggcagagaaggggcgccgcggggccggggaggggaaaaggtcgccggagtggagccgagggaagcagtgcagatggccggagggggcggaggagggcgagcggaggccgccgagttttccggggagcggaggggcggctgcgcgcaaaccgggggactgagaggagccgggcgggaggttgggtgggggtggggtgtgcgtggccgcggccgggggagccgggggcggggcctgcggcggcggaggagggcggcggagggcggcgggggcggggccgcgcgccggcgcctgtgtgtgagtgcgcgggggcgcgcgcgcgcgggcccgggagaggctcccgagccaggcggtcttcggtcctcgcagcgcttccagctccccgcgcccctatgtgagggagacggggaggcccgcggcgcgcaggggagggcgaggcatgtgcacgggccggagggtgctgcagccgcccgaggaagaggaggacggcggcgaggaggagagcggggggctcgcggcggcgggccccggccgaggggatgcagtggac

SEQ ID NO: 9991 - DNA, 2300 bp, Homo sapien
caaacaaatacaaaataagatccccaaggtttaaactgcccagttagcattctgacattctaaaagccggcaaagcagcttttagtggataaatgggaatggaaacgtgtgtgttcctccaaattttctagtatgatcggtgagctgttttgtaaagaagcctcatattacagagttgcttttgcacctaaatttagaattgtattccatgaactgttcctcccttttctctgcttttctcctctctgttcctcttttaataccacacgtctgttgcttgcatttagtttgtcttcttccttcagctgtgtatcccagactgttaatacagaaaagagacatttcagctgtgattatgaccattgtttcatattccaattaaaaaaagaacagcagcctagctacttaaggtggggatttccatagttccaaagaagatttagcagattagagtgagttcacacttttcaggtgccactgtaaggttctctcagcctgggaaactatcaactctttctttaaaaagaaagagggttgaaaatcctctggacgaacagaagtcactttggctgttcagtaaggccaatgttaacaacacgtttagaggaggaaaagttcaacctcaagttaaatggtttgacttattcttcgtatcattagaagaaccccagagatagcattcctctattttattttactttcttttggattgcactgattgtttttgtgggaatgacactttatctggcaaagtaactgagagtttggtaaaagaatattttcttctctgaataataattattttcacagtgaaaatttcagtattttatcactaatgtatgagcaatgatctatatcaatttcaaggcacgtgaaaaaaattttttagtatgtgcaatttaatatagaaagatttctgcctgtttggacaataggttttgggtagtacagattaggataagtaagcttatatatgcacagagattattgtattacctgtaaattgatttacaagtacttaaaagcgtggtccccagtgaggccaagaaagtttccggttaagttctttaataataatcctacagtttatcttaagaaaaaaaaaaaggtttgaaaaaaacactttaatttaggcttcgttggttgatggtggaaaaaaatgctcaggaaatatttcagatatttgccaaaaaaccagtaataaggttaccttattaaaatagtgatatttgctttactatttaaggtgtcactgataaattaatttgtacttctgtgtttagaaattatagcttcttttcccttagtcaaattttttagcatattatacacatttctgtgtaatctgtggaagtgcaataatatgttagtaagttacattttaaataatgctcatgtgacaatactcccaatcaatggcttatagaatttaaagatctgtatattagattttggcttaaaggcatgagaagtataagacttggtttggtggctttgtaagaccaccagcctcttaatgatggttagcttctttaggtcattaaatcaataaaaacatataatgctgttttgctcttctaatgctcctcttccatttccagttatcttcacatttacatttaaatatacaaacctgagcctgccattattaatttccctataaaatgacgatacatgtgaacatttataaatggactaatactgcttgtctttcccccaccgcacaaaactggttcttaagatgccagcaatgaatttgagactatctttatttataaatggaaaccggaaacttttataccaaactataataatgtgcagcactgtagggcttttttttttttccctccaaatacagtgaaatttttttattcacaagagctgccacatctcagcatttagtaatagagctgctttaataaaattctagtttgattgtcatgtcaaaaaaagaaaaatgttgcatctttgtgattttaaaacataaattaatgaaggctctgataggctattaggagttggcttggaaacagtttttggtctcacaggttaccattgtttggggatgtctgagctgttttcagatctaggaatagcacagtgttgtcttgtctttggcagtctcatttggctctgtttcttgcaccaccagcgtgttcattaccacttaaatatattgctacagcagtggaacaacagagtggtgcaagacactgtagattaacggtagaggagaaattgtgcccttagtgttaacaatgtgccttttgttctgaatgccatgttgtagggcatgcatt

SEQ ID NO: 9992 - DNA, 2300 bp, Homo sapien
gaaagaacatctctcctgttcaaaccacatggcaaaatggtggaggagggatctccaaaataaaaccagggttctgttgccaagaaaaaagggaaagaaatgccaagagggcaaccggcttatgtccactctactattgaagacaggatgattttggctgaaagttacagaaagcctttctctcactggctagagcattgagagaatatattgtttcacacaataggtgatctggaggcagatcaaacttcaggcaccacaggaacgggctccagatctgcatctcccctgttctccagcctcagccttcctgcaggtatcagctttgtcttcatgccatctcttaacatggtcaccagaagaaactggggcaactgatgatgtctttttcatgtccagtgggagagagtaccaatctgatgcccaatcatgaaataaacatctttcctcttagactgcttggacccaaacttggatggagtttgcttttcctgagataagtgtgctgcactcctgtgcccattcctagatcaatgccaattgctaaggaactacaatttactgattggcataagcctagttctctgaatgaatcatgagggaagagatgttactatcactggcttggcattagactaattaggattctcccttggagcttaagagggagtttgctttccctgaaacaagtgtgctgtatgtgggatggtttctaaagtatgaaaagaagagtgaatagatgctggttaggcaactaattcagccaccacaccatccttcccagtacatattggatcctgcctcctccatgaagtctctccagattacccagaagcaaactcttagtctctgaattctttcagcacttactgctcatactaatatttcacatttaccttatattcttttcttcttattctccatctgctttgaattaccttatattcttaataatacttttatgtacatatttctcatctcctgacttaaattcttaaacgtggggtgttacccttcccactatgttgcaatatatctagcacattaccttgcccagaatattttatgctcaataaaaacctgttgcttaattgacttttaacaagcaaaaagaaccaggcagcctttaaatttagcaggagacatgtagatccagctcactagttcagttctttcttcttcctaatagaaatctccccttgctcattatctcccaggagtcgttcatgaagacatattggtaattcatctgtacttaataaaatggttagattttggacctaattaaatagtgagaaacagtgaaaatacatgacttgactaatattttgagtaaaaatctggacaagatacaaaaactaaagcaggaatacaaatttcattatggaagctgaatacggtaaaggaaacaagacctctccaattggaaaaagatgttttagtcactttttctattttaataataagaagcaccattgtgcctatccactcaaactatagatttttcagcatcttctaggtctaacctagcactcagacatgaatgttatgagttccattgctcaacactatacttttaaatttgtattctctctgaaaaatgattttatcagatttagtaggagaacttttagaatgatttcttaactaaaatctcagtgatctagcactttgattaataatttattaacagaattgtgaccaccttgaggatatcttgaggacatctgaaattttctctacaaataaatttcagtaattctgatggtaatagttaccattaatgaaaaatgtaatgtcctgatttagacatttactatggtttgaatgtttttcccctccaaaattcaagctgaaacacaatccccggtgtaaccatattaataaatggggcctttaagaagtgattgggtcatgagggttctgctctcatgaacggactaatccattcatggattactggattaatgggttaatggattaatgtgttatcataggcttggtttagttatcagagggcgggtctgttataaaagccagtttggctctctgtgatgctttctgccagttatgacacaacacaatgccctcaccagaagcaaccagaggcagaccctcgaccttggacttcccagcatccagaactgtaagacatgaatttcttttttaaaacaattacctagtctcatgtattctgttacagcaacagacaatggacaaagacaatagacaaccaaaagcgataaaagaggtcaatgttttcaaaaagaattcatcttccaaagaatgagaacaaacaa

SEQ ID NO: 9993 - DNA, 2300 bp, Homo sapien
ctctctctctctttcctgctgccttgtgaagaaggtgcttgcttccccttctccttccaccatgattgtagatttactgagtcctccccagccatgtggaactgtgagtcaattaaacctctttccttttaaattacccagtcttgggtgtttatagcagtgggaaaacagactaatgtatcaacatatgcaaatagaatttgcatatgttggagacagaaaatctctctctctctctctctctctttccctctttctctttctctcctattaattcaattaattttctcaagaaccaagtgaggaacgtgctcctattgcccacattttgcaaaaaacactgagatttaacaaaacgaagtatcttgccccaagtcacccatctaagaagtggaagagccagtcaaggccttggtctgcccgtgcctgccagtgctcttgataacacaatatggaaagtgccctttaacaatgattggcagtcagttaattactttaggatttcattctaaccttagaaaatcttccctctccttttccaataacggatataaaatagaggaacctcatttgtgttgaggacaggaacccgacacttctatctgtgtcaatagtctctggctcagtgactaccatatatgggtgctcagtaaatccgtaggagcccaatacaggacatgttcaatctttatgctagaggtgtcttgggcacagagggccaggatgacctttccaagatcaaacccatgcctcttggctcaaaccctaatccatctctagaacctggggatgtatattatataatgttctataaactttatataatttgtcctcatgatacttgcttgggtaagtatgagaattatttccattcacatgaaaaaaaggtggtcttggagaaatgctaaatgacttgcccaagttcacatagctagtaagtggcagagctaaactttagacccaggtttctttctccccagcccctctgcattttctccagcgtagtctaccaacaaatcagcactgtttacttggagattttcaaactggctgcaacgtgacctgttgaggccacacacatataaaagagggagggagctgtattctttactctgtgccagattttgctcagatatgaaaataaagctactgaaaactgtagaacagaagctgttgacactttttcctcaaagactggtaataggtcttcaagaatccagacacatgttgcagtccagtttatctacagccaagagtgtatttacaggatagcaattagctgtggtctctccagtcaaggaacaggattaacctaattagccactaatgtcaccaaatgcatgacctgaaaaggcaggcaggggctgcccaagctggaatagccagccaccaacagtagtttagagtacctcatacagaggaggagacttatttcagtagcatttcaattaaacacatcactaaatcatacagacacatgcaaatataaaaatgcaaatttgaaatacaacactttcttgtaggtgattttgggactgaaacaggggactgaaacttcacacaaccactgttttgtctccggtggattcctagggagtatctcagtgccttgcactcaatactgtttactgagtaaaggaatcaatgagtacaaacatgatcttatgaaagcaaaatcacttataaagctacatacatctctaattctcatttggttttaacttccccattgcaattaaaagtctaccttcatttccacgcatatcaaccaatatcccccaaaaagaaagttgcatgaaaaaagttgcatgaaaaaaacagaaaagttgcattaaaaaaacagaattcccaccgtgtcccagattttccaaataatcctgccattcggaagcctgttcatagccccaaagtactgaaaggccttgcaaaatgctcataggtggaacagcaggaagcatctagagccatctcagagggagccttctgcttccagaaataaattcacacattcacaggtgcttcctgttttttcaaacaccttgcccaccttctgcacaccaagcgtggattctgcaaaacgtgagcccaacaggaagctgcctgcaatttcaggtagcttttctgactcttaaagagatctcaagtataccttcagagaaatgccagcaaaaactgtagtcatttgggaaggaataagcctggaagaaaaagatacaacgaactagcacaacgagggtgagaacatttttcatgaaaatgctgtttgtaaattacatttttaaacaaataaatgtgttttc

SEQ ID NO: 9994 - DNA, 2300 bp, Homo sapien
ctactctcaggggcacaaatgaggggaaaaagaactcaagaccaaagaaacagcatgagcaaaggtccagggtactttttttttttttttttaaagaaatgactaggccgggtgcggtggctcacgcctgtaatcccagcactttgggaggccaaggcgggcggatcacgaggtcaggagatcgagaccatcctgattaacacagtgaaaccccgtctgtactaaaaatagcacaaaaaaaaaaaaaaaaaaaaaaattagccgggcgtggcgagtgcctgtagtcccagctactcgggaggctgaggcgggagaatggcgtgaatccgggaggcagagcttgcagtgagccgagattgcgccactgcactccagcctgggtgacagagcaagactccgtctcaaaaaaaaaaaaaaaaaaaaagaaatgactagtcatccaatgtgccaaaataataataaacttttattagtgattactatatgccaggaaaaattcctagcactttatgaggattacctgatttaattttcaactgaagcatggaagaagatactattatcaagccagttttacaggtaaggagactgagtcatagaagatttaagaagctaactcacaatcatatagctagatagtagaggagtcaggaatcaagtttgccccataactgcaatactgttatgtacacagtacaggtagaaatgcaaagtgggtttgaaccaaagagtggagggctttttgtgccatcccaaagtgttgtacttcataaataaattacaaaggaggagaaagaatcctatttttttttgtatctgaaagacaaagaaataaaaagttaaaaagattctctgttagtactgattatttggaacaataaattgtttagagctatgctgttcaatatagtagcacctagcagtatgtgcccattaagcgtttgaaatacgactagaccaaattgagatgcaccgtaggcttaaaatatacactgtatttctttccttttttctttttttctttttttttttttgagacggaatcttactctgtcacctaggctggagtgtagtggcgcgatctcggctcactgcaacctccaccttctgggttcaagccattctcctgcctcagcctccctagtagctgagattacaggcatacaccaccatgcctggctaatttttttgtatttttagtagagatggggtttcaccatattggctaggctggtctcaaactcctgaccttgtgatccacccgcctcaacctcccaaagtgctgggattacaggtgtgagccactgcgtctggaactccccctgggaatattctctacactgtatttcaaggatttaatatgacaaaaagaatgtcaaataccttattaacaatgtagtatattgatgcatactgaagtactatttgggatatattggtttaaatacaatatattttaaaattatatttaccttttaaaaaaacttttattaatgaggctactagatcatttaaatttacctgtgtggcttgtattgtatttctactgggcagtgctgatctagagcaatttgaaacttgtggtagatattttactaaccaactctgatgaaggacttcctcaccaaattgttcttttaaccgcattctttccttgctttctggtcatttgcaagaaaaattttaaaaggctgcccctttgtaaaggtttgagaggccctagaatttcgtttttcacttgttcccaaccacaagcaaatgatcaatgtgctttgtgaatgaagagtcaacattttaccagggcgaagtggggaggtacaaaaaaatttccagtccttgaatggtgtgaagtaaaagtgccttcaaagaatcccaccagaatggcacaggtgggcataatgggtctgtctcatcgtcaaaggacccaaggagtctaaaggaaactctaactacaacacccaaatgccacaaaaccttagttattaatacaaactatcatccctgcctatctgtcaccatctcatcttaaaaaacttgtgaaaatacgtaatcctcaggagacttcaattaggtataaataccagcagccagaggaggtgcagcacattgttctgatcatctgaagatcagctattagaagagaaagatcagttaagtcctttggacctgatcagcttgatacaagaactactgatttcaacttctttggcttaattctctcggaaacgatgaaatatacaagttatatcttggcttttcagctctgcatcgttttgggttctcttggctgttactgccag

SEQ ID NO: 9995 - DNA, 2300 bp, Homo sapien
tccagtgggtgatatggtcattcatacagaaatggccacagttttcttgagttggctgcaaaccaaagcagaggcattctaggactatatatggattttccttgtgtgatgatgatttgagggatgtaaggtatttatggaaatgtaactaccagaagttaaaaaatagccagaacccacatcaacttaatttatcaatattagccacttgagttatcaatattagccacaagttttgttggtacacaccagggatctgaaattggctgctcacggcagtatatggctctgggaggtgttttgtgtcatccttttattgcactctgtgtttatagcacagtgtgttaacaggctatgtgattagacagactttaagactggtgaccatataagcatattagccgcaattatctggtatctacccacccagtgtgtttgtattaatcctcgccctctaagggcatttgagcttttgatccctccaagttcacactgtttctttccaaaggaacttataatactaggcattcctctgctcaaataaataaataaataaataaataaatccctttgtgtatttcatgtcctagttcaaacatcctttcagccactcccaactgaaacgacttctttctttttctgaatttcataaaatttcagtgaacttcactcagcactcccagtcagctgacttctgctatagtttttttgtgaatagttctcatctcaattgatagggtgtgtcgttaccagtgatcttgctcctggggaaataaggcttggattcttccaagagatccactcatgttttgaaacagcagacatcagtccaagcatttttcttattttccctttttcttcttggttgttttttttttgttttttttttgttttttttttgtttttttgacagccctgcttgctttcatttggaatttagtcttgggttctgatgcttgttattgactgactagttttgatgactctcttaactcacaaccagatttctagtgttgacttatccctgatacacattaactctattcattctaggctttagtgacctatctctgcttctcagaatatgactctgggctgccctcttcttatattggggctgctacccagaatgagccatatttactgtctaggaagaactgggacagaaatgaggatgggagtttatggagaatcctccttggtggctccctcatacctagcactggtttttgtgtaggcaagtctttaataaaaatgtgtgaatggaagaaatttaaaaaataaagcagttatggtagcacgtcatgatgtgacaaaagtatttactcaattaataatggatgcacttctttagatgaggtgccatggtagatgctgtattcaaaggtgaaaatatacggtctctttcttcaaggaatttgcactctcctggaagttgggagttataaggaaagtctgagtggtaaatttggacagagatgacagagaacttattacattgtggaccttagtcccaggtccagttccaaacatatcttgaatatgttaaggggagttactgtttctgcactggaaatgttctcgctgctatctgcagaataatggcctctgggggaagctgggtgaaggatgtggcaagcaataaacacaagacccatttgaatcgtgagcagatttcctggggctgcccatttctacccccttgttaaattttttctgggattctggttagaaaaggagatttttcacatggggtttaaaaaattatgacacagccccctggaaatcatcctgtttttattggcatgccttttaaaataatgcaagctgctgtgataggcaactgaaattctgaattcttttggaaatgagaacgcaatcttaccagtaaggctgagcttttaaataatgtcagttgatggtgtgatcagcgttttttgactatgaagcaagctcttaaaaaaatagaacaaccaaagtgatcttcctctatataaactgtaaattatctttcacagcacctcattggactggtggctttgagggctacattaagtaggttatcctctcatctaaccggcattagtatctcttgggctgctgtgagtgacacacgctgagtggggtgaagggaaatgctggtgaatttcattttgaggtgtgggttgctgttagtcactctgtctcttgccattgccaagcacaagcaatcttccttcaccaaaagttgttacccaaggggaacattgtcccaagctgttgacgctctctatatcaaagcagcatggctcaaagcaacg

SEQ ID NO: 9996 - DNA, 2300 bp, Homo sapien
ctcttctagctattttgtaaaatacaatattttcctgttaaatacagtcattctactgtgtaatagaacaccgaaattattccttctaattgtatcgttgtacccgttgaccaacctctccccatcctcctttccccacttactcccccagtctctggtaaaccactgttatattctctgcttctatatcaactttattattatcattattattttttagattccacatatcagtgagatcatgcagtatttgtttttccgcatctgatttatttcacttaacatggtgtccttcaggttcattcacgttattgcaaatgacaggattacatttcttttatggctgaatagtattccattgtgtatatataccacattttctttatccattcatccatccatctgtggatacttaggttgatttcatatatgttttgatatacgcatgcattgtggaatggctaaattgagtgaattaacatatatgcattacctcacatacttgaaatttttttttgtaatgagaacatttacaatctatgctctttgtgatttttaagcatacgatatattgttcttaactatcatcaccatgatggacaatagagctcttcaacttattcctcttctttaactgaaatgttgtatcctttgggtaacatctccccatctcgctgccccttgcccacccagcccctggcaaccaccattctactctttccttctatgagttcaagtgttttagattccacatgcaagtgtgatcatgtggtgttttttactctcactaatcttcatttttgcttctttctcctctggccaccttcacaaatgctcagtgtcctcatgtggttccgaccctttgcagtggcaccttgcttaggtctgtgccatctcaaaaagtggtctaggttttacaattatttacatccctacttccagttcttcaacactcctgatcttaactagttgtgaggagaaaaatctgattatacaaatttgcactaattcacattccttccctcagcaataggtatttgcattttgatacttgcatttgcttccttgctctgcgggagaatttccagtctagttttaggtgtatttttaaataatttgaaggtaacgcggaacctctatattcctatattcccttcttcagacatccatgtgtgtgtgtgtatatatgtatatatataaaatgttgcatatatatgtatatatatagtatacacacatatataatatatatacacacacatatatagttgttataggattatttggaaatattatgttgagacttgtgtgaagtgtagaattaggtaaaattttaagatgaactatatccatggtattcttttattttaaaaaaagtttacatgttaagaaaaaaggagatcagattttcagcattagtatttacaaacttaagttgatattgattataattcaattaatacaattttaagatatatttacttctgccttaattgttatgatcacttaaaaatagttccaaaaagggaagaaaacaataattagattagccaagacagttatttttgaaacataagtctggtttagaattcagcatgtttaaaaatgagataaaattattttaataatggaatgatctgttagctgtcattaccatttactttaaagcagaggatataggacatgggtcctttttttctgatcacctccaatgagataagaatctataaagctggtaggaaaatgagtccgtgaccaaaatgcttactcagccactataggagatcaaaacattttatactaaatctgaactctactaagacaaaacaattgtgttctttgaaaaatatgtagggtttagaaaatttctgggatttgtctgtaaaataccctccgggctctaatagtgacgttttagggaaacacttgcatctcaaggtggaaaggatagaggtggtgttttgtgggctcctgtggtggttaggtcgttctcagaagacagtactggaaattagataattgctgatgtcatatttttcacaattaaaaaaaagtcagtatcctgggggctataaaagcagcagcttctaccttccccgtcacaagcagaatcttcagaacaggtaagcgtttcggcaaacttggtacaattggttagtttgatgaaatacttcttgactaattttgttccttcacgttgtcttcgaccaggttctccttccccagtcaccagttgctcgagttagaattgtctgcaatggccgccctgcagaaatctgtgagctctttccttatgggga

SEQ ID NO: 9997 - DNA, 2300 bp, Homo sapien
aatatttaacaatagaagtgtagtaattgctcagaacattttctttgccttaataaaatacgctgaaaataagccaagggaagaaaagctaaacaaattgaacatattgggtattcagaaatgtgaagaattttctattaaggcaggaagaaaaaaaatcatgtcagggaggaagaaaaaaacctgtagaactgacaacagagttgccttaaagctaatgtctatgtcatatgaaaatatgccaacgtttattttgattataagctatattttgattacaaaactgttattcaaaacatagtaatgagtacataaagttgacctttggatgttaataatatatgtgaaatgaaattaaaatcatatataactttgctatttttttgtcctgtaattcaactttatgttttgttaagtaattgaagaccaaagttccgcatatttaatcaacaaaactaaactaaaataatttttgttttaaggttttccacaataaaagccagtttgttccaccattcaaaggtaactcagtcatccatgaaactgaatacaaaagaaatttcaagggtttatctccagtgaaagaaccaaaattaagaaatgatttgagagaaaacagaaatcttgaaacagtgtctcctgaaaggaaggtattcatcaacttttaaccttacaaaacaaaatccccgttattttagattctccacgttttcgtttacttactaccacctgggagtttttggttttcactagttcattaattcatttgttcatcaaatgttcattgagccagctactaggagcagacatgggttggtactgagaatacaaggctggcaaatagccccaagcagctcttgggctagtggggagacagacataaataaaaatgatacagcatgatgagtacttaacaatacaggaagtaagtctaataagtttagtatcaaagtcaagtaagtttaatatcaaatgactggatttacagtaacctccaggggtaacagtagtgatagaaatacttattttaagttatggaaattaaacacatacatacttatatgtattttatttttatttatttttttcgagacagagtcttggtctgtcgcccaggctggagtgcagtggcacgatctcggctcactgcaacctctgcctcccggattcaagcaattctcctgcctcagcctcctgagtagctgggactacagatgcacgccaccatgcccggctaatttttgtatttttagtagagatgcgggtttcactgtgttggccaggctggtctcgaactactagcctcaggtgatccgcctaccttggcctcctgaagtgctgggattacaggtgtgagccaccacacccggccatcacatgtattttaaaccaaagctttagcatgccaaattatagccagtataattcacatgatttacctcagaatatacaaacaactgcttctgtgtgatattacagccatttaatttgcagaatcaggctaacatgattataaattacaggtaattggggtataaatactatttttgaatctcctggaatgttgatacccgatactttatggtcctaaaaatagaaagtatgtaattacaagtaaatatgactaaaagtaaaatgatgtatacacacacacatatattaggcctatgatattattggagaaaaaaagaattgttattcagtaaagcgatttggtaactaattcatcaggatcttatgtttaattactgtaacgcaattgtaaatttagaatatcaaattcagtatgtggtaacattatttagatatgtatttgttaacttaaaaattttcttccttagccaaagatctaaaatctttattgttagaaaatgaaactatatcctcagctaaacttcaaaaataactaaccaaatatactaaaaatttcaaaacttctttgttgatttcttatggtttttattttctttagtatctaaagcttctaaaaatagaaatgtcattaaatattcaagtctaactttataacatgcatgttttcactttaatgtgtaacatcttaagcataaaaagcttaaatgatttccatttcagagtaataaaatagacgatcgtttaaaattggaagcagagatggaattaaaagacttacaccagcctaaaaggaagcttactccttggaaacatcaaaggcttgggtatgtattttaataggaaaatatggtatttcaatgattaacatggtgaaatatttactttcatttcatttctattaggaaggtgaattccgaatatagagc

SEQ ID NO: 9998 - DNA, 2300 bp, Homo sapien
cccagttgctgtgcccagtgaagactcagtaccaagctaaagtggctgtgatagccagcagcaagagtgacacctacagatgcatggctattggaacaaggggcagtgctgcccggcatacgctatgtggttgctgcgagcacatgtgaaatacctcctagggactccccaaaacatgggtggagctttgtagggtactgggtactgtttcctgcagtagcagagaagataagagctggtaaaacacaggctacaaaactcatttactaaggtagtcacttttttttttcccattcctatatctttgcctcttaaacttgggtaggcttttgtttaacaatagcaaagtaaaatcttcttccttaagtctttatgatacttctctagcaagcctgggatgtgactgagttatttttacaatctgctgtttggttttcctgtcatttactccctgctcagcagagctcttctgcagtgatcattgcgcttgtttagcaggcaggctacattctacacacttgcttttgctgatctcaccttagcattttgtggtaacaaagctgtgtgcacaaccaaagttgtgcctttcttactctgtaagatgggctgccttcctgcagatgacttttgttctatgttccactgtgtcttgtttgtgccattcttaatttacacgacagagatgctgtcatcaccaattaacattaatcaagggccccctggatgcatggctgcattgggactaatttaatatgctctttgttccagatatcaggtggcttcttcaaatgatttttaagtatctcgatgatgatgaagaacaaagacatcaatcaggattcaggaagacagcttttgcggaaaatgcttaaagggaagcatcaaggattggtgttgatatttgaaagtttaagagtggtatacttttattcagtcaacacatgacaaatgtaaaaggcactcatttgttgttcctggaagaagcctggcagcattccattcagacatctgccctttcatcgtcccactttttacttattgcagtcctttcagtctgaatatttcctcctgacgcatcttctgccgtccgaaatgactccctgctcccagatcctgtagcccttattattgacacctttcatttagaaatttagcacatgtcacattacaccattattgaataaataatgaataaataaataaataaagatgtatgtccttcccaagtatatcagagaactatctggacaatttctttctttcccaattctcagaatcagcagtattctgtcaagaaacatttatcgacgatgatggcaatagtcgattaaaatcagatgaagttttatttttaaaaaaaggttgagcggagagacaaggctgaaggtttggaagttgagacaaccatcttcaataaacgttttctcatctaagggctgtatgtacatcattttggggaaggtagagattgaaggaggaagaacatcactggaggaagagacagcagtttgtctttcgagtttcaataaagtttcaaaaatcttgcctaagttatatatttttttggcctttcccttttgatgtgacaataaactgtaatgcggctgtcgtttgtacgaaccgatattcagcagaataaatctgagcactttcagaaaaagaagcgttcggttttctcatagatgttagcatgaagaacacactttgacctttgatgctgtcaagcacctgggccagcgaggctggcggctggcgaattccaccagcaagcagacgcattgctgcgcaggacccggcgaaccagggaccggtccacccaacccaggaaggcacccccggggtcccgcccagcccggttccgggagccttattggccggccttccgcccgccatctctatcagccccagggatttggcaagggaggtaggcggctccctttcggccactcattggtcaaatcctaatggaggtaaggcactctgcgagtctctattggtccctaggctccaaaaagggcggggaaaaacagaccgacaggcctctaggcgggaagcgcggagtgcgccggcgcgtagtcggggacgccgggccgaggctttgctagggaacactgttatcgccccgccccctcggagctttttctccagttaactgtcggagtagcgggggctccggcgccgggcgacatgccggtgcgcttcaaggtgaggctggggtccccgggccggaatgtggctggggggagccatggccggggaggtgtggagcgccgaggtcacgctgcttttctgcgctgcag

SEQ ID NO: 9999 - DNA, 2300 bp, Homo sapien
cgggaggctgaggcagaagaaccgcttgaacccaggaggcagagattgcagtgtgccgagattgcaccactgtactccagcctgggtgacagagcgagactccatctcgaataaataaataaataaataaaataactgcagattaagtccagattgctactattattctttctgaaatcgccagtctttctactgataatggtatctgaagtatcaataagggaccaaaaatttttcagaacataaagtcagtttcctctcctttgtggcttataattgttgactcccttaagagatttttatctcttaaggcctggcacggtggctcatgcctgtcatcccagcactttgggaggccaaagcaggcggatcacaaggtcaggagttcgagaccagcctggccaacaagatgaaaccccgtctctactaaaaatacaaaaattttccgggtgtggtggcgcacacccataatcccagctactcaggaggctgaggcaggagaattgcttaaacccgggaggtggagattgcagtgagctgagatcgcaccactgcactccagcctgggcaacagagcgagactccatctcaaaaaaaaaaaaagatttttacatgtattttgctggagcaattagtataaaatcttagtatcgtgttattcaattcatccttcaacctctcaacttctattaattgaatgaatgatggttgacagtgtagcatgatatgtccaaatgtaaaacactgaatatataaatatgttgttttagtatcattgagcactatctatggaataagtttcaggaatcgtatgtattttagttaatcatgctgtggtgatgctgagactgactcattccaaattcatgccaacctccttctcctactgcagaagctggaaaactaaaaacccctttgaccttagacccctttgcaactgaagtgtgggtataatttacattctgctgatcagaagcacttgcataaactgagttagatgggaaaaaagcagagcacaggtttgcattgctgtaaatcatgacagtagcagcaacagcagcgtagttctggagttggcagctctaccagcagcttcctggtcatagcagaggtgaagtcggagcttgtagcaaaggtgtctcaacttagcaggcagattcttggttccacgacttcctgactgtaggctcctttagtgagtctgttctgtgatgtggccctagagtctacttcttcagctctcataatgattctttaagccacttgtatcaatcgtcggttgccacaataatgctgcataacaaacactctcaaatgcagcaacttaaaataataaccatttattattgcttatgaatctctgggtcagttggccagttctgctgatgtaggttgagcttagctaatcccactaagcctgcttgtggatttgtggccagctgatgggttagctagaaattggctggtctcagatggcttcagctaggacaactcctcatcgttccacttgggctctcatcttctagcaggatagcctggattgttttcatggaaaaggaaagattccaaaaggaatccaaagtacggaggattccaaagtatgtgaagcctcttgaggacttggcttcgaaacagcataccatcacctctaccatattttgttagccaaagcagattaaaaggccatcccagattcaagggctagggaaatagactcaaccccttcacggaaggagtggcagagtcacgttcgttgtaaaggaagaatgaagaactggtagactagtattgcaatactagtcttcctcactactgaataccctgaaaataccctttctgttttgaaaagctagaataaattatattatctgaaatttaactctgaccgatacaatgccagttcagacatatgtgtgcatgcttgatgtccctcttaaaactctgtaaaatgacagtaactgaatgccagggcaaacacatgcattcatctcaatttcctcttaaaacttcatgaaatgggccaggcgcggtggctcatgcctgtaatcccagcactttgggaggccgaggtgggcggatcacgaggtcaggagatcgagaccatcctggctaacacggcgaaaccctgtctctgctaaaaatacaaaaaaattagccaggcgaggtcgcgggcgcctgtagtcccagctacttgggaggctgaggcaggagaatggcgtgaatccggggggcagagcctgcagtgggccgagatcatgccactgcactccagcctgggcgacagagcgagacaccgtctc

SEQ ID NO: 10000 - DNA, 2300 bp, Homo sapien
gagctcaaagtttcagactttcagttatcaaatttttatgcaataactgaaaagttagtaaagtcaaatttatttgtaattcactcattcattgagaagttacagtaattccaacggactgctctgaaatttgcctttgaaacttttatttaaaaaggttttctaaagaatggatgttaagtgttctcataaaaaaatgctaactcaaggccaggcgcggtggctcacgcatgtaatcccagcacttcgggaggcccaggcgggcggatcacctgaggtcgggagttccagaccagcctgaccaacatggagaaaccccgtctctactaaaaatacaaaattagccgggcgtggtggcgcatgcctgtaatcccagctagtcgggaggctgaggcaggagaatcgcttgaacccgagggtgggaggtgggggcggaggttgcagtgagccgagatcacgccattgccttccagcctgggcaacaagagcgaaactctgtctcaaaaaagaaaaaaaaaatgctaactcagccggcgcggtgagtcacgcctgtaatcccagcactttggggggcccaggcgagcgcatcacctgaggtcaggaattcgagaccagcctggccaacatggcgaaatcccctttctactaaaaattagctgggcgtggtggcacgcgcccgtcatcccagctactcgggaggctgagacaggagaatctcttgaacctgagaagcagaaattccagtgagccgagatcatgccactgcactctagcctgggtgacagagcaagactctcaaaaaaaaaggtaactctgtgaggtaatgtaacaatgtatacattacttcaaacgatcatgttgtatacacaataaatgcagacaataaacaatttttaaaaagatatttttctaaggaaatagaaattatcgaaataggtaatctactcaattaacctaaattgtaaaacattataaaacacagagaactgttataattcattctcatctattcatttaacttaggttagcttagttttcaatcactacatattcttaaacggagtgaaattagtcacattccatttatcttccaaatttatcaacgtttattaagatttatttcaagaataatttgtacagggcctaattaaattatgaaccaagaaagttagtcttaaatgacccctcaatcccttttccctgcactttgctctcttaatctcctcgcccatcaaaactgcttcaagaaaaagttctgataaatttcttgtactaagggtaagtaagaatggtaaattcccgtgttaagttcccgccctttttggaacgaggcattttggaacagaaagtgttttctggtgccctgaagtcacacgataaacctacttgcctatgggtaatcctgtgaagtgaataaagcgtccaggacatgcatttaaatacgcaatttattttagttatataaatggcgttggtttaggtgcagggtacaaacttatttagaaatcatcgatttgttaactgcgtttggcatgggaatttggaaagagttcgcccgggttaagacaccaatggataaaacacttgtcaatccaggagaaaaggcatctcaagaatggaaagacttgctggcccaggctccctcggggagctctaggtgtagaaaatgcgcgctctccgttacttctcggttactttgcccagcacaaaggacgacgcgaataccaacagactggacgagtcggtgactacagtttgcattaagaggcggcgccttttgggtttcggagggttccactggaacccacgagggtcaggaacaccgacgcgcggattccgcccaccagacagcctggggaagcgagcctgaaggcgcggcgcagctagagagaagaacctcggcagacatgccgcccagaggcagctaaggggcccgtgggcagggcctgcgctccggctgcgatgcaggccggctagaggccggcgccgaggacccggcgcgcggcggccccgccccctcggctcccctcgccccgccccctaggcccgccccttcccgggccgcgcacccgcgcgccccgcccgcgggcggaagctggagcgaggctgaacgcctgacgtcaaggcgacatcgccaaacctcgcccagattcaggcgtgtaaaccagccggagcggcgcggcagcggcaggaccgccgtggcgcctagagtagcgacccggggggagcgcggggcgacgctggctgcagggacccggtgacagcgtgagaggttcgcagagtgagtgcgtggccgctga

SEQ ID NO: 10001 - DNA, 2300 bp, Homo sapien
acccacctcagcctcccaaagtgctgggattacagacatgagccaccacatctggccgagttcttgattacctaagctatcctggtcagatacactgctctttttttcccttttttttttttttaatttccccaaccttgctagactgctggtcttacaggattttggggaattaggaagttccatggttggcaaactttcaaagacaggagcaggttaatgttagctatagaagcactgtcactcaagtgaagacagttgttgattggttggctttgggatgtgtctgtttaacaggccatttttgattgcctgagtttcagaagtaaggaaccctcattagttggttagtttgtagaagcatatcctctgaggcaaattgttattagttgattaaaatcatttaaatcagttatagtagctttgttaaccatgacccaaaaaactgtcatttcttgatcagaagttttaaaatctgttctggttgctacctttgtaccactttactgactctttagtttttttctaggaatgtaggagccttttattctcatgtaatgcccccaccctggaatccttgaagaccttctgtctattgttcatatactgaaattttataatgataagccttggtatggattgtttctttctggatatattttgtttttatttctactatttcatcatactaaacattctaagtagacgttttcagtctgggaactcatattcttcagttctgcctctgattcaagaccattttcaggttgtctgtacgttccccactttaggaataaatatttggtcttctgcttcctctaccaacatattatatttaccatttatgtatgccagggcttggccagatacgtaaatatttaggctctgttgtaactactttgctgttacagcacagaagaaaccacagacaatacacaaatgagtggatatggctgtgtttgagtaaaacttgatgtaacaaaacaggtgataggttggatttcttttcagacctgtgctctatcctggatcgggctcaaagtcatgtctgtaattctgtagttttcttctacctctgagcatcttttaataagtctgcttatagggtgctccatactagggttgtatagtaatcattttaaataaatctattttcctgaatgttttatttctgtgaaaagcacaggaatacacaactttacttagaattctttttttttttttcctttaataaggtactaggttttgacaagcttgcatcatgcgtgagtataagctagtcgttcttggctcaggaggcgttggaaagtctgctttggtaagtcattcttactttacctaagcctttcactccaagacgttctttttctgttgagttttaggttttgatgatttgtctttgttaagataaaattccttaatgactttagaagcaatataatatttttcttgtaattttattcaacttttaattatatctgggtggatcatattctctctggaacattgactccagaatgacacgagttatgctggaatacaatttgagctaagcacagagattgagagcgtacaaatacatgtctttttgcattcgcatttcagagccagataggaataaattttggtctttttatttatttatttttttgaaacagggtctcactctgttgcccaggctagggctcaagtgatctcagcctcctgaatgcttgggactacaggcacgtgccaccatgccaggctaatttttaaaattttttgtagagatggcgtcttgctatattgcttaggctggtcttaaactcctggcctcaagtaatccacctttgcctcccaaagtgctggaattacaggcataaatcaccatgcctggcttgctctttcttcttatgaatagtcttaccctgtacattttatgttagaaaatatcaaagcttataaaaagtcttcaaatattacctttgactgtccagctttacattttttaacggcacgttttctgcatcaaggaatggtatagcaagaatgaagacataactgggtaatgagggttgggaaagaggaaaaacgtagggaaaataatttgatgaatagttcagagcttagcaaagcctcacaagcaaatagattgaccttctgtctcactcataagataaaccatcttggccacttagaaaggccacctagctgagaagtgtcatgcttggaacaaactgagaagtacatacaatgtgaaatgaactgctttttcatttgtatccaaagtgatggggaggtcagttgatcctgcatgtatg

SEQ ID NO: 10002 - DNA, 2300 bp, Homo sapien
acaagaatcgcttgaaccggggaggcagaggtttcagtgagccaagattgcatcactgcactccagcctgggcaaaagggcaagactctgtctcaaaaaataaaaataaaacacatgaaggaatttcacagagctaaaggtcaagtgcctgagaaagaagtttgcccataaaatgctttgaaaagaaaggagaaggccaggcgcagtggctcacgcctgtaatcccagcactttgggaggctgaggcaggtgaatcacctgaggtcaggagttcaagaccagcctggacaacatggtgaaaccccatctctaccaaaaacgcaaaaattagccgggtgtggtggcagacacctgtaatcccagctactcaggaggctgaggcaggagaatcgcttgaacccaggaggcagaggttgcagtgagccgagatggcaccactgcactccagcctgggcaatggaatgagactccatctcgaaaaaaaagaaaaagaaaagcaaggagaaagctacatctatgaaaaagctaggcactgtcagatgtggtggctaacccctgtaatcccagcactttgggagacccaggtaagaggatggcttgagcccaagagtttgagaccagcctgggcaacaacataagaccccatttctccaaaatatttttaaaaaacgggggaggagaggaggtcaggcatggtggtgcgtgcctgtggtcccagcaacctcaggtactagggaggctgaggtaggaggattgctggagcccaggaggtcaaggctgcagtgagccgtgactgtgccactgcacgtaagccgggacaataggacaagatcctgtctcaaaaaaaaaaaaaacaaagaaagaaggaaggaaggaaacataatttaaaaaatcaagtccaaaaaaaagcaagcaagaagtaaaaaaaaaaagctcagcactgtcacaagaaatatatggcaagaaaagctggcaatttctatatacctgtgaaacccaaattgtcacttgccttaaggatcaaatgtatcaatggtgtgagcccaaaactctgttgcaacttcttcactttccccagatcttcaatggcagctttgttaaactcaacaaggcttcagttaacacgctgaggattgtggaaccatatatcacatggagtacctgaacctgaaatcagtaaatgaactgatctacaaattggttatggcaaaatcaataaacaaattaccttaacagataacgctttgattgctagatttcctgataaatatggcatcatctgactggagaatctgattcatgagatctatgctgttgaaaaactcaagttcctgtgatccttcaaattatcttctccacgagggagaatgaaggactacctattttgtattaataaaaggtataaatgccagcaacagaaaagactatatcaacaggcttattaaacggataaactgaagcatctaacattatttttgtaatctggtcagttaatagccagtcactactttcaaactggaaaaaacaaaaaccaaaacaaaaatgtgactgactccttcaagaccaaaatacaccactttttgcctagacggcactttgaaatagagggcaataccatcatatttcacgcttgcctttctactttttaatacaggtgaactttttctccttaataggaaagaacaccaagtaaagaacaaatagcagttatggaaaatagttgcaaaaactgcagggggctacagaacaaaggactgagtgtaggcagagagatagagatccccgaggtgtggggcagagcccacgcatctgaattccaagaacaggcgctttctgacagagaataccaggaaatgacttcacatttttccagactatcaacatacttcattcttcccagtaggagaacccagggcctgttccacgcccacagactttggtcaggcaaagcggccgcagggcgtctgggctaaacgcaaccaggaacacattggcaaacttttgcgcctgcgcccaccgggcgtgcacctgtaggctgaagtcgcgcatgcgctagatgggaacgttgtttcttctcccctaccccttttctgtgggtctgttttagggacagactgcttccgggtcgaagggcttgcttccggagagcgggaaggctaaaacgcggtagctaaactgcagccaactttggttgtgtgtggaaaaggctttagccatggacaggtcagtactgatggtggcagctgagcccgaagtcttgcccgtctcgcctgttggcgaaacgaaataggtgaaactag

SEQ ID NO: 10003 - DNA, 2300 bp, Homo sapien
ttttatcatcacagttggagtaaaggaccctgagtaagttaaggtatagtcattctagtagccaagtcttagatcttttgttgagaacgcactcctggctccaaatcctgcttattcttcaaagccttactcaaatcttacctgcacaaagacttctctgactttctagtactcactatgttattttctcctaaggaattatttcaacacttggaatctatattataacactgttttagataattgcttcatgaaagtgaatcttatttcccttgttggattgaggagttacctaactgcaggaattctctcttaaaagattttctgcagtctccaaaatgctttaaaccatgggtactattaaaaaacaaacaaacaacaacaacaacaaacagagcttgcaacaacaacaacaaacagagcttgtgagatagaagggtaagtaaaagaattgtggtaaattggagcaaaatgacccttcaagttatttcaacccaggaggtctcctgtcccatcacaacactccctgtcagtttcactcaaaggtctagaaactaaattgtgcggactaaaaggcctgtgtttaagacaagaatctaatatgcttttcctccacttaaaaccttcagatattccttcagcaggaaagtatgggaaacaaccacatagaaacaattttaaacgtttaacaattaaaattaaaaacaaaaaaaaaaaccttcagatagctctctggtctatagaagtaaaaatttcctaaaatgatatttacaatgtgaccccagtttaggggttcagtcttctattcagccacaaacatcactttaaacgtatactgcatgtgaccactgagctacacgtacttttttttcatatcctagcacctctgaatatgcttcttttacaaagacctacatttgcccccttgagcacctggtcaacaactacttactcctcaaagagcctcaggtaggctggagacacacagatgcaggttggcaatttggttcttgtatttattagcttccgaactttcagcaagttccttaacctcttttagtctcagtgttatatatgaaaaaaggataacagtacccatctcataggatttttcttgttctgaagattaaataagctaataatatatattcaacgcctttagaacaatggcagtcacatagtaggtactcaatgtttggagtacgaataatgtactcttattattcaaagaccagctagaaagttaccttctttgaggggtcttcctgatagttacagtgacaaggagacttaatcgcccccaaacacttaccactttacactgcttggttgtctccattacacaactaattccccgaggggaaggatcttgaataactgatctttgttgtaggcggctagcacagtacccagatcatagagggaactcagaatctgatgctggcacttgtaatcagaaagtctgggctgagatcccagtatcttcactgactggctttgtgatctcaggctggtcacttagcatttcgaacgccgcgctacctaccccgcccaccccaggagcgaacagtgttgctgccccaaagcgccgaatagatcgcagaacgtagtgggaaagtaagggactattatgatctgtaccccaccccgacgcacgccaagcggctttttccccatttgtggccaaatttcccggcatggggaaggagccttaggggaagcacccgggacctccttggcttcttctgggagtctagtttcacctatttcgtttcgccaacaggcgagacgggcaagacttcgggctcagctgccaccatcagtactgacctgtccatggctaaagccttttccacacacaaccaaagttggctgcagtttagctaccgcgttttagccttcccgctctccggaagcaagcccttcgacccggaagcagtctgtccctaaaacagacccacagaaaaggggtaggggagaagaaacaacgttcccatctagcgcatgcgcgacttcagcctacaggtgcacgcccggtgggcgcaggcgcaaaagtttgccaatgtgttcctggttgcgtttagcccagacgccctgcggccgctttgcctgaccaaagtctgtgggcgtggaacaggccctgggttctcctactgggaagaatgaagtatgttgatagtctggaaaaatgtgaagtcatttcctggtattctctgtcagaaagcgcctgttcttggaattcagatgcgtgggctctgccccacacctcggggatctctatctctctgcctacactcagt

SEQ ID NO: 10004 - DNA, 2300 bp, Homo sapien
tcattgcttctgccatttaaatgatcagatgtcagtcttagataactacacactgaactaaatgtttttagtcagttttcaaataataaaaagaaatctaatctcagcagaagctgtcagcagtaagaaatatctttatttttagggaaatacgatctcattaaatttttgcattatatttaccaaatgacagctctgtggagtgaaaaaaagtttctacaggattttattatagctaccatttaatactcttataaaaagaaaattctacaacactgattccaaacatgttacaatttttataatgatgcttaaatcgcaaaggatacgtaaaactcttttctgagcactctgtttccgtgcagtccgtgtcacctctgcctcccggattacaggggatgatatctctccaaagccactcctaaagtagtataatcaagcttatataagtgaaacgagaatatagcatttataaagaattttatcatcacagttggagtaaaggaccctgagtaagttaaggtatagtcattctagtagccaagtcttagatcttttgttgagaacgcactcctggctccaaatcctgcttattcttcaaagccttactcaaatcttacctgcacaaagacttctctgactttctagtactcactatgttattttctcctaaggaattatttcaacacttggaatctatattataacactgttttagataattgcttcatgaaagtgaatcttatttcccttgttggattgaggagttacctaactgcaggaattctctcttaaaagattttctgcagtctccaaaatgctttaaaccatgggtactattaaaaaacaaacaaacaacaacaacaacaaacagagcttgcaacaacaacaacaaacagagcttgtgagatagaagggtaagtaaaagaattgtggtaaattggagcaaaatgacccttcaagttatttcaacccaggaggtctcctgtcccatcacaacactccctgtcagtttcactcaaaggtctagaaactaaattgtgcggactaaaaggcctgtgtttaagacaagaatctaatatgcttttcctccacttaaaaccttcagatattccttcagcaggaaagtatgggaaacaaccacatagaaacaattttaaacgtttaacaattaaaattaaaaacaaaaaaaaaaaccttcagatagctctctggtctatagaagtaaaaatttcctaaaatgatatttacaatgtgaccccagtttaggggttcagtcttctattcagccacaaacatcactttaaacgtatactgcatgtgaccactgagctacacgtacttttttttcatatcctagcacctctgaatatgcttcttttacaaagacctacatttgcccccttgagcacctggtcaacaactacttactcctcaaagagcctcaggtaggctggagacacacagatgcaggttggcaatttggttcttgtatttattagcttccgaactttcagcaagttccttaacctcttttagtctcagtgttatatatgaaaaaaggataacagtacccatctcataggatttttcttgttctgaagattaaataagctaataatatatattcaacgcctttagaacaatggcagtcacatagtaggtactcaatgtttggagtacgaataatgtactcttattattcaaagaccagctagaaagttaccttctttgaggggtcttcctgatagttacagtgacaaggagacttaatcgcccccaaacacttaccactttacactgcttggttgtctccattacacaactaattccccgaggggaaggatcttgaataactgatctttgttgtaggcggctagcacagtacccagatcatagagggaactcagaatctgatgctggcacttgtaatcagaaagtctgggctgagatcccagtatcttcactgactggctttgtgatctcaggctggtcacttagcatttcgaacgccgcgctacctaccccgcccaccccaggagcgaacagtgttgctgccccaaagcgccgaatagatcgcagaacgtagtgggaaagtaagggactattatgatctgtaccccaccccgacgcacgccaagcggctttttccccatttgtggccaaatttcccggcatggggaaggagccttaggggaagcacccgggacctccttggcttcttctgggagtctagtttcacctatttcgtttcgccaacaggcgagacgggcaagacttcgggctcagctgccaccatc

SEQ ID NO: 10005 - DNA, 2300 bp, Homo sapien
caagtgccagcatcagattctgagttccctctatgatctgggtactgtgctagccgcctacaacaaagatcagttattcaagatccttcccctcggggaattagttgtgtaatggagacaaccaagcagtgtaaagtggtaagtgtttgggggcgattaagtctccttgtcactgtaactatcaggaagacccctcaaagaaggtaactttctagctggtctttgaataataagagtacattattcgtactccaaacattgagtacctactatgtgactgccattgttctaaaggcgttgaatatatattattagcttatttaatcttcagaacaagaaaaatcctatgagatgggtactgttatccttttttcatatataacactgagactaaaagaggttaaggaacttgctgaaagttcggaagctaataaatacaagaaccaaattgccaacctgcatctgtgtgtctccagcctacctgaggctctttgaggagtaagtagttgttgaccaggtgctcaagggggcaaatgtaggtctttgtaaaagaagcatattcagaggtgctaggatatgaaaaaaaagtacgtgtagctcagtggtcacatgcagtatacgtttaaagtgatgtttgtggctgaatagaagactgaacccctaaactggggtcacattgtaaatatcattttaggaaatttttacttctatagaccagagagctatctgaaggtttttttttttgtttttaattttaattgttaaacgtttaaaattgtttctatgtggttgtttcccatactttcctgctgaaggaatatctgaaggttttaagtggaggaaaagcatattagattcttgtcttaaacacaggccttttagtccgcacaatttagtttctagacctttgagtgaaactgacagggagtgttgtgatgggacaggagacctcctgggttgaaataacttgaagggtcattttgctccaatttaccacaattcttttacttacccttctatctcacaagctctgtttgttgttgttgttgcaagctctgtttgttgttgttgttgtttgtttgttttttaatagtacccatggtttaaagcattttggagactgcagaaaatcttttaagagagaattcctgcagttaggtaactcctcaatccaacaagggaaataagattcactttcatgaagcaattatctaaaacagtgttataatatagattccaagtgttgaaataattccttaggagaaaataacatagtgagtactagaaagtcagagaagtctttgtgcaggtaagatttgagtaaggctttgaagaataagcaggatttggagccaggagtgcgttctcaacaaaagatctaagacttggctactagaatgactataccttaacttactcagggtcctttactccaactgtgatgataaaattctttataaatgctatattctcgtttcacttatataagcttgattatactactttaggagtggctttggagagatatcatcccctgtaatccgggaggcagaggtgacacggactgcacggaaacagagtgctcagaaaagagttttacgtatcctttgcgatttaagcatcattataaaaattgtaacatgtttggaatcagtgttgtagaattttctttttataagagtattaaatggtagctataataaaatcctgtagaaactttttttcactccacagagctgtcatttggtaaatataatgcaaaaatttaatgagatcgtatttccctaaaaataaagatatttcttactgctgacagcttctgctgagattagatttctttttattatttgaaaactgactaaaaacatttagttcagtgtgtagttatctaagactgacatctgatcatttaaatggcagaagcaatgaattatttaccctttgcattgaaaaatggtagccctaaaatacttgttcttgaaaaatgtattcacataatttgtatagtaaaaagatggttaattctcattttagtgatctcttttctacatggaaaacttttcttaactcgttgtacagttcaggcatctcaagatgaaaattttggtaatactacaccaagaaaccaggttatccctcgaactcctagctcatttcgacagccttgtaagattttttgcttttaaagcatttaataataacggtaattataatagcaactaacatttattgtaacataattagtatagtatttggttacgatatcaataagcactaataataatgattgcagttattat

SEQ ID NO: 10006 - DNA, 2300 bp, Homo sapien
aactattctgagcaggaaaacaaactggaatgacccagagaacgtaaagtgtttgcacaaagaagccagtgggaacacagcaaggaaaagaatggtagaaaacaagactggaggaagccagatatagggcttttacaggcagacaaatgtaactattctggactttattctaaatgtgatgggaaaccttgagaatagaagaatgacatggtccaatttatgttttcaaacaatcacctgcctgcttttttcttaataagattattgatcatatcagaagatgatcttctgattgtcaagaagacacttctgtcctgttttcagctacttgtgtgggtttgttttgttttgtcttgcttttgcttacactcttcagtacttctaaattattataggcccttgaagccagaaacctcccctaagttaaagggacagtttattttaagtcttgcaaaagatttttaaaaggtcagattgtggctgggcatggtttaagacttgcaaaagatttttaaaaggtcagattgcgggcaggtacagtggctcacacctgtaatcctagcactttgggaggccaaggcaggtggatcacctgagatcaggagttcaagagcagtctggccaacatggtaaaaccgcatctctactaaaaatacaaaaattagccagtcgtggtggcgggcaccagtgagccaagatcacgccattgcactccagcctgggtaaaaagagcaaaactccatctcaaaaaaaaaaaaaaaaaaaaaaaaagtcagattgccagattgcctttgaattcagtaatatgtgtacaaagtctgtaagtcaattatatattttctctgcttagctaggaaattactgctactaagcatttgttaaaaattaaatcttaagtggatgtgattttttttctgaaaggaagttttcattttcagaaaataagtttttttttttgttttttgttttttgttttttttttttagttaaaatgccctgttgggtttttacaatttttaatgagttaatctccttttttttgctgatcagcggaacagaacagagaaccccacaatagattcacactgatatggtcatttggttttcaacaaggacatcaaagcaatccagcagggaatggaatgccttttttacaaactgcagaaaaatgatatctatgagaaagaagattaaccttgatggctccctcactccatacccaacaattaattcaagatgtgtcatagtcctaaatgtagaagctaaaaaccataaagcttttaaagaaaagcataggaagatatcctagtaacttgagaatagatagatgtatcttagctcatagaaagcaataatcaggcaaaaaaattggtttgactttatcaaaattaaaaatgtatcattaaaaaaacaccattggccagacatggtggctcacacctgtaatcctagcactttgggaggctgaggcagaaggattacttgaggccgggagttcaagaccagccaggggaacacagtgagacccccatctctacaaaaatattaaaatgttagcagggcatggtggcgcgtgtctgtagtcccagctactcaggagactgaaatgggaggatcacttgagtccgggaggtcgaggctgcagtgagtcatgattgtgccactgcactttagcctcggcaacagagcgagaccctgtctccaaaaaaaaaaaaaaaaaacccaccattaagaaaataaatgggagcaagccacagactgggatgtgtagttcataaagaactataactcaatagtagaaagataatcctagtaaaaagggcaaaaatttgaactgatacatcacgaaaccagatagatgaatggccaataaggacatgaaaaagccctcaacaccattagtcatctgagctaaaatgtacttctgtattaaggatttttgcatgtttttactgggattgtagtctgtctttcttcctttgacttgatttgattttttaaaaatagacctattaaaattacctcttaaaaaatttggtacttattatttctttcagggaaaatactctgcataccttaaaacaacggcagctgacttcttacgttggaagtgttcgtccgcttgtcactgaattggtaaatgttctttgaaatgaaagttgccttcaaagttaactgattttttttttcaggctgagaattttttctcgtggatctttgttttgctcttctaaaggtttgcacacactaacattttactctaaaacaactaagttgcattggaatctgatggaatatat

SEQ ID NO: 10007 - DNA, 2300 bp, Homo sapien
gaaactttgtacaacccagggtgactatttccaaagactgttacctatttgttgaacaacagtgggaaaactacttagcctaaatgaggaggaggaatattgtatgcttccatcgtaaccgtatgtgggtaaatggacaaggtctgtcatctatttaggaacttgttttgcatgtcccccactctgtatttgtcttttgttgtgccttgttttttgaatgtcctttaaaaaacacagcacagaaacccactaaggttgtggaattacaaaattccttcaaccttagactcttaattaggatgccctcaaatggacttgtttttaatttttatttatttatttatttttgagacatggtcttgctctgtctcccaggccggagtgcagtggcatgatatctcactgcaaacctccgcctcctgggttcaagcgattctcctgcctcagcctccctagtagctgggattacaggcgcctgccaccacgcctggctaatttttgtatttttagtagagacggggttttgccatgttggccaggctggtctcaaactcttgacctcaagtgatccactcgcctcgatctctcaaagtgctgggattacaggcataagccactgcacccagccaattggactcctttgagtccttagggagtcaatgtgtgtgttgctgcttatttaaatacagttcagttggagccccaagagtgccaatgtgctcctcacaattcccaaatgcctctcttcctgaacaccagaagtggtgggcacctgagtgggaaatttcaggcaacttaatttagttcctcagtgcctactcttgaagaactgggttttcattctagagaggaaactcagggaagggcgtgttgcctatcacaggttcgcatactaagttttaaaaacttttcttggtgtgacttatgccaaggaattatgaagactttttccttgagcattgcatgaaggctacaaagttggaacaggcatgtcctgggtgtgaaagttttaatttccctacctcatttatttatttaatttagagatgggggtctcactatgttgcccatcccggcttccaactcctgggctcaagcaatcctcccacgtcagtctctcaaatagctgggactacaggcccacgccaccatgccctacttcctcatttattttaaattttttgtaccacagtctctctttttaattttatgactgctgaattaatcctagactctgtcttaaaactaagaattgatgtattggcaggaacagctggacattcaagatgtttttgtgattccttttttaaaaatctccttttgtacctgtaatatctacaatatataatctttctttatcgacttaaggaggaaggagaaaggaagaacctgacttctgtgtgaaggaccttactgtcgatcaagactgttactcaaagttctatctcttagtcattgcacctgacctgatccaaaacatatatatatatttgtatgcacccctagagacagctgtatatatatacggttttgccaggttgtacgtttttttctcgagttgtaagtgaacacagtagcactcgtttacattgtcaaggggacatctttagagaacacattttctcactgttgagctaataatgctttgtgaatgtatgatctaaggagaaacccttgtagttatacccgatgatgctgtctgttggaaagtaaattttgaatgtctttttccaaaaataaaaaataaaaacatgctttcaataagttctttcccccctctggcgagggctactaaatttgctcagcatttaatacgtaaaattggctaacagtgtctgcacagccagagagaagttgtctagcaaatcgggtcaatgacacacaggaaacaaacatcaagaaaggggtcctagattggtccagtcaggtaggcgttaggtgaccaagggggtcggggacccagaggataggacccaaagacgcaagcgtcgcgcgcccaaggctcagcgcgcctgcgcagggtagcggccgttcagccagcggctcgggggcggaagcactggagccccgagtcacgtggctgcgggcggagatgagcggggcgtgggacgtgctgcggcgtcctagctggcttacagggcggcggcggggtgtgtgtcctctgttaagagtgctactcgcccggggttgatctgtgcatgccactcctgggtcagacggtgaggtcggcgtctgcgaggacgcggcggtggagtagaagggcagccggagacaggcccggcgccccttccgaggctaga

SEQ ID NO: 10008 - DNA, 2300 bp, Homo sapien
cacttgtttttatgcttctaatgtctactctgtcgaaagcccaaatttccttgcttggcatttaaggagactccaagttcttaaaacttcttcttgactttcatgcaagtcaaacggatttatttattgtatctcaaacagtcctcttatattttcctttctgtattttttgataattttcttgtgcctggaatattctctgcttttatttaagtctcaccatctttcaagacacaaaatatgtgtgatctctgaggcctttgtgaactgcctccagcatttactaagcaattaattctgtctctgaacttttatagcacaaacccattcgttcacttgatatttaacaaatatcaacctctatcacttatctctttttttttttttttcttctgagatggagtcttgctctgtcacccaggctggactgcagtggcgcgatctccgctcactgcaacctctgcctcccgagatcaagcgattcttctgcctcagcctcccaagtggctaggattacaggcgcccgccacggggcccggctaatttttgtatttttagtagagacaaggtttcaccatcttggccaggctggtctcgaactcctaacctcgtgatccacccacctcagcctcccaaagtgctgggattacaagcgtgagccaccgtgcgcagcctatcacttatcttttcatgcttacattttctcactgcttgagattttctttcatccagggtcaagcactgagtctattagaaaccccactgtatatgatctgatgaagatgagattatctttttaaaagccacatattaaatctcttaagttaataatattggcaatcaacttaaatcaactgagtgaccactatgtttaaggaagtttcctttctggtaggctgggaagcgggagaagggaaggatataactttataaaaaaaaaaaagctgcagaagggaaggatataactttataaaaaaaggtccttgttcacaaggagctaatcacttactggccagagaagaaacgtgttccttctttgcaatggctgtgtttttgggtttagctaactcaattctttatgtcctcaatttatgagaccgcatcaaaaacgtttttgccacatctctgtgggaaagtaggtgagtcagaatgagtgcataatatataagtatatattttaatgataatgaatgtgtagattaacaaacccaaactttgtttttgtttttttgagagtcttgccctgtcgcccaggctggagtgcaatggcatgatcttggctcactgcagcctctgcctcccgggttcacaggattgtcctgcctcagcctccggagtagagtagctgggattacaggtgaccgccaccacgcccgactaatttttgtagtttttagtagagacggcgtttcccatgttggccaggttggtcttgaactcctgacctcaagtgatccacccgcctcggcctacccaaagtgatgggattacaagcgtgagccaccgcgcccagccaaacccaaacattctaaaagcgcagagtaaccgctcccctccccgccaacggtaaccagcatcttcgttctccaaccagaacagctgtatgcaccggtgtataagcctgccttaagtgctatttttaatcttttttaaaaacaggccttaaaataactcatttgggtacaactccagcggctggtggagtgggcttaatatattaaacagctgttaattttggtttctttttggtaacagcgacacggagatccgcatttgtcgcagtttccaccgcgggcgggaagtgtaaacacaagaaatacaaacatagcgcaacggctaaaggagtgtcacagcgccaaaccttgctggctccgcgccaggccgagccccaccctctcagctcgcggccaacacccccaccccgcctcacagcccgccgcgcccgcggggcgacaccccccactccatcatcccggaggtggtgcggccgagccccggacccaattggcggaagcggggccggttgtgtgcgcgcgcacaaatgcccggatgcgccgcgacgacccgcgcgctcccctcgggcggtagggggcgcgcaccgaggcaccgcggcgagcttggctgcttctggggcctgtgtggccctgtgtgtcggaaagatggagcaagaagccgagcccgaggggcggccgcgacccctctgaccgagatcctgctgctttcgcagccaggagcaccgtccctccccggattagtgcgtacgagcgcccagtgccctggcccggagagtggaatgatcc

SEQ ID NO: 10009 - DNA, 2300 bp, Homo sapien
cagccatcaacttctagtagcattatttatagcagccaagaagatgtgaaagagtttgaaagggaagaaacccaagacaaagaagagagtgtggaatctagtttgccccttaatgccattgaaccttgtgtgatttgtcaaggtcgacctaaaaatggttgcattgtccatggcaaaacaggacatcttatggcctgctttacatgtgcaaagaagctaaagaaaaggaataagccctgcccagtatgtagacaaccaattcaaatgattgtgctaacttatttcccctagttgacctgtctataagagaattatatatttctaactatataaccctaggaatttagacaacctgaaatttattcacatatatcaaagtgagaaaatgcctcaattcacatagatttcttctctttagtataattgacctactttggtagtggaatagtgaatacttactataatttgacttgaatatgtagctcatcctttacaccaactcctaattttaaataatttctactctgtcttaaatgagaagtacttggtttttttttttcttaaatatgtatatgacatttaaatgtaacttattattttttttgagaccgagtcttgctctgttacccaggctggagtgcagtggcgtgatcttggctcactgcaagctctgcctcccgggttcgcaccattctcctgcctcagcctcccaattagcttggcctacagtcatctgccaccacacctggctaattttttgtacttttagtagagacagggtttcaccgtgttagccaggatggtctcgatctcctgacctcgtgatccgcccacctcggcctcccaaagtgctgggattacaggcatgagccaccgcgtccggcctaaatgtcacttagtacctttgatataaagagaaaatgtgtgaaagatttagttttttgtttttttgtttgtttgtttgtttgtttgttttgagatgagtctctctgtcgcccaggctggagtgcagtgtcatgatctagcagtctccgcttcccgggttcaagccattctcctggctcagcctctggagcagctgggattacaggcatgcaccaccatgcccagctaatttttgtatttttagtagagatagggtttcaccatgttggccaggctggtcacgaactcctgacctcaagtgaggtcacccgcctcggcctcccgaagtgctgggattgcagatgtgagccaccatgtccagccaagaattagtatttaaattttagatactctttttttttttttttttttttttttttgagacagagtcttgctccatcacccatgctagagtgcagtggagtgatctcggctcactgcaacttccgccttctgggttcaagctattctcctgcctcagccttccaagtaactgggattacaggcatgtaccaccataccagctgatttttttgtatttttagtaaagacagggtttcaccatgttagccaggctgatcttgaactcctaaactcaagtgatctactcacctcagcctcccaaaatgctgggattacagatgtgaggcacctggcctcagatttttgatactcttaaaccttctgatccttagtttctctctccaaaatactctttctaggttaaaaaaaaaaaggctcttatatttggtgctatgtaaatgaaaatgttttttaggttttcttgatttaacaatagagacagggtctccctgtgttgcccaggctggtctcgaactcctgggctcaagagatcctcctgtcttggcctcgcaaagtgctaagtaggattacaggcgttagccaccacacccggctgtaaaaatgtacttattctccagcctcttttgtataaaccatagtaagggatgggagtaatgatgttatctgtgaaaatagccaccatttacccgtaagacaaaacttgttaaagcctcctgagtctaacctagattacatcaggccctttttcacacacaaaaaaatcctttatgggatttaatggaatctgttgtttccccctaagttgaaaaacaactctaagacactttaaagtaccttcttggcctgggttacatggttcccagcctaggtttcagacttttgcttaaggccagttttagaaacccgtgaattcagaaaagttaattcagaaatttgataaacagaattgttatttaaaaactaactggaaagattgttaagttctttctgaattattcagaaattatgcatcattttccttcaagaatgacagggtcagcatgtggaattcc

SEQ ID NO: 10010 - DNA, 2300 bp, Homo sapien
tccctcttacatataattgaaagctggctacatggtagacaatatgatcacaaacttttaaacaattttttaagctgaagaaatactttttctttttataagtatcaaatcaaaatgtaattcagcatccacccataaagcgcaactaaaaacttttcacaatgccattaacaacttgtggttaccatcataagcctacagacctacacactaattatctttaaaacccttattaggctgggcgtggcggctcacgcctgtaatcacagcactttggggggccaaggcgggcagatcacttgaggtcaggagtttgagcccagcctggccaacatagtgaaacttcatctctgctagaaatacaaaaattagcggggcgtggtgacagggtgctctaaccccagctacttgggaggctgaagcagaaccacttgaacacagccaggaggcagaggttgcagtgagccaagattgcaccactgtactccagcctgagccacagagcaagactccgtctcaaaaaataaataaaaataaaataaaacccttattaaggatttaaaaaatcttaattatataatgccaaaagctagtccccgtctggcttaggggcccacaagctcctgctttaaagccagtttttttgtttttttctgatgtacttacatttgtgcctcacaatcaagaggttcccagcttggtggaactttcaaagatgaggcagaaaactaaacaggcaattacaatcttacttttcacgctgacaagtggtacggtggctagcccaaactcccctccctgtcccagctacctcccttatagaccattcacgatcacttaggccaggctgccatgtgacctaagagaagacagggagaacacagcatttcttactcctactaacttgcaacatcattctctcaagttgctctcattggaggctcccaactgcttcaagctgcccagtgatatttgtatttctaaagtgggcaggcatggccattccagaaaaagaaacacattcagacttgtgccttttgttacccaaatatatgatattcaaataatttctattttaacaactcataaaaatttaagatcaaataattgcattcttgaaacaattcttaatcatttattttcaacacgtgtactataaagaacctaagaaatcagacaattttaataacccataaacatgttgaatccatttgcagatttaaattttgtaaaaatagctgtcactgcctccatatatcaagtgtactatgtttataatcacatttatgctaccgatactcctcagaaaaaaacagattctgcttggttctagcttcagtattatgaactccaataatgctttgaggacctccaaaggaaaaaaacagattctactaggttctagctgaaatattatcaactccaaattgaagctgaagtattatcaactccaaataatgcttcgaggacctccaaaaaaaagagattctgcttggttgtagctgaagtattatcaactccaaataatgcttggaggacctccacaggtaaactactaatccctttggccatttattgagacagacagagagagagagagagagttttgaagcaacaatgtaccattagtaaagttgctgtgcagaattacctcagtcctattctaagcttacagttcagttgattttattgtcttcacctaagtatatacaattcacatatgggagaaaaacactaaatcaagatggttattttcactgttttgcttaagattcatatttaaatataaatcaagaagttaatccacagtttgagagatacttatattagaaattttaaatgttaaatacataattgtaaatatggtgtatgtactgtttcacatacaatgggtattgatcaaatcagtgtaattagcacacccatcagctcaaatatcatttatttgtagcaagaacattcaatacattaactatagtcaccctactctctctctctctctctctcaataaatggccaaagggattagtacttttacctttggaggtcctcaaagcattatttggagttcataatacttcagctagaacttattccttcaaatttaactctgtacccattaaaagtggttttgtgtgcaattaacagacacatgttctacccatacattgttttccaaaattattgtgtggctttaaaaaaaaaaaaacccacacaacaaattgcaaaaggcactgagataacatctgcttctagatcattgctaggctcgaaaaataaagcttgttctaccaggaatg

SEQ ID NO: 10011 - DNA, 2300 bp, Homo sapien
gacatgctggtgggcacctgtaatctcagctacttgggagggtgaggcaggagaattgcttgaatccaggagacggaggttgtagtgagccaacatggtgccactgcactctagcctgggtgacagagtgagactctgtctcaaaaaaaaaggtagtggaagaggaagataaaaaatgagtaggaaaaaaagttgaagtcaggattggacataatctgactctaaattttatggttgcctatgaatctataattcatatatcccaaattttctttctttcttttttttttttttttttgagacagggtctcactctgtcacccatgctggaatgcagtggtgcgatctcttctcactgctgcctcaacctcctgggcagcacaagcgatcctcctacctcagcctcctgagtagttggggccataggtctgtgtcaccatgcctggctaatttcttattttatgtagtgatgggatctcgctatattgcccaggctggtctcaaactcctgggctccgccttagcctcccaaagtgctgagattacaggcatgagccactgccaccagccccaaattttcttagtcccaatttcaattattctgtgttcattaggataacaaatgtttaaaatgtggtctctttatgtgccagtgagggaatcaagtgagaagtggtcatccaaggaccgcttatcctttgtcacaatgttgaagtcctacagtgaaatcatgactggaaattcttctgaggctccatgaaatcttttcttgcacagtgtctacatgaatgtgcctgcagcactctcctgattttctcacctgctgcccctgagttctcatttactaacccctcaacaacatctgttcttctgaagcagattccttgaacctaaaatgatagggagaatttgatgtagtctaagcagatcttcctatgataaggctgacatttaaattactttttttaaataagaaaaataatgactctctctcctggggagggattataaagcaagttctctcacaggccttcagtttcccaagccttattgatactgcaagctaatttaggtggatatgacagcttttaacattttaatagtcatgcttttacttaatatatattagaaatatatatctagaaaagtgataatgatatgaagtttctcaggagttggaagccagccttagcaacatagcaagaccctgtcttaaaaaaaaaaaaatctacaatgtgatgattttaagtctgttatccaccaatacatacatgataagcttcatatgcaccatgcattctcatggaaatacgtgattcctgtgcttctctgtaactcaacctcttgctctcccactccagaagatactttggaaggcaaccaaatgaaaaatgttgtaagaatcattattgcggccgggcgcagtgtctcatgcctgtaatcccagcactttgggtgtctgaggcaggtggatcacttgaggttaggagttcaagaccagcctggccaacatagtgaaaccccatctctactaaaaatacaagaattagctgggcgtggtggcacacgcctgtaatcccagctactcaggaagctgaggcaagagaatcgcttgaacccaggaggcggaggttgcaatgagccaagatcgcgccaatgcactccagcctgggtgacggagttgagactgtctcaaaaaaaaaaaaaaaaaaaggaagcagcagcagcagcagcattattccactctaattcatttttgcaatatgtaaactatttacaaataggtactttcactcttactagcatttttcagcatacctcaggactgatcgccacctgatggccacttggcagagcataagcatgcttgagaaagagtgatcttacaaactagtttgggtctgagatatcatgtgtagagacccctattggggaatttgtaccgtagggagtgctttccttattgcctctgacctaataatgtcctcttttctctttaacacatatagactgttgggcgggagctgctgctccatctgattgactatctcgtaaccagtgatggcaaagaccctgaaatcacaaatctgatcaatagtacccggatacacatcatgccttccatgaacccagatggatttgaagccgtcaaaaagcctgactgttattacagcatcggaaggtaaagaggggctggtctatctttacttgaaaacaacacaacacaaaggctcccgacaggcacctgttggccttggcaagaggagatgtgtcatggtgagagccctcagagccggtgt

SEQ ID NO: 10012 - DNA, 2300 bp, Homo sapien
aacagagtgagactgtatctcaaaacaaacaaacaaacaaacaaacaaacaaacaataaaacaacttctctttaagaaaaaaaaaaagatggccaggcacggtggctcacgcctgtaatcccagcgatctgggaggccgaggcaggcagatcgcccgaggtcgggagttccagaccagcctggccaacatggtgaaaccccgtctctactaaaaatacaaaaattagccgggcctggtggcaggtgcctgtaatccgagctactcggtaggctgaggcaggagaattgcttgaacctgagaggaggttgcagtgagccgagatcatgccattgcactccagactgggcaacagaattgagactccatctcaaaaaataaagaaagaaataaaaaattaaaaaaaaaattccaactcttggaaaattccctttaaagagttacgaattaagctggtttatttatgtaataaacgcttcgcacagttcttacaatgtgcctgccaaccttatttaggtaggtacaattaagacttccactttacacaccagaaaataaggcacagagtcgacacagccactgagtgtcagagcaagaattggcactcatcccgtgagcgcctcagttctttttttttctttatatatactttaagttctagggcacatgtgcacaactgtggcacatatacaccacggaatactatgcagccataaaaaaggatgagttcatgtcctttgtacggacatggatgaagctggaaaccatcattctcagcaaactatcgcaagggcagagcgcctcagttcttaaaccactcttctatgctgcggcagaatcactggaagtctcagggagtcctgagtgcgcaattctaggaaaagtatctatatctgtaagaaagaaggggcagggaatctaacggttctcagctcttgaaggcacattagattcattcaaggtcctctctaaaaatacactttcttgggcctccacgagaaaaattctattcaattagtcgtgggcttgcatccgtatttttagtctgtaaaagtggaatgttatctcaaatcagtggttttcaaactttttatattctgcggaccttgacacgggcccccaataccctgacacggttacttacaatccgggagagagtgggagaaagggggagagagggaaggggagagggggaggggagagagagagaatgaatgagaatgaatcttttagagaggtagagggggttggcccgtgccacaaaccacctctcaggtttgagtgaagccttcgttctctctcgtgcagagaccatgccatccttccagaaaggagcattttaggacgttttaggacgagagacctgtaattggcctaagactcaggtgcaggtggaggaagcatcggatttacaacagtggtcctgccttcttcgatgtgacttccagttttaaattcaattctaatttacacaaatcccacccactatgtaaacttgttggaaaatgtcctgcactctgcacttcgtggcatttaaaacttccacacacgcgcgcgttctttctcgaagccccgtgattgcttagcctcgctgggcagcttggcactgctgggagcttggctcgccctgccggggccgacgccgcccgtcccgcaggagcccgcgcggggctcagggcactcaggactccgcatgcgtcccggctccaggtgggccccggcaccgccaaccgcaggaaacccgccgagccctaaacgtctcccaagcggctgcagtctgcgacagagagtgtccctcggtggagcgccctgtggctgcccaggctacagccgtggccgaggcgaggacacacttctgacctggggctccagcaaagactgtccgcgagcggcgactccatgcccgcagccctccgcccagctcagccgcccggccgcgggcaccagcagccgcgccacgaaagggcgcaccgcgcgggcgccgtctctcctaggtgcgaaggcggctgaggccccgcccgggaggcacccgcgcggctccggagtgggccggagggacgtccgggggcggggcccgggcgcgcccgccctctgaccgggctataacacccggccccgccgggcggccgcgggtgggtagaggtgcgcgcctgggacctggtgaggctgggggtgcgcggggccgggcgcagctgtggcagctgccggacggcggaggcgccaggaggaggaggagagggaggcgcgggcggctgggtcgagggcaccgaggctgcccgtgctcccggtctctggttgcacg

SEQ ID NO: 10013 - DNA, 2300 bp, Homo sapien
aggttcattacccaatacactgggtcagagtgacctgtagggatgtgacttaacccttgtctggcatggtcataggtcctgtttacaatttggtatcttactgtcacaaagagtctgttttgtcagtcttatgatctctattttaacattaatactggtcagttgtgcctaaactccagaagggagggagtataaaaaagtgtgttcaacctcacttgctgtcatggttggaaattcagttcttaaggttttttgtgtctccatggccaagaaggatctgttcagtcagtgtgggcttaggattttatttttaggttatgcgtttataaaggtgtcctctcccttgccaaggaagagaacaactcttaatgcaatcacctgatggatttggtctaccctctgcacagacaaatccaatttactgagattgtggtattgcagtaaagaaagagtttaattaacactaggctggccacatggaagatggagttattactcaaatcagtcttcctgaaggcttggaggttagggtttcttaaggataccttggtgggtaggggactagggaatacgtgttgctgactgactgaggatacaatcatagggttgtggaagatggtcctcatgcactgagtctgcctctgggtgggggccatgggaccggctgagtcatgagtcagtagcgtcggtcagtggccaaaatgcaaaagtctgaaaaacatctcaaaagatcaatcttaagttctacaatcataatgttatctataggagcaataggggaagtcacaaatcttgtgacctctggccacatgactcctgagtagtaagggattatagaaactatattttagcagaatttaggccactcccatagttctaatcttgcggtctttcatcagttttacaaaggtggtttcagctcctgaacaaggaggggatcagttttagggagggattgtcatccttgcttccacattaaactagaaactaaatcccttccatggttagcttcctatgcccaggaatgcgtgaagacagccagtctgtgaggctagaagcaagatggagttggtcatgttagactcctcttgctgtcataatcttcgcaaaggtggtttcattaatcatcgggactcttcatcactggagatgactctagattcttttcagcccaaagacctggagaggaatgtatataacaaaccttactaaaccacccttttcttctatttatttccctatatatttccttcccacaagttaccaccattaggaatcccccttttcctttgtcttgtcaatctctgcaatgtatcaaatgtatcactgtttgtcaaaatgctgtgtcacctcttaggtctaactgcttctctgccccttcacttttctaggaaggcccctgtatatatacatgataaacctttcctcctgctaatctgtcttttgtcagtctaatttgcagggccccagatactgaacctaagaaggtaaaggaaaacatttttttcttcccccacagtggtatatgcataccatgaactattattacttagcatttcaaaggatggaaattctgacatatgctatactatgcatgaaccttgtggacattatgctaagtgaaataagccagttacaataagatgaatactataaaattccactggtgggagtgtctaaaatagtcaaatttatagggacagaaagtagaatggtggttgtcaggcactagggggatggggaaatgagaagttgtgtaatagccatagaagttcagttttgcaaggcgagaatgttctggagattagttatctaggggccaagggaaaagttccccttctccctatgaagtttcactgaaaaatcaactcacaaaaggcagactagtaggagaaataacatacaaatgcatttaatgtgtacatgggaaccttcagaatgaagacagaggaaagtgcacatttttatgcttaggttcaaaaagtatgtagagctgtttagaaatatgactggacaaaagggtatgatgtaactttaacagatggagtgaggaaacccagcaaggcctgtctgtctagattcttcttggcctctctgagcagcatttcttccttctgcgtatgggacaggaccctttctggaatgggggtcttatgacctacaatcaaacaaggtaggtccgatcatttccttatgaccagtttttatacagaatgtaaaccaaaagtatatgagacaggtcccgatcaatgtagaaagtttactttgccaaggttaaggacacacccatgacacagcct

SEQ ID NO: 10014 - DNA, 2300 bp, Homo sapien
ctcttgagtagctgggactacatgtgcacgccattatgcctggctaattttttaatttttttgtagagacaaggtatccctatgttgcccaggctggtctcaaactcctgggctcaagcaattttccctcctcggcatcccaaagttctgagattacaggcatgagccaccatgctggctggaatggtttttaattgtattgaaagaagataaactgcaatagaaatccttgcatcttctctgattctattgcttccctctttcacttctaaagacccttgcaaattactttgagcctaccggacaatcaaggtatccctatccctacctcaagatccttaacttaatcatatctgcaagggtaacatattcacagatttcagggatcagaatatgaacatctatggtgggccattattctaccacaccaccaatctagaaaatactctcacctttaaacgtcagtgtctcttttcttctataatgccccaagaaagaaagtgaatcagtatttaaatactgattcttggaacaggacaggacactttgcatattaactcatattaactcatttaaagtatcaccaaccttcaaccttggtgaggtagatattattgcttggattttaaagattctgagattgaatatgagagttgaaaacttgactgaggtcatctagctgataaaatgtctgattagaaatgggtacccagatcaccagactggcctccaggactgcaaccatgctttttccaccataccaagtgcagattgagtcttttttatgcaaaaatgcttggatttgaggggattttggaatatttgcatatacataaattatccaggagatgggacccaagcctaaacgaaattcatttatgtttcacatataccttatacacacagcctgaagattatttcatacaatacttttagttattttgtgcatgaaaaaaagttttgattgcatttttgactgcgacctggcaaataagatcaggtgtggaattttccacttgtggcatcatgtcagtgcgcaaaaagtttcagattttggagcatttcaaatttttggattagagatgcccaaccttacagatgttgtttgggttattctatgaatgatttctggccagtttctcaggaaacacgctctactacagtatattttttaatgagtgaaaaagaaattaagaatggaggggaaagtttcaaactggagagacatctttgagtaaagtatcgtggctgaatgttcctacctttattgaccatgtgacctggttaaatcacttaggttctattaggcctcagtcttctcttctgtaaaatgagatgtttagacctaaggacacctttccagttcccttcccgttgggacattctaggattctgagagagaagcccccctggcctcaagatacctccactctcttgggtgtgctctaagatgactgcattcatgttagaagcatctgaactacgccagagacaacctactgtagatctaaggaagaaaaaatgaatggcaatgaatgcgagaggaaggtgggggggaaagaagcccacgaagattagagatggaaatggcaacataaacagcatgcaaagataaccactgacgggtatctagcgtttacgatgcaaataaaactctgctggtctctgaggatgcagaaacaagacattgtttttggtcttaagccgttcacagaatgcccgggggttacactttgcatttaagcacggacatataacttccacctttaaaagtcctggatgtgagaaagataagaacaacggataaatgaaaatattaacaaaacgtctgagtatgccagaggccacgtgaaaagacggtgtgtggaaacaggtgggacccactgctaagctggatgcgcgagtaggacaaaaaaattggcccccactcccgggcctcacccagacacaaaagaaacgtcctctgccctcagaggcgcagcctttcctcagccagcagagcggctgggctgcagagtccccgcccccggccggcccctgtcgcccgcgcctccctccctcgggcctcggaagtgacgcaagcgcccccccaccgccgctagatccgctgctgctgccgcggcgggcagacctgcaggaggcggcggcggcggcggcggccgaggctgaaggaagatggcggacggcgtggaccacatagacatttacgcggatgtcggcgaagagttcaaccaggtacgtgagagcccaggtccccgccgccgacgcgggcggcgctgcggccgggaagctgacccggg

SEQ ID NO: 10015 - DNA, 2300 bp, Homo sapien
ttatgttgcttaactgttttatttgaaggaaacctgtgtgatttaaaaagttatagcttttgcaactttattactggttatatacatttggccattatgatgtgcaagcaattggaaaaaaagtcaagtaaatgcttgtttttgtagtagtttgttcttgttaaaaatgtttatatgataatgtctgtaaacagcatcactttgattacaatagatgtagtgttgtaataaactgtttaatggggctgatgtgtaaagctgttcaagttatttgatgtttacacctcagggaaagtcttgtgttcagcaatatctaaagataatgttactatgacaacatttttactgtcctttaaagcattgcaatagcgtttttggatatgcctcaatctaatcttgcgttcagtgaattaaacatagtaattaagtgtcttttgcccttgattttgatattagaataggtgattacatggatatttaatatttctatattctgcttttctagctgtttttacctagttagcttgtgactttgctgaatggtatgtaaacttgtaaaaatagagatttgacagacatagcaatctagtcaatgtgtaaggggtcaaaaaaacagaggttttaacacataagtaaaaacccgtacatatttgatgtgtaatgcaggttaattacaacacagatgtaccgaaacacttaattgtgaaccgctaacattgaagaaattttgacaattccgatttgatgctgcaattacttgctgtttttattgatcttatggtttatttcttaagccatagtcagtgtaaatacagccctgcagcaggtaaatgtgagtaaagagagccttatattttccaattggtataaatttttgaaggatgtgatgttcattaacattcggttgtattccccagtatttgtaatgggaaattacagataaaccgtgtctgcacagtttaaggaatactatgtatattcatgcaccgtattgattcatgctatagttacttaatcaaagatttttttcaaacctgccttacatataggcccactttaaaagcacctgactagcatgtgttcttgattgcaaaattggcagaggcagggtgtcaacttgattaggtgtttttatgggaatgtaatttgaaatcactacttcagaaatttgacttaaaattcttgagcacgttaatatgtttttaagatctgattatctttgagagatcttctgttaatacacattggttgttaaagagtacccaaattctaggacaatgcttaaagtgttaaaataccctagatactgtgttatgtgcaactgtagaaaccctccagaaatttccactgctgttcttcactttcatcttgtctgctatcaaaccacttctgacaaaattagctgttttgaattacccatatcactgccagttttattttaaaatattttgtgtttgaagtatctgtgcatgggatcgttgatgtttatcagaactgttcactttcagaaatgattttttaaagcattttgttgaaaatgcggttgcttttttaacattattttagagttgtatcaaaattttcctgttttctgtatattgttgtgtcatttcttggctttttaatattttgactacaatgccctaatgcgaagaagtatggacatataaatattacaagagaaattagttaatagtaaagggttaaaaggtaagtaaaatgtccatgaaaataaaattttctttgaacagtttaaaaatggaatcacaaaaatctaactgcacttgaaatgaaactggaaattttatactaattaaatcctttatttaccttttcatattttatcaatggaaccttttaattgctccttctatatcactcttctccttgcttggctgatctcattacatgactttcgttacagacagtgtgagtgtactagatttgtttgctgctaatccgttattttaagtgttgtcagaaggaaataacttcttggtttgaccaagtaattttgcaaagtccttctctacctgataacacgtgaatgtatagcagtaaaggtgaaaattgcaggccttgttttgttcttcatacccccttcagttgtttatgggttaatgttatttgaaaactcttcctttttttaatgtgtaaaaacaatccaaagagataaatccttgcatagacaccaaaaacagtgtctcagagaccttttcattttttccttagttaataactgtagtggatgtgaaaacaaacgagttgaattttaaaacatagcatttattagtgctata

SEQ ID NO: 10016 - DNA, 2300 bp, Homo sapien
taaatttttttttatttttagtaaatatagggttttgccatgttgcccaggctggtctccaactcctggtctcaagcagtcctcctgcctcggcctcccatagtgctggaaatacaggcatgagccactgcgcccagccaagactaactcttttaattggtttctgtctctttgggtcctgaaaatctgtctcactatttattattattattattattattattatttgagacagagtctcactctctttcccaggctggagtgcaatggcacaatctcggctcactgcaacctccgcctcctcggttcaagcgattctcctgcctcagcatcccaggtagctgggattataggcacccaccaccacacccaactaatttttctatttttcgtagagacggggtttcaccatgctggccaggctggtctcgaactcctgacctcaggtgatcagcctgccttgggctttcaaagtgctgggattacaggcatgagccaccgcagctggccattttttttttctttcttttttttttttttttttttgagacagagtctcactctgttgcccaggctggagtgcagtggtgtgatctcagttcaccacaacctccgcctcccgggttcaagtaattctcctgcctcagcctcccaagtagctggaattataggcgcaccaccacgcccagctaattttgtatttttagtagagacggagtttcaccatgttggccaggctggtcttgaacgcctgacctcaggtgatccacccacctcagcctcccaaagtgctgggattacaggcatgagccactgcacctggccctatttattattgaagaatcaaaattaggcctagcctgaaaaatgagattattcttgatttttgaacagggtccttgaactgtcatttaaaaccaaatctggtaatctttagaggccactgatgaaaaataagggtaactacaaagtgatgacactttgtgtggctcagaatctgtcctcttaggcagatacagaagtgcagttctttttgagttctggtagcattgttttaaaagctgtgcacagcctcctgagattgctattttcaaaggtagcatttagttggatatatgtttgggtaggttttatttttaaaatgctgttgctttctaatgaccccttatgttctaatatggaaaggggaggcaaagtattgtgaaaagtagttggtaaagtaggccggatgtggtggctcacacctgtaatcccagcactttggaaggccgaggcgggcggatcacgaggtcaagagatccagaccatcctggccacatggtgaaaccctgtctctactaaaaatacaaaaattagctgggcatggtggtacatgcctgtagtcccagctacctgggaggctgaggcaggagaattgcttgaacccgggaggcagaggttgcaatgaactgagattgcgccactgcactccagcctggtgacagagtaagactccatctcaaaaaaaaaaaaaaaaaggtagttggtaaagttgttcacatgaaccttatttataatagtaaaacactgatttataataataaaaaatttgctatagtaacaaaaagagtctagagtaagaaactagctgagcaacgtggtgtcacactatacacccattaagacaacaggcacatgtgtcatgtccattttgtggaaaagatatgtaaaataattttaagtaaaaaagataaatataaaaaagtgaatgcatacaaaacaatttcacaaaattgaatgttactcaaaaatcacagctcattttaagctgcacaaaatagtcatttttttctttataattgctcaaattcataatcaaacagaagaaagttcctgtcttggaagtagtgctatgccccaattcttccagagccagtactttaaacaattccatttcattattttcctgtagactaattcttaggacatcagcatatctctcttcaagcattaaaaaaatctctttagagtcagtggatcaatagacagttcctgttttccacacaactgaaagggtggagcccccaaaccacaaggggaagaaggaagttaaaagatgttaaatactggggccagctcaccctggtcagcctagcactctgacctagcagtcaacatgaaggctctcattgttctggggcttgtcctcctttctgttacggtccagggcaaggtctttgaaaggtgtgagttggccagaactctgaaaagattgggaatggatggctacaggggaatcagcctagcaaactgtaagtcta

SEQ ID NO: 10017 - DNA, 2300 bp, Homo sapien
tgtgagggcagcagagggccactacataggtgcaacctttggcttcaaaattcttggaccattctgacgtgattaaactaaaaacgaatgagtttatgcatatcgagataccctgaggtgtacaaaggatgagtcaaggtagcggagagagagttgaagagtgacagctgagaaacagagataggacatgtccaagaagtgccaggataacccaacaacacaggctgattgaggaaactgccagagattagacaaagtagactgaagagggaaagcaatgtttgttggagattttgctttagtttttgataaatatttcttagtcataccaattgttttaaatataattacgcccccaaaccaaatttctactcttattctggcaacagaataaaaatcaatatcaatgtttgatcattttcaaagaaactcagttcctatcttggttgaaatgcagtgacatccatatgacaattgagctcttcatgtggcactaatataactaagccctgagcacatcccttgcacttctatttagtgaagtcttttaaaaagtattttctttacagttgttaagtggaattactaaaaattacaatcagcagtattttctactcttttagcttattttttaaaatatttatctccatgcttttcaatattacacctatattgcttcttcttgatttttccattttaagatactgacttcctactatggaagttaaagattaagctctatttcctcctcctccatccccatcaagcatagtacccttctccaaagcccatccttctaaatgtaattctttttttgagggggaggggggatcaatactcagtttttttttgttttgttttttttttttttttgagacggagtcttgctctgtcacccaggctggagtgcagtggtgcgatctcggctcaaggcaagctccgcctcccgggttcacgccattcttctgcctcagcctcccaagcagctgggactacaggcgcccaccaccacgctcggctaatttttttgtatttttagtagagacgggttttcaccgtgttagccaggatggtctcgatctcctgacctcgtgatccgcccaccttggcctcccaaagtgctgggattacaggcgtgagccaccgcgcccggccaatactcagtatttatgtaacaataaatacaattactttcctttcttgcacaagattttgttttccctagaattaatagctgcataattcttacagccgcttagttttctgtgtacctgtcatgagttaaactccaaactctcggtcaaatctcctcttgattcaacgccagctggaattttgtcaatcccatccttctgaagcagtgtctcccaaagatttctgaccgaatctaatctagatgcgttgccgtctatgcctatacacagctattgttcccggagctctttcagtatcatcttgggatcttactattttctgtgtttgttatttattgtatttcctgcatttcataatttcctccttcttggcttattccctcattttggtggatcagatctacaggatcttcctggaggtactgagaaaggtaagataggtactattttttgtgtgtagtgatttagcacatctgaaactctattctattcacacactagattggtagttggatgagtattgaagactaaatcggaagtaattttccctcagagttttgaagacagtgccgtatggcttcctagattctaactgagcaatctgaagccactctgattctatagtctgtataacctggaagggtgtgggatctctttttcctcgatgttcagaaaattcacaatgatatgccttgacgtggatgctttaatatttgtgctgggtgcttagtaggatctttcagtgtggaaactcatctccttaacatctggacaactttttgaagtcatttattatttcctgcctttcattttttttttggtttggaactcctgcactggtcctgtgatgtgactgcagccgccaggcgcgtgcgcagtgtacactgcgtgcgcatacgcgagcccgttgcgcctgcgcgcggtgcggccgtcgcccctcttttcgcggcgttctccacctgcgcgggcctgaatggccttcaggagcacagtcggcctgaggagttgacggttactcaccgccgtgagcccaagtaactcgccctccttcggctagaaaccctccgcctgggcccgcgcgacaggagcgcggtctctgaggggagcggcgaccccgccagccccggtctctttccctggcggcgg

SEQ ID NO: 10018 - DNA, 2300 bp, Homo sapien
tctgattcataagatctggggcgggacccagtaatgtgcatctgtaacaagttcacagatgatgttgagaggcttagtccagggacttctaggggtggggcccagcaatctgttttaacaagccctttaggtggttctgatgcactctcaaatttgagaaccactgggatagtggtgaaaagcatctgagaatatggtctgcaaattcaaacccaggcggctccatttaccagttagatgaccagattaaatgactaacctctagcacctctgcatcccacacagagcctgataatatctgtgattcaggattcctctcactatccctttaggccttgagtaaaaagagatgtcggtgagtcctgccaacccacgctgttttttacttcttcacactctgaggcacaaaaggctgcttgaatttgagtattacggaagtatttgccaacacttctgcgatcacaaaaataaagtaagaaagccctgtaaataaagccaagagcagtggcattgtttgcatcttaaatttgtaataatgggttttcaacttttttcctttcccctgcctttcatagtagaaacatttaaaaatcttccccgccaccccccccccccccagtttcaagagatgttagtacatttgttttgcagatagtatgcattgctaagaggcttttttttctttccctgcatcccagatacagaatctgcctcagatatctggtgcctttctgattttgtggctgaggaatcccacgccctcctcctttccatcccttttccctgtctggtatgtaactctgtgggtcctcatattatcactgcatggagcttcacaagcacctgtatttttccagttgtaaaaacccctactctttctttttttttttttttttttttttgagacggagtctcgctctgtcgcccaggccggactgcggactgcagtggcgcaatctcggctcactgcaagctccgcttcccgggttcacgccattctcctgcctcagcctcccgagtagctgggactacaggcgcccgccaccgcgcccggctaattttttgtatttttagtagagacggggtttcaccttgttagccaggatggtctcgatctcctgacctcatgatccacccgcctcggcctcccaaagtgctgggattacaggcgtgagccaccgcgcccggccaacccctactctttcttatttccttaactaatcttttctattgcctattgctgatgaggtataagaatcgttaacttttatccaatgccagacattctgaaatgtttatcatgcattatcattttggattcctacaatgcagagatgattttataacttgccagggtgaaaaaataaaagtaaataaaaggagacaagcaaaaagattccagatccccaccccaacccccccaaccccccaaccccagctctcgcctctgttgaagtcaccagtgatgacagaatataggaatatagtttgagccctgtttttaaataatttcaaaatcttggtataggtagatgagatttatacacacgtgaattaaaatcaaccaacatttgtgagattgggtttggtatctttgaccgtttttctcccctgcaagacgtagataatagcaccaaccccaaggagtttggggatgattaaataagttaatgcacccgaagggacttaatacagtgcctaccacgtagtaagcgttcaataaatgttaactattatcattattttttaaaggaggcagattggagcgtagagtacactgaagggagtcgggaggccgggtgtaggcactggattcttgcacctaattctccgagcctcggtttccttatttgtaaaattagctggctggagtaaaacaactcaaacagcagttaaagcaaagggtgcagcagtagccggggaatcgaggaggcgcggggcggaaagggttagttaggagcccagaggctgatctgtgggcgcccggcgagagaggccccgccccgccctggaggccctggcagctccgggctgagagcagttccggtgccaaaacccttccctcccccgctcccccggaagtgcttttccaagattcgggccggagagaggccttgtaggcacagcggctgagactcgatctgctccaagtaggggctccagcgcgggtcggagtctgggggttcgcgcccgccgacccgcgccctgctccctctcagcacctgggcggacggtgagtggctagggaaacggactgggacggccgcgggcccgcgtcggagctggcgttctcgtgcccc

SEQ ID NO: 10019 - DNA, 2300 bp, Homo sapien
cttgctcaggacactagggcagatttctttgatgagatgacttacaaaaacaaagtcctaaaggaagaggagaaataagccagagagagagatatctcttgttactggcagagggaaaaacaagtcctgagatcctgaagtgagaaggtgcttgataagtttaaggaaaggaaagatgctggtatagcttgaatggggtgaataagggagagagtggtagatgaggtaagagagatggggtgggggatagcagatcatggtctttatgggcctttgtaaggagtctggcttttagactactgagctggactcagttggagaattcgattagaagaatgacatgatctgactttcttttgaaaatggctaatctcactgacttgttgaggtgagcaagagagagactgggagatcagacagggaactattatactaatgtgtatgcaaaatattgtggcttggaccatcgtagtaagagtggaagtggtaataatatgaatatcttttgaaactggagctcctaggatgaacactacatgggtagtgacattttaaaatactagaaggtaggctgggcatggtggctcattcctgtaatcccagcactttgggaagctgaggcaggtggatcacttgaagccagaagtttgagaccagcctggcgaacatggtgaaacctcgtctctactaaaaatacaaaaattagccagacgtggtggcatgtgcctgtaatcccagctactcgggaggctaagacagaatcacttgaacctgggaggcagaggttgcagtgagccgagattgtatcacaacactccagcctaggtgacagagtgagaccctgtctcaaaaataaataaataaataaataaataaatagtactggaaggttaaatatttcatcaatttaagttaaaaaaattcatctgttaatcatttcagtaaatccttatgaacacttatagcatggaattcattgttttaggtgcttgaaaaatacccgtaggctggatgtggcagctcacgcctgtaattccagcactttgggaggctgaggcgggcggatcacctgaggtcaggagttcaagaccagcctgaccaacatggtgaatccctgtctctactaaaaatacaaaaattagccaggtgtggtagagcacgcctgtagtcccaactgctaggcaggcagttggattgtttgaacctgggaggcagaggttgcagtgagctgcagtcttgtcactgtactccagcttgggcaacagagtgagactccgtctcaaaagaaaaaaaaacaaaaaccagtaaataaaaccaacaaaaaccccttctgtggtttacattgtagttatagggggaaagttgacaataacaataataattgcttataacaattaatgataataattgcttacaacaattaatgataataattgtttataataaataagcaatttgttgtattcagaatgtactatattagggctaccatatatttcttttttttttttttccagtctgtaaatggcactccggagttgcaaggtcccactgggtgacaggaattgaggactgaagagttctggtcccgtggtacaaatagccagttttctatctctcccacctcagtctcagctctgttaataatgttttttatgagaaggttgctcaagaagtgctttgaggctgggcatggtggcttacacctgtaatcctagcactttgggaggctgagatgggaggattgcttgagtgcaggagttcaagactagcctgggcaatgtagtgagaccctgtctctgcaaataataatttaaaaaattggctggccgtggtggcatgcacctgtggtcccagctactcagaaggctgaggtgggaggatcgcctgagcccatgagattgaggctgcagtgaggcgtgatggtgccactgcgcttcagcctgagcgacagaatgagaccctgtctcaaaggggaaaaaagtgctttgagagttctttctggtcactacaatttagataattattcttaaagagttttgttataatatattcaagagtaacattcttaataacttaacctatatttcagaaatgaccattaagaagtagatgcccagatgcaaaagtgatgaaacagtccatttgtcataaagtaagatgcagctgtggcatgtcaaccagcttggtaagtgtggccaaatctttttttttttttttttaactttgtagttatctactttgaaaatcatttaattaaaaaatatggtagacaggctgggcatggtggctcatacctg

SEQ ID NO: 10020 - DNA, 2300 bp, Homo sapien
cctacaactccccttccacaaacccctaccaggcgcacagagctgtatgccgtgatagacatcgagagaactgctgctatgtcaaatttgcagaaagcactgccacgagatgatggtacatctaggaaaactagacacaatagtactgatctgcccatgtgagcctggaaagcattgtgttgtttgcacctttgtgaagtttttaaaaatgaagatgcaagtgcttcattttcatttctaaacactaactccttttatagactgataaaatttttttctgaatatttcatgtgcatctttaactaaagggaattaatgtagagcaggtactccttaaagaacactaatttcattatatactactcgttgtacagcagcattcccgttttcacagtgcctatttaaaatgagagttgaagtaaatgacatgctggttgatttttatcaatattctggacttaacgcatacctttcatgtctaagtcatggttggcttttaaaactttttataaagcctcttgacaatgtacattgctaacaggtaactataggctttgaaagtaatgctcgtagattcagtgttcacagtatgtggcctccagcatgtaacatgaggaatcctttatttcattaattaatggctttttgacttgagccaaaacatatgtaaaggaaacagaagtaccgcacctcctcttacaccagtcagctcctttgccttcagtgttactagaaagcggcctgtgtccatgagtgtgctttgctgttggtgcactgaaaggcaggaaggagacaagattttctatttactcatctcatgatgtcatttgaagggcatgtccagatatcttaaaattataataggctcaagaatcagtctcaggtcactttacccaaaaacatttgaaaatctgaaccacaatctcctgaaagtttttctcctatagattgttgacaacacattgttttctggaggcatttgtgccattaggtttccatttatcttcagtttttttctttggtgtttgggatgtcttattttgttgccttatgtccttttcaatttaaaatgtttgagtttgtatatagttttgaaattggattatgtgttcattgttgtttagtttgcatttttgtcaaattatggttttgaaggttcatttggaacttactgttagtctgtaacagggttgcccttgtccagtatttatttataagctgtttacttttcaagttgataaaaacattctccaattctaaatttgcttgtgtccataggtgatctctttagcaaactgagaaaaaaaggaagctacttttaacatgcaaagttccctcaaggtgtaccgtgttgtctctgtgggcactcttccccagcactttagcagtaattcccccagctacacgctgcagttgtactctgcccactctagtgttcctcagctctgctgtccttttacttgtagctggatctttgattatccttcgatttccatgaaatattaatattgttgccagcatagcaggtacagtggaagtcttgtagcagtgagattgtatcataatttaggatttaaaatgaattaaagtttatataaactgaagagtctccatatgtcaaactcttggaaaatcaaagatgttccaatttcctaaacactagagaatacgagagaaggtagagtggaaaaggttaggtaaccttgcaaaatattttactattttctctaaatatgaggaagtttgagattatgatctggatctaccagatataactaaggttaatttagcatgaaaaagttttagtcatattggcatccaacctattcagtaaccgaatcataggacaatgatggattaggagaacaatagagtgggatcattataaagaaaataaattattaaaggtgtctttatcgttttagtgccatttttagtgtctttactataaatcaatatcagtgtattttatcattctatgtgcatagcagaattttcttttctcccttttgttcccctgtgaacttggtgcttattaaagtgctcactgttctcttaaaagagagcagtggtataggtgtgcagtttccatgatgcaggttccatttttaatatattgttccacttatcctttcttctgagtaaattgctaattgtgccaaatttatgtaatagtttttgtaatgtggaataagaattatgatggaaccattgcacatttttttctgaaacagccagtcaaggcagaacattaatctccaaatgcaagggctgatctatttattcattttggaggttgg

SEQ ID NO: 10021 - DNA, 2300 bp, Homo sapien
aggaccaggagtccacagtcacattaagttgggtccacccagacacctactgtttgggtagtagggagaaggttagaagacttgatatttctcctgttgcagaccgtgatagtttgtacacaggaatcagtctgtggagcacacttagaggagcactttaaaaaaaaaaaaaacagggtctcattatgttgcccaggctggaccacagtggcaggatcacagttcattgcagcctcaacctcccaggcttaatctatcctcctgcctcagtctcttgagtagctgggactacaagcacacaccaccacgccagttgatttttgtattttttcatagaaacaggttttcaccatgttgcccaggctggtctcaaacttctgggctgaagtgatccaccctccacagcctcccaaagtgctgggattacgggcatgagccaccatgcccagcccccaaatatatcttaaatctcaatgaactgacaccatcaaccatctcagtcacccaaaccagataactgggggtcatccttgacccctccatttctgtcattccccttatcaatcagaggtgttaattcttcctcctttaggccctctattacattggtggccctgaataaactacacttttgatgttcatgcttttatatgagccactgtaattcaacaaaatacaacagaattgacattgtgccagttctgggcttaggcctcaagaaagcctagcagcatctacttttgtgctcttgggaaccctaagctgccatgtaagaagaccacatgaagaaagacccaagacttcatggaagaaaactaaggaacacagctgagagctttaagttccagacataacctagtggaactggtccagccagccctcagctgcttgaatcatactagcataggcacaaagcatatgaggaagccaggcctccagacatcatgtgagatgagccatctctgctgtgccctgcccatctcgatctatagcaacttgagacattaaatgattgctgctttaagccactaacttttagggtggtttgttgcacagcagtaaacaatctaaacagtcctttaacaatgcctttgaatacggatttatcagatctggctccatttctgaaaaagcctctcaaccagtctccctgctttattaaaataccgtagggccagctacttgggaggcagagccaggagaatggcatgaacctgggagggggagcttgcagtgagccgagatggcgccactgcactccatccagcctgggcaacagggagagactccgtctcaaaaaaaaaaaaaaaaaaaaaaaaaaaaatactgcgcccttcacgtatccatgttgtcagagaaatctttctaaactattatttttctggtgtttaaaatccttcaagttctctcacctaatttaaacaaaagctccttaggattctgtgatctgtttctcatttctcctttcttctgtatcccccaaccctgcctttgctctccatgcgcttagtcatttggaacctcttgcaaccactgaatgtcatgatctttctatacctctgtgcctttgcacatgctatcccttctccctaagacatcctctctaagctacaaagactttcaacaaaccacctcagggatcaccccctctaagaagctttgcttgaaaacctccacccctaggctgagttggatgcccttcctttgtgtgtgtctttatcatgccagttacatcaatcacttgtggacatgtccatctccttcattgtttaaataatttccatcttgacctgtactcaactaaggctttgcaatgtcactcagtggctaaaaacaggtttgaagtcccagagctgagaactactatttggaatgatcacacagctaaaactgtgagaaagcctgtcatatagttacaatttcattttgatatcttcattttgaaaatggaggcagtgatatgagactaggaaagaaaatgtcacaaagtttcaagtagtatgtgaaatataaatacaataaaacttttaagtagatatccgaccaaacgttttattggggttttattgcaatctactttcagcaataaggggaaagtgagcatgaaaagaactccaatcagactttattcaataaagcagcttttcatgaatgcttcaggtcagtgtatgatcagctcagcttccagtatcaacttgagtacctcattatggatatttatgctagaatgacaacagtaaggcattgcaaaatccaaagtcatctaatattaaaccatattttacataatttgtaggaca

SEQ ID NO: 10022 - DNA, 2300 bp, Homo sapien
catttccaagggtcccatcatagagtctcttcctggctgcctctagcctcagttccacaaggtggcagggcctgcctccttctccccatccaaatgcctctggctacattcaaagcccagcagggagcagtcattggtttccccatcacacacagtctcaggcttgcctaccagaggacataataaatatctccaggtatgtaattttgcccacaataaaaacaacctttttcaatattgtgcaggcatcttagttttttattgtgaatcttctcattccagaatgcgatttgggatctgcctaggaaagtacatttcctgaaagaagaccaaattttcctacaaagaagagaaaactcttgggagatttaaaataacaatttgtccagcctgaactccccttttcatgttggacctgaggaatactgtaaaccagggtcagcaaactttttctgtaaagaattagataatacatgttttaggttttgtgggcccattcaacctgtcatgactactcaactctgccacataactctgctatcgtattgtgacagagtaaatatgtatgggtatgcccatggattccaatgaagctttatggacactgaaatattaatttcacaggattttcatgtgtcaggaaatttttgatttctttcaaccacttaaaaatgtaaaaactattcttagctctcaggccatacaaaaaacaactggcaggctgggtttgactcctcacagcttgccaacccctggtggaaatcaacccacttagaggaaatctgaagggtagaaacaactaaaaaattgaaaattcctgttaatgttagcaatgtcaaaaatccaggagaccccagctactcaggagaccaaggcaggaagattgcttgagcccaggagttccaggccagcctgggcaacatagaagaccccatctctaaaaaaaacaaaacagaaaaagaaaaatccaggagcttgttttgttttgtttttgttttgagacagagtctcgctctgttgcccaggctggagtgcagcggcgtgatctcggctcactgaaacctctgcctcccgggttcaagcaattatcctgcctcagcctcctgagtagctgggattacgggcatgcacaccacgcccggctaatttttgtattttcagtagagacagggtttcaccatgttggccaggctggtctccaactcctgacctcaggtgatccgcccacctcggcctcccaaagtgctgggattacaggggtgagccaccgcgccctgccgaggagcttaagcgatcagttagtcaaagggagaaaagagggtatcagtagatgacagaaaaattttttagagaacaaatttttagacatccgtcaacttagagaaagtagaaaactgtctataataaactgaaatatttgggactgatcttgatgtctgccaaggttttggcagacatcaagatcagtcccaaatatttcagtttattataaacaaagactaataagtcgtctctactattggaggaaaaaaaaaaaaaagaccgaaatgcaaaaattcctgaaaatgagtaaatagggcaaagataaaatactataaatgtctctctcagttcacaagaccttatcctgggcagtcaacgtccagttagaaataacgtctgaaaattcagtaagagaaaaggaagtcttcttctgtaatactcagtaaataatgtttaaaattaacatagcaataatattatctgggaatatgatagtaaatagcccctccaaaaaactgaaaaagttgaaagcagttttcctggagacaggaagtggtgaggcagataaattatgtttttccttattggtatataacactttaaactgtgtacatgtgtgactttaatagaagtgtttaaagattaaatttaagaaaataaaaagtgtgagcaagaactccatttctatggcaacccgcgcggcagccgcctctttgttctggagcggcggccacgccccctccagtgtgaaaggctgcgtttccggcccgtggggctccaatcaaaatgggacgcctgctggcggtaacgacaggccggggccccgccccccgaagtagggcgtgtggcgtcacttccggcttccttcagtccgctggtcccgagcacgagctgtgaggggattcacttgtgtgcggaactcctcggaaccatggtgagcctgactcccctgcctcttgccctacccctgctccgccgtgctcttgccaccccactgcttcctctgtcctgctagggtcgtaggctccgtttctgtc

SEQ ID NO: 10023 - DNA, 2300 bp, Homo sapien
ctccctcacccaccctgaaactctatccagagagcaggtaggctgatggattggttgtttttggactagagtttttaaatttaaaatgataagtgcctctagttttttaaaaaaatcaagagtacaaaaggatgtaaatggaaaagtcagcatccctatcacccacaaaccctcaggtagattttccagagttaatcaccattatttcttacagatatttttatgcacacacaaagatatattttttcacagatgggaatcattaaaaaactattctgaaatttgcttttttccctccctactttatttatccggaatcacttcccatatcagtatatgtggatttgcctccttatttttagcaactgctgtatgtataaagtagtataaaagataagcccccaatctcgatgacttcacataattaacatttatttctcatttacctcaatcctattggggatcaagtgggagtgaggagggtaaggagatgttttgctcttagcacttattcaggaatctaggatgaccacggccctgccacctgcaacatatgacttccatatacttggtggctgctatagtcactctgggtgacaacatccagccagtagatggggaaggagagtgtggagaagggcaaaaggtttgttttacaatgaaccaagtctagaggtgacatctaacacttctgcccacattactttggccagaacttgaagagtttcccctgtagaccagcactaggaaattgtcctggctggacagctgcttgtctggaacaactggacactgtggaagggaaacacaaacctttaatgggtggtcaaacatacctgacaaaggtgcactgtaggaatacatccgaatttatttaacatgcagaaggctagcttgcttctctttcttctgcttttctacttatcttttgtcaaaggcaagtttttaaactgtggaaagatatcatctgataagaatgaagacatgagaaattagaaacctgtaaccattgctggtgggtgtgtgtactggctcagatttggtggggtacagaggagccatcaatgaaaaacctgtaaatgatgcatatctatgatccagcaacactttttttttttttttttttgagatggagtcttgctctgtcgcccaggctggagtgcagtagcgcaatctcggctcactgcaagctccgcctcctgggttcacgccattctcctgcctcagcctcccaagtacttgggattataggtgtgtgccaccacacccagctaatttttgttttttttagtagagatggggttttaccatgtagcctaagctgacctcaaactcctgggcttaagtgattggctcaccttggcctcccaaagtgctgggattacaggcgtgagccaccacacctggcctgctccagcaacacttctaaggacggtttctaaagaaatgagtggattgctgctcacatctgtatgcacatggatgtttataatagtcatgctttgtaaacaacctagatgcctaaccacagaaaactgtttaaattactgcacatccatgtaatggaatactatgcaggggtttaaaataattgcatagatatctgcaaacatgaaaatatgtccatgatacgtcatgattaaaaaataaggttcctggtcaagtaccatggctcacgcctgtaatcccagcattttgagaggccagggcgggcagatctcttgagcccaggagttcaagaccagcctgggcaacatggcgaaacctcatctctacaaaaaatacaaaaattagctgggcacggtggtgtgcacctgtagtcccagctactcaggaggctgaggtgtgaggattgctggagccagggaggtagaagctgtagtgagccaagattgcaccactgcactcccgcctgtgtgacagaatgagaccctgtcaaaaaaaaaaaaaaaaaaagctcctaaagtgcaattttaaaaaacaaatgattacttatagcgaaaagactagaggacacatgcaaatgtgtacagtatttatctctgggtaatagaactatgggtgtttttcattttcttcttttacacctttatgtaatgtgttaatattttatcattagggaaaaaaacagcaaagctattttcagcttgaaatgaaaaaaggttgataaaggggattggggcttaggtgattaaaggcaagcatgtgagtcagacatggcctcccagcccctgccggactgttgcgctgtcgccggacactcaagttgctatcaggagcacttttctctgtcaaagtga

SEQ ID NO: 10024 - DNA, 2300 bp, Homo sapien
gctacatgactttgtctgagttagttaaccattctgttcctcagtttccttatccataaaatggacttaaagtaacttataatagcacctacctcatatatcccataggcttgttatgaggattaaaaaagttagcatttgcaaaatgtttagagcattcctggcacacagtaagtgctgcataatttcttgccattgtaatgaaattacatctcaaacaacagcataacatagcacagtagccactttagaagacttgttattaatataatatcccaggtcttttttatctactttgatcaagaggttgtgaatgtcaaggttgaaataaggaagaagggtgtagatgatgttgttagagacgcagagtgagatatgagaaagtaatgggtgccaggagttggttaagggggattcagggggagggtctgaaggcctggcacatgtacaggtatatgataatgtaaaatcagtaggaactttaaaaaaaaattaattgccatccttcctccaaatatgaaagtagaatactgtttcagaatgacctagttaaaaatgctactagacagctcaattttatcttaccttaatgtctccaggaacaaatagattaagaattaccgtctctaagaaagacctaaaaacaaacaagaaacgtatgacctattccaagttgatgagctaaagtttacttggatgaacagaggtgatatttctctagttctgacgcatccttgaaatgaagagagtgcattctgacaggaatcagatgccgggtccaatcctcaaagcaaatctcatcttcttagtgtcaccttcatattaaaagcacaccaggaagaagccaggttggctggcaatggagaggcctctggggcctctggtcagacatgagctccgaggactgagctgtgctcaggtctgaggggcaagtagatatagggaggcaaataggaaaatgacgtgatttcatttcctttgagtgtatttttcagaatacaaaggcccactccctctcaaaattgtacagatgtctgccatgtacttgcattcagacttttccctttccgaggcatgtggaatactgaaatacttctatctgctcagctaccaatgtttctgccattccaagggaatctcaaaatgagtccttcacttctggatgtacatttaaactagtctctaggagtgatccacagacccacaggccctctacatcttgaataacttgagtttatttatttaaaatgcatattcctgggtcccacccacgtcagtccctctgaattattatagaacctaatagaacctttggatgtacggcctaggaatctgcagtgaaacatgctcctgtgttggtttttttagtaccccaaagtttgagaagtattgcatcttttctgggatgcttattttttaaaccctttttctcactcctggggcaaaaggctttggcaaccaccaactcattactgataacaaagcagcagcaattaagaaaggatggattcgaggtttcagcttgagggtcatgaattacaaagaagagctttgaggaagcagtctggtgggaggctactgtataagggatctgaattccacctgcttggatgtaacaagcattgttctgacttaaactttttggttggtttgtctgaagcggatgaagggagaagagaattgacagaggagctgtgatgaggtgaaagcctttccaagggtcctgtgacacaatcactgattatctcagtgaaaaggtcccagttgctctcattaattcctaagtattttctcaaaaggcagaaaagaggtagtaggtacatcttgtccccacaggaatatattgtgcttctggtaagtaattttgaagataactactttcttctcttggtgcttgtaaatactggataagatgttttgattcagtataagaccatactatacgcaagcattgtgtgttaggcggcagggcaaaggttccaagccactatcctctaagccaggagagacgcttcggaggcctgtcttcctggctgccccaggccggcacccgctgtcaccggcagcgctgactcactgaacttcctgctgctttccccagcagagagggctgactcagagtctgcacatggggtctgcttccaagttcttccaactgggcatatgcctccgccactctctgactgtcctttgcctgtgccaaggtttctgggaagaacaggaagttcagggatggcggaaaatgtttggcagattccctgagtccaaagccggagcacctgctcctgcctgagggcaga

SEQ ID NO: 10025 - DNA, 2300 bp, Homo sapien
atgtaatcttaattttagaataagcatttttttctatatctttctccacaaaaatacattttctttaagttaaggtgcaagggtgcacaagttactttagaaggttggaaaagtcccaggaattggccctgaaattatttattttattacttaaagaacgctggtgaattctctcttttaagaaagaaaatatggggctgggcgcgatggctcacgcctataattccagcactttgggaggctgaggagggcgaatcaccaggtcaggagttcaagaccagcctgaccaatatggtgaaactccctctctaccaaaaatacaaaaattagccaggtgtggtgggacacgcctgtagtcccagctactcgggaggctaaggcaggagaattgcatgaacccaggaggcagaggttgcagtgagccaagattgtgccattgcactccagcctaagcgacagagtgagactgtgtctcaaaaaaagaaagaaagaaagaagagagagagagagagggagggagggagggagggaaggaaggaaggaaggaaggaacgaaggaaggaacgaaggaaggaaggaaggaaggaaggaaggaaggaaggaaggaaggaaggaaggaaggaaggaaaagaaaagaaagaaactatgcgccgggtgtggtgggctcacacctgtaatcccagcactttgagaggccgaggcaggcatatcacctgaggtcgggggttcaagaccagactgaccaacatggagaaaccctgtctctactaaaaatacaaaattagctgggcatggtggcgcatgcctgtaatcccagctactcaggaggctgaggcaggagaatcgcttgaacccgggaggcggaggttgcagtgcaccgtgatcggcaccattgcactccagcctgggcaagaagagcaaagctccatctcaaaaaaaaaaagaaaaaatttcctagctgaccatggaaggataacaaatgtgatgaatctggccgggtgcgttgcctcacgcctgtaatcccagcattttggaaggccgaggcaggcagatcacttgaggtaaggagctcgagatcagcctggccaacatggtgaagcctcatctctaccaaaaatataaaaaattagccggtgtgatggtgtgcacctgtaatcccagctacttgggaggctgagggaggaaaatcgcttgaacccgggaggtgaggttgcagtgagccaagatcgtgccactgcactccagcctgggcgacagagcgagactccatcttaaaagaaaaaaaatgtgatgaatccatgtgttattatttcccactacactaagccatcaatatatcatgattctctatgtgttcttctaacacacaaacacacaccacacacacactaacacataatcgttgcttttaattgaagaacattttcaacacctctcaagtggcaaaaatcctgtttatattcttgtctgccccagtttatggcttcataagaattttttcatctgttttttgaggcagagtctcgctctgtcgcccaggctggagtgcagtggtgtgatctcagctcactgcaacctccgcctcctgggttccagtgattctccagccttaacctcccaagtaggtgggattgcaggagcccaccgccagacccagctaatttttgtatttttagtagagacagcgtttcaccatgttggccaggctggtctcgaactcctgacctcaggtgatctgcctgcctcagcctcccaaagtgctaggattacaggtgtgggccaccgcgttccagcccagttttaagaatttaatcttcatttcaagcacaaaaagactttttttttttttttttggctggtggggcctcttttttgaactctttagggccaaatcaacctttcttccttgatcccagggtggagtcaaatgaatctaacagacaaacggcccaacatccttcatgtcactgccaacttctcattcaaaggggtacttggggtggcaggtggagttataattatagcttagaaaaaagcagcatcagcagctgttgcttctgtttgttcccagctataactgtcatcagtggctaaactggcataaacaggcctctacaagtggaaaaacatttaacccctgttcttgtcacactctgggtcctctcagtggccagagaacagaaagaaaatctgactgtgcacgagcgaagggtgacaccgggcgtgcagcaccgacctgaaggcacctcttcgggggagcccgaaatttgaagattctctttcctgtcggagactacaaa

SEQ ID NO: 10026 - DNA, 2300 bp, Homo sapien
ctcacagccctttacatactttgtaggctgagattctgagtgtctaatattctgtaatgtatcttggtctctgtgctgcaagaacactgaagtattattataggtaacaatctatatcactcttctcaaacagcgctaacaggttaagtattcaagaggaacatctttcagtatatttcaaaaagcctcatggatggtaggtgatttgtaaatggaccaacgcaggactcaggcatatatggttactgcttactatttcctatagatcatgatgtcttaggtcttatgtagaatatatcataggacttgtcctctaaacattcacataccaagactgcactctgcatgcatgccattcactcattctgcatttactgagtcagtcctactgcatgtcagaccttgtgcctgttctcaagaagctcgcagtccaggaaaatggagaaatacagatacaattataactctatgtgataagtgttacaaagagatacggtgttatggaagccctggtaggggcacttagcccatactggagtggctgggatagggctgagtggccaacaatagggaagggttcacagtggaattgatgtctaggctaaataatgaataacaaataattagcaaggcaaggaaaaggtaggagatcaagacataaaaataaacagcatatggaaatacagggttgtatgtgagtacggcaagactggggagcctaagtggtttgctgtatatttaatttattcatttcacgtagctactattgacatacttgtctccctatatatgtttgagtccgtggatggtggggactttgtaatggtttctctgtccctatgtctaacaggaggcacacagatggagtgcaataaaatgtctgatgaataaatgaccagctatgaggtgtaagggagaataggaatccattaatgagaaaggtcatttctagtggcaatgaatatcagataagatagatttaagaattatttagaaattaggatgaataagacttggtgatatattggcgatggggtataaaataagaaacactggctttctaggtttctggattacagatgcatgataatagttataatggtataataacaatagctaatatttattaggcactctgtgtcatgaagtacgcaaagtgtttacatgaattaagccatttaaactcttaatgactcagtgaggcaggttctgtatactcattcactgatgagaaaattggggctagagagattcatttgcctaaggtcactcagctagcaggtggcaggctcaagcccagtaattctgactccaacaaccatacatatagtctacttttctttactgcctctaatagatgagattaatacccagaatgatggtcctattcaataagtgtatcacacaaatgcacgtttctcttttgctaaacatagagacacatactatgactacctctattattattatttttttttgatttttgggatcttggctctttctgtatttttcctacctggaagacctaaagtggggtagaagtttgataaaacagttggcacaaaagatgagagaagacaggtacagacatgacattctcgaacgctctggcagttgctggaatgatgggatctgggttctacaggattcctcccctcccatctcccgccacacacacacacgtcgtaaggtgtatatggccgcggagtctcaggttggttctaggagtcctcaacccacggcaaaggtgcctcttctccctcctggagagcccaacatgcttgaagttaacctgaggccgcctctcgggcccggcgaaacagagcgcgggcccgacgaaacagagcgcgggcccgacgaaacagagcgcagctccggctcgcgctggttcccagggaaaccgcccgcggaggaacctcgggccagggccgtgacacctgcgacgagccccgcctggcgccagggggcgcggaagcgcgtccgcccccaggccccatgccgggctcgccccgcccctgccggccacacccccctaccccgccctccctccgtgaggaccggccgctcccggctcccggcccccggccccgcttccggcgcaggcgcagtcccgcgttccctcggcggctgccggcgtagtgagcccgccgccgtggagtgtagcggaaagggctcgccgtcctcctccgtttctcgctgcttcgggacgcgctctctgcggctctgtgagcgcccctgagcgccggcagcggccgcggtgggttcttcaggtgagtgcggccgcgggagggagaggcccg

SEQ ID NO: 10027 - DNA, 2300 bp, Homo sapien
tggctgggatagggctgagtggccaacaatagggaagggttcacagtggaattgatgtctaggctaaataatgaataacaaataattagcaaggcaaggaaaaggtaggagatcaagacataaaaataaacagcatatggaaatacagggttgtatgtgagtacggcaagactggggagcctaagtggtttgctgtatatttaatttattcatttcacgtagctactattgacatacttgtctccctatatatgtttgagtccgtggatggtggggactttgtaatggtttctctgtccctatgtctaacaggaggcacacagatggagtgcaataaaatgtctgatgaataaatgaccagctatgaggtgtaagggagaataggaatccattaatgagaaaggtcatttctagtggcaatgaatatcagataagatagatttaagaattatttagaaattaggatgaataagacttggtgatatattggcgatggggtataaaataagaaacactggctttctaggtttctggattacagatgcatgataatagttataatggtataataacaatagctaatatttattaggcactctgtgtcatgaagtacgcaaagtgtttacatgaattaagccatttaaactcttaatgactcagtgaggcaggttctgtatactcattcactgatgagaaaattggggctagagagattcatttgcctaaggtcactcagctagcaggtggcaggctcaagcccagtaattctgactccaacaaccatacatatagtctacttttctttactgcctctaatagatgagattaatacccagaatgatggtcctattcaataagtgtatcacacaaatgcacgtttctcttttgctaaacatagagacacatactatgactacctctattattattatttttttttgatttttgggatcttggctctttctgtatttttcctacctggaagacctaaagtggggtagaagtttgataaaacagttggcacaaaagatgagagaagacaggtacagacatgacattctcgaacgctctggcagttgctggaatgatgggatctgggttctacaggattcctcccctcccatctcccgccacacacacacacgtcgtaaggtgtatatggccgcggagtctcaggttggttctaggagtcctcaacccacggcaaaggtgcctcttctccctcctggagagcccaacatgcttgaagttaacctgaggccgcctctcgggcccggcgaaacagagcgcgggcccgacgaaacagagcgcgggcccgacgaaacagagcgcagctccggctcgcgctggttcccagggaaaccgcccgcggaggaacctcgggccagggccgtgacacctgcgacgagccccgcctggcgccagggggcgcggaagcgcgtccgcccccaggccccatgccgggctcgccccgcccctgccggccacacccccctaccccgccctccctccgtgaggaccggccgctcccggctcccggcccccggccccgcttccggcgcaggcgcagtcccgcgttccctcggcggctgccggcgtagtgagcccgccgccgtggagtgtagcggaaagggctcgccgtcctcctccgtttctcgctgcttcgggacgcgctctctgcggctctgtgagcgcccctgagcgccggcagcggccgcggtgggttcttcaggtgagtgcggccgcgggagggagaggcccggagcgtagagcaccgcccccctcggcgcccgcgcgcccgcctctggcgagtcggccaggaggggcggccgcggcaggtgcaggtgctggcgccgtgcagggcgcggcacgcgggggttcggggggatgcccaggcccggtgagctcgctctccgcctgggcacttgggctccgggcccttgggggcggcgtgtgggggggactttggcgacccgggtcagccggccgccccctgggctgctggtgggcgtcgggcggcggctcctcccccgggcacgggcgcgttacacattaactgcgcggtcccgcgcgcccggggcagggagcccgagtccagcgggttacctggcggcgggcgggcgcggccgggagcggagggccgcggtcgcgaagaggatgaagagagagttcccgaacaagtcggaagcagctcacaacaccggacgccgcgcggcagggctgtggacctggggtggtttcgtgtcccagtcttaggaaactacgcgcgaggcaccgtgctgaggcgtagaggtcaccct

SEQ ID NO: 10028 - DNA, 2300 bp, Homo sapien
attcaaaaagtacaataggatctattcagaaatcccacaaagcagctaaacattaaatggccatcctggtgaaagattacaagtattcagtaccacagatgagttgtttaccaaacacagaaggaagagttgtatcaaacactttggttcacaaaggtatacattaatatgtaacattactgtaatggaaaaaaatgcaatggcttttcatttaatagttaaaaaatggactacttaattgtataactgtttatttctataaattccacaagggctttaggattagatcacataagccgcatctggaatacactgtctgtccaaacatgaaaagtcctatcaaaatgcacagtactagtaaataaataacaaatgataacagaacaaggccccataaaactggtgaaatatttaacagtatcaaatatttactacgattggtctacaaccctattctgcctcttttctccttgatttgtcattcagcactggaagaaaaaaaaaccttcatgaacaacaaaatgagaaaaaggataatgaacaagaactgggtctttcaactgatttacaatggaacagttttgttgtaatcctcttatgggcccctcctccaattatgcaatcattccactgcaagagattacaaggcttttaacccgacactgaacggaaggagttggggtgaaacaggagagtgtataacaggtagcctccgaacaggcaacatttccatgaaactaaattgcctctcagtaatcagtactaactaactcagcgctcgtgtctttcaagaccttaccctttcatcttttttaatcccataacaaccggcaactcttcacatgctgcgacttccacccagcatcatcacttctggagccagtaagctcgcgcttcctgggcggtcggggcgagttgtcaacgctgggagggcagagccatgcaatcccacccgtgcagttcgtctcaactcccccgaacacaagtctggcggcacggagctgcctacttgggcgcgactccgggcgcctgcccggaatttcccaccaggtttcaccgaaacctcccgagggtgacctctacgcctcagcacggtgcctcgcgcgtagtttcctaagactgggacacgaaaccaccccaggtccacagccctgccgcgcggcgtccggtgttgtgagctgcttccgacttgttcgggaactctctcttcatcctcttcgcgaccgcggccctccgctcccggccgcgcccgcccgccgccaggtaacccgctggactcgggctccctgccccgggcgcgcgggaccgcgcagttaatgtgtaacgcgcccgtgcccgggggaggagccgccgcccgacgcccaccagcagcccagggggcggccggctgacccgggtcgccaaagtcccccccacacgccgcccccaagggcccggagcccaagtgcccaggcggagagcgagctcaccgggcctgggcatccccccgaacccccgcgtgccgcgccctgcacggcgccagcacctgcacctgccgcggccgcccctcctggccgactcgccagaggcgggcgcgcgggcgccgaggggggcggtgctctacgctccgggcctctccctcccgcggccgcactcacctgaagaacccaccgcggccgctgccggcgctcaggggcgctcacagagccgcagagagcgcgtcccgaagcagcgagaaacggaggaggacggcgagccctttccgctacactccacggcggcgggctcactacgccggcagccgccgagggaacgcgggactgcgcctgcgccggaagcggggccgggggccgggagccgggagcggccggtcctcacggagggagggcggggtaggggggtgtggccggcaggggcggggcgagcccggcatggggcctgggggcggacgcgcttccgcgccccctggcgccaggcggggctcgtcgcaggtgtcacggccctggcccgaggttcctccgcgggcggtttccctgggaaccagcgcgagccggagctgcgctctgtttcgtcgggcccgcgctctgtttcgtcgggcccgcgctctgtttcgccgggcccgagaggcggcctcaggttaacttcaagcatgttgggctctccaggagggagaagaggcacctttgccgtgggttgaggactcctagaaccaacctgagactccgcggccatatacaccttacgacgtgtgtgtgtgtggcgggagatgggaggggaggaatcctgtagaacccagatcccatcattccagcaactgccag

SEQ ID NO: 10029 - DNA, 2300 bp, Homo sapien
gctgaaaaaaatgtatattctgttgatttggggtggagagttctgtagatgtctattaggtctgcttggtgcagagctgagttcaattcctgggtatccttgttgactttctgtctcgttgatctgtctaatgttgacagtggggtgttaaagtctcccattattaatgtgtgggagtctaagtctctttgtaggtcactgaggacttgctttatgaatctgggtgctcctgtattgggtgcataaatatttaggatagttagctcctcttgttgaattgatccctttaccattatgtaatggccttctttgtctcttttgatctttgttggtttaaagtctgttttatcagagactaggattgcaacccctgcctttttttgttttccattggcttggtagatcttcctccatccttttattttgagcctatgtgtgtctctgcacgtgagatgggtttcctgaatacagcacactgatgggtcttgactctttatccaacttgccagtctgtgtcttttaattgcagaatttagtccatttatatttaaagttaatattgttatgtgtgaatttgatcctgtcattatgatgttagctggtgattttgctcattagttgatgcagtttcttcctagtctcgatggtctttacattttggcatgattttgcagcggctggtaccggttgttcctttccatgtttagcgcttccttcaggagctcttttagggcaggcctggtggtgacaaaatctctcagcatttgcttgtctataaagtattttatttctccttcacttatgaagcttagtttggctggatatgaaattctgggttgaaaattcttttctttaagaatgttgaatattggcccccactctcttctggcttgtagggtttctgccgagagatccgctgttagtctgatgggctttcctttgagggtaacccgacctttctctctggctgcccttaacattttttccttcatttcaactttggtgaatctgacaattatgtgtcttggagttgctcttctcgaggagtatctttgtggcgttctctgtatttcctgaatctgaacgttggcctgccttgctagattggggaagttctcctggataatatcctgcagagtgttttccaacttggttccattctccacatcactttcaggtacaccaatcagacgtagatttggtcttttcacatagtcccatatttcttggaggctttgctcatttctttttattcttttttctctaaacttcccttctcccttcatttcattcatttcatcttccattgctgataccctttcttccagttgatcgcatcggctcctgaggcttctgcattcttcacgtagttctcgagccttggttttcagctccatcagctcctttaagcacttctctgtattggttattctagttatacattcttctaaatttttttcaaagttttcaacttctttgcctttggtttgaatgtcctcccgtagctcagagtaatttgatcgtctgaagccttcttctctcagctcgtcaaaatcattctccatccagctttgttctgttgctggtgaggaactgcgttcctttggaggaggagaggcgctctgatttttagagtttccagtttttctgtactgttttttccccatctttgtggttttatctacttttggtctttgatgatggtgatgtacagatgggttttcggtgtagatgtcctttctgtttgttagttttccttctaacagacaggaccctcagctgcaggtctgttggaataccctgccgtgtgaggtgtcagtgtgcccctgctggggggtgcctcccagttaggctgctcgggggtcaggggtcagggacccacttgaggaggcagtctgcccgttctcagatctccagctgcgtgctgggagaaccactgctctcttcaaagctgtcagacagggacacttaagtctgcagaggttactgctgtctttttgtttgtctgtgccctgcccccagaggtggagcctacagaggcaggcaggcctccttgagctgtggtgggctccacccagttcgagcttcccggctgctttgtttacctaagcaagcctgggcaatggcgggcgtccctcccccagcctcgttgccgccttgcagtttgatctcagactgctgtgctagcaatcagcgagattccgtgggcgtaggaccctctgagccaggtgtgggatatagtctcgtggtgcgccgtttcttaagccggtctgaaaagcgcaatattcggatgggagtga

SEQ ID NO: 10030 - DNA, 2300 bp, Homo sapien
tcataagtgaaggagaaataaaatactttacagacaagcaaatgctgagagattttgtcaccaccaggcctgccctaaaagagctcctgaaggaagcactaaacatggaaaggaacaaccggtaccagccactgcaaaaacatgccaaattgtaaagaccatcaaggctaggaagaaactgcatcaactaatgagcaaaataaccagctaacatcataatgacaggatcaaattcacacataacaatattaaccttaaatgtaaatgggctaaatgctccaattaaaagacacagactggcaaattggataaagagtcaagacccatcagtatgctgtattcaggaaacccatctcatgtgcagaaacacacataggctcaaaataaagggatggaggaagatctaccaagcaaatggaaaacaaaaaaaggcaggggttgtaatcctagtctcggataaaacagactttaaaccaacaaagatcaaaagagacaagaccattacataatggtaaagggatcaattcaacaagaagaactaactatcctaaatatatatgcacccaatacaggagcacccagattcataaagcaagtccttagtgacctacaaagagacttagactcccaaacaataataatgggagactttaacaccccactgtcaacaaccccactgtgtcaacacagatcaacgagacagaaagttaacaaagatatccaggaattgaactcagctctgcaccaagcagacctaatagacatctacagaactctccaccccaaatcaacagaatatacattcttttcagcaccacaccacacctattccaaagttgaccacatagttggaagtaaagcacacctcagcaaatgtaaaagaacagaaattataacaaactgtctctcagaccacagtgcaatcaaactagaactcaggattaagaaactcactcacaactgctcaactacatggaaactgaactacctgctcctgaatgactactgggtacataacaaaatgaaggcagaaataaagatgttctttgaaaccaacgagaacaaagacacaacataccagaatctctgggacgcattcaaagcagtgtgtagagggaaatttatagcactaaatgcccacaagagaaagcaggaaagatctaaaattgacaccctaacatcacaattgaaagaactagagatctgcctggccaacccgtctgggaggtgaggagcgcctccgcccggccgccccatctgggaggtgaggagcgtctccgcccggccgccccgtctgggaggtgaggagcgcctccgcacggccgccccgtctgggaggtgaggagcgcctctgcctggctgcccatcatctgggaggtgaggagcgcctctgcccagccgccccatctgggaagtgagcacctctgcccggccgccccatctaggaagtgaggagcgcctctgcccggccgcccatcgtctgggatgtgaggagcacctctgcccggccacccttcgtctgggaggtaaggagcgcctctgcccggccgccccatctaggaagcgagcgcctctgtccggccgccctgtctgagaggtgaggagcgtctctgcccagccaccctgtctgggaggtgaggagtgcctctgcccggccgcccgtcgtctgggaagtgaggagcgcctctgcccagccgtcctgtctgggatgtgaggagcgcctccgcccggccgccccgtctgggaggtgaggggcgcctcttcccggccgccccgtcagggaggtgggaagcgcctctgccctgccgccctgtctgggaggtgaagagcgcctctgcccggccgccccgtctgggaggtgaggagcgcctctgcccggctgccccgtctgggaggtgaggagcgcctctgcacggctgccccgtctgagaggtgaggagagcctctgcctggccgcccactgtctgggatgtgaggagctcctctgcccggccaccccgtctgggaagtgaggagcacctctgcccggccgccccgtctgggaggtgtacccaacagctccgaagagacagcgaccgtcgagaacaggccatgatgacgatggcggttttgttgaaaagaaaagggggaaatgtggggaaaagaaagagagatcagattgttactgtgtctgtctagaaagaagtagacataggagactccattttgttctggactaagaaaaattcttctgccttgggatgctgttaatctataaccttacccccaaccccgtgctctctgaaacatgtgctgtgtca

SEQ ID NO: 10031 - DNA, 2300 bp, Homo sapien
tttagagaaagctgctgttaatatttttggatagtagcctttcagctttcagatattttctacttacatatgcatatttttgaaacaaaaagtaggctttttttttgctttttaaacctaaacattaaatatattttcccttgggtaaacctacacatcctaatccctgtttatagaattttaacataatttaattgtgtttggagatgaggtggttttcagtttatttttcatattataatgctgtgacgagtatccttatctgtacacttctgaacattgtggagttctttcatgtggatgcctggagataaaattgtgtcgagatatatatgtatttttaaatgtttgatctgcattgctagattgccatccagaaaagttaatcaatttgtattcacagcagcagtgtacaagagggctggttttctgaagataacatttttttcagtcctgttcagaggtttggtcaatcttacctgtagatgacttcagccaccaggctggatgggagcccacagacaaaaggacattggtgtatgttatggtgaaaaccatcagtaccatgcctagctcaagaatgtgaaattgaacctgaaaaaaactttgaacctacaattttatgttctgaaaatagttattctaatgtgagggcattaataagaatatgtaccatcaaagcttcagaagattttccgtacaaactaaaatcacttttggagaaagtacctaaataaaaagagaaacaaatccaggagatactgtacggtttgaaagaaaggtaatcaaatactcagaaaaagtttgttgatgacttaaaaaggataaataaaaagtaagactaaagaaaatcagtatacccattaataataaatctttagtaatctataaggggaagaatgcttttcaaccttatacactagaagcatgctctttaaaattaatgcaacaggatgacgacttgatgtagaaactatatgtggaattatagattaaaatgtgattgaaacatatttagaaaatgtgattatcttcctgatcctactccctttaggaagaacttcttaaactggaagcaggaaaaaaaaaaaccataaaagataaccataaaagaatataagttatggtatattataaattcttaatttagaaatcgtgcatcagtagttaggcattgtggctcatgcctgtaatcccagcactttgggaggcagaggcagaaggattacttgagctgcttgagcccaggagtttgagacgggcctgggaaaaatagggaaactccatttacacacacacacacacacacacacacacacacactgtgtccatgaacttgggaggatgaggtgggaggattgcttgagcccaggggttcaagtccaacttgggcaacatagggagaccttgtctctaaaaaaaaaactaaagctaaactacaaactgtgaggcaatatctgcaacatttataactagtaatagcttagtatcaagaatgtatgcagaaattctacaaaccaacaaaaaaggacagtgtcacagaaaaacaggcaaaagactgaaccaggccttccacacaattagaagtgcatgtgggccaataaacattaagaggttttcatctctcaatcaggaaaacgtaaatcaagatgacaatgacatgttcaaattcattcgattggtgaaaatgaagaaacacaaagtcaagttttggagagggttttagtcattaggatcactcacatattgctgatgggggtatcaattggtatatccactgtgaaaaaccattcactagaaaagttgggccaggcccagtggctcatgcctcttggctttgggaggccaaggtaggaggatcacttgagcccaagagttcaagaccagcttgagcaacatagggagaccacatctgcacaaaaagatttttttgaattagctgggcatggtggtgcatgcctgtggtcccagctacttgggaagctgaggtggaaggattgcttaagcccaggaggttgaggctgcagtgaatcatgattgtgccactgcactcttaccttgggtgacagagtaagatcataccttaaaaaaaaaaaaaaagtatacccatgggtcagcaatttcacttttcagtatatacttgagaaatgcttgcacaggtcccccagatcacacatataagaatgttctggaataaattaaaatgtctatttttaggaaggtgtaatgtgttcacagaatgggtgattattacatggcagcaaaatgaatgaataccagctacttgcagcacaataact

SEQ ID NO: 10032 - DNA, 2300 bp, Homo sapien
ttctccaggagatctgtggaatagactcctagaagtgggtgtactggctcaaaaataaaaatatatgtaattttgctagatattgctaaattctactccagatggttttatcaatttgttatttggatggattttgaaggatgtatggtaagacttcaggaaaaatatagggttttctgatgacatttgaaaagctgatacaagtatgattttttttgttgttggattttttgtgtttttttggtaagttttcttgaagcaaacataggcctcagaaatcaagcttttggtcattttacatcccaaatacaaaggttttctgcttctctaagctgctaactcatagcacttttcaattcacttgtgtccattcttactgagcatttccagtgggcaaaggcatgtgctaaatgctggtgagatatgcaaataaatcaacataattctgcctgccacaaactcatgatccaggtgggagacagacatataacacctgatacaaggcaaatggccaggtgatagaattgaacatgctttgaggacactgtagagtgagggatgctctctgactagtggtctctggggagatactgggtatgatgggatttggactggccttgaggaaaggcatttttatcttaggtaattatgggaatgaggtctcagacactggagagtgcagggtgttcagggggcctcaacagatctgtgtggctgctctgggagtttcagagagttctccagtgtatcatgagatacatctgtctttgaactgcgtacactaagccttgaatctggaatgttcagcttttgattctttctgagtgattgctctacagtgttcgaaaccctcaaagcttcagtttggatgataagaatctcaaaggcacatagccctgagtttgaccctcaaccacaaaacagtctctattgcccttgaactcagccttggaccagcctctctgcaattcagaaagtgctgtgggattttgaacttgcaaacagagagaaagataggaggagaggtcatggggttggaatgtgagttgataagagctttccaggctttttgttatggctgagaaatgggcatatgtgttcatatgacaactgaagtgtgtgggtggggaagaggatggcctggactctctgggtttggttggtctcccctttctttttctgatgtgtcagtgacattctgtgaacaggaagaaatatgtgctttaaaaaaattgcttttttttagttaggctacaatataagcagtatacaatagttcattggattttgaagcagatattgacacctcaataattatcttctcatttatagatgaagaaatggaagcacagagaggttattgcattttgtctggagtctcacttctagcaggtgacagaactcagagaaaagcccaggtctttgttccttcttccctcacatgagaaatttgatgcgtattttattagggagaactagagtcattttctatgaattttggttatgaacagacaattcaacatcattcagaagactgttctgactttctttcttcttcttcttttttttttttttttttttttttgagatggagttttactcttgtttcccaggttggagtgcaatggcacaatctcagctcactgcaacctccgcctcctggggttcaagtgattctcctgcctcagaattttaaatatggaataatggccattgaaaataaatctttcaattccagatttgccaatgtccttcagctccatttttgagttacaaggtcatattttcactttattggaaattgaacagaagcagtttactacacagccagcagtttagcaagactgtgttcagtttcaaacctctccagatttatcttgaatgaacttgaagatgtgtgtgtctgtaaccattttcaacagtataatccagctgtctttgaatgggctgtagacagctttgtagtgatctcaaattgttaatttatgcactctgtttgatttttcccttttaggaccagatctttatggaaaatgtaggtgcagtgaagcaactgtgcaaactaactaacaaccttgaggaaagaatagaagagttagaaatatggaacagaaagctggcccggctaaagcggctcagtagttggaagtcatcagccagtgaagcaagcacaatcaggtacgtgcagccaggattgccatagaaatttggggaaaggagagagtgagctctttccagaataagatcaatctaaatggtctttttgatcaaacagcaaccgctactttctgataatgaag

SEQ ID NO: 10033 - DNA, 2300 bp, Homo sapien
tgtgcctattagtaaggactacttttcaggtaaaagtaagaaaatctagtaagatagttaaaagaaaccaaactaccaaatgggcaaacttaatcaacattaccaataaagatgaactttttgatgcaacaggacaatttaaaaaatataccatctattggtaagaactcttactataagaattcttactatacaagcctttaacaaatgctagctcattaaatacctagagtaccctctaaggtaggtattaaaaattttttaacaaatttataatagatttggcacaaataataggacaattaaaggcttgttcttcaacccggcttaaagtgaattcatcctaaacaaataggtgttcagtgagagtcaaagtaagtagtatcaaatattgaaagtaatagtatcagtgtattttctcctaacactcctaacccacacatttattatgaaaatgtttgttgttctatctcttccagtaaaatactcaaggtaataaaactctcatatcagacttacaccctctggaagtcattccatagaggtatattcaatcttttaacacaccatcttatggttgaagatgttaacatgagaaggaggagaaagcaggaagaggaagggactatttgcagaagacggggagaaagaaaggaaagacactagtatgtgttgttcctcctcgaattttcctgaagtgaaaaaaaaacagtgaagtagagtgtttgatgaaatgaataaccaagcaaaacattttctacctacaccagtaccactaggagttgaaataaattcacacaatgtctgctgatatgtcaaaacaccttaccttcaaaaacatgacagttaccttttattttatagtatgcttgtgtttcttcctatttcttgcttttgaccttcaatgataaatgtaaactggattacagtgattcttttgtaagtaaaaggtgactttttaaaagaaacaaccaatggaaatagaaattttatttacttcaaattaactgtactttactcaaatagaaaagaataattttcacattatgaagctacacaattccaaaatacacatgctgaggctctttttaagtccgaattgtctagtaattacaaaaaagtgaagagtttacagatatacaaggaaataaaggcgaattattgcaaagaaaacaagtttaatttcactttgaatgacaacgatttttctggaaagcagatacttcactcctttaagtttccacccaagccacaataatttcaaacggtcttgcggatgacccagctggtcactcttgtttatgtggggactggaggtaatgagagccaaaaaaagtgctataaacctaatttggctagagcaagttcacacgacacgaccgtgctttaaaaacttgctctccattatgtacttccttccatcaggttggggaaaaaaaaatggtggggatggtgagtaaacacaccagtggtttcatcagaggggaactcactactcaggaggtgacggtgacgtggtgccggtccctgaagtacgcgcacaagctccggaggttgcgggagctgagggaggaaacagggacacgatcagattcgctccaggtggcgggagtgaggaggggaggagtgacgaggcggacgtgcgggggcgggggtgtccaacacaaacacaaacacaaacacgaacacgaacacgctcagcgtccccggggagggcggactgaagccacctcaccattcatcgcccctggaccccgcagtccccctcggactcagggccagagccttctgcgaagcaacctagccccagggaaacggtagcggccgcagaagccccgctctctgtaacggccgcggaggagcagcaagcctccctgtgagtcggtgggagacaagacggagcggcggtaagggcggtagggaagtgaagcgcctctctccaccttgttagaagcgcgctgaaagcggcctgcctacccaccccatcgctgccgttttgcagtcgtcgctcccaccttccgctgccgcctggagggaagccggagcgacgggggtcacggcggcggtcagagggtaaaggtcttgctcccagcagcctccgcggtggatacgtcgccatcttggatccgcgggacaagaaaattcatgcggtgagtttttggtaaattttcggaagtctggcagcggggcgcgcggcgggggcggcagattcggggcccccgcaaggcgggggaatgccccggggccggtccggtcgcgcccagggtccgccggtagcgtcccggcccaccgcttcccgt

SEQ ID NO: 10034 - DNA, 2300 bp, Homo sapien
acccggcttaaagtgaattcatcctaaacaaataggtgttcagtgagagtcaaagtaagtagtatcaaatattgaaagtaatagtatcagtgtattttctcctaacactcctaacccacacatttattatgaaaatgtttgttgttctatctcttccagtaaaatactcaaggtaataaaactctcatatcagacttacaccctctggaagtcattccatagaggtatattcaatcttttaacacaccatcttatggttgaagatgttaacatgagaaggaggagaaagcaggaagaggaagggactatttgcagaagacggggagaaagaaaggaaagacactagtatgtgttgttcctcctcgaattttcctgaagtgaaaaaaaaacagtgaagtagagtgtttgatgaaatgaataaccaagcaaaacattttctacctacaccagtaccactaggagttgaaataaattcacacaatgtctgctgatatgtcaaaacaccttaccttcaaaaacatgacagttaccttttattttatagtatgcttgtgtttcttcctatttcttgcttttgaccttcaatgataaatgtaaactggattacagtgattcttttgtaagtaaaaggtgactttttaaaagaaacaaccaatggaaatagaaattttatttacttcaaattaactgtactttactcaaatagaaaagaataattttcacattatgaagctacacaattccaaaatacacatgctgaggctctttttaagtccgaattgtctagtaattacaaaaaagtgaagagtttacagatatacaaggaaataaaggcgaattattgcaaagaaaacaagtttaatttcactttgaatgacaacgatttttctggaaagcagatacttcactcctttaagtttccacccaagccacaataatttcaaacggtcttgcggatgacccagctggtcactcttgtttatgtggggactggaggtaatgagagccaaaaaaagtgctataaacctaatttggctagagcaagttcacacgacacgaccgtgctttaaaaacttgctctccattatgtacttccttccatcaggttggggaaaaaaaaatggtggggatggtgagtaaacacaccagtggtttcatcagaggggaactcactactcaggaggtgacggtgacgtggtgccggtccctgaagtacgcgcacaagctccggaggttgcgggagctgagggaggaaacagggacacgatcagattcgctccaggtggcgggagtgaggaggggaggagtgacgaggcggacgtgcgggggcgggggtgtccaacacaaacacaaacacaaacacgaacacgaacacgctcagcgtccccggggagggcggactgaagccacctcaccattcatcgcccctggaccccgcagtccccctcggactcagggccagagccttctgcgaagcaacctagccccagggaaacggtagcggccgcagaagccccgctctctgtaacggccgcggaggagcagcaagcctccctgtgagtcggtgggagacaagacggagcggcggtaagggcggtagggaagtgaagcgcctctctccaccttgttagaagcgcgctgaaagcggcctgcctacccaccccatcgctgccgttttgcagtcgtcgctcccaccttccgctgccgcctggagggaagccggagcgacgggggtcacggcggcggtcagagggtaaaggtcttgctcccagcagcctccgcggtggatacgtcgccatcttggatccgcgggacaagaaaattcatgcggtgagtttttggtaaattttcggaagtctggcagcggggcgcgcggcgggggcggcagattcggggcccccgcaaggcgggggaatgccccggggccggtccggtcgcgcccagggtccgccggtagcgtcccggcccaccgcttcccgttgcttttgtctcggctccaatcgagagacggagagcggagcgggcggggaggggggtggcggcggtggagggagggagggggtgtgtatgggggtggtggtggaccggacgtaaagcgtcgctgtactcgggccgctgcagcagcagcagctccagatcctaggcccggtcccatccgcgagtggtggggcttccccagactccactcccctaggctcccgccagcgcggaggagccgctgccgccgcgctgcttcctgggggagaagagaaggcggcagcggccgtggccgtggccgacgagctcgagcccgctttaga

SEQ ID NO: 10035 - DNA, 2300 bp, Homo sapien
agaatttcagttaaaataagatagaattttctgattttgttccctagacttagaccaccgtacttcagttttgaggcagaggtttcattcacagaagactttgagctctggaatcattgaaaaacgaaccatattcattaaattattggtagtcccccaactgctgtgcattaataggaattaattctgcctcatttcagttcctcaacatactgagctagaataattgtatcttgttatttgttcatcattgcttcagatcttagacatagcttttcctttcttggaaaagaagattataacaatagaaaaaaaagattatttcctatgttttttatttttcctgcaataggaaaaagattcagattgaagatttgtgattttcggttatgctatttcaattattaaactcacttttaagcaatgtaatcacaattgtctttatgctaacaggaaaagaatacaattcttacatttaaattaaaaaaagaaaatctcaaaacctgaaaggtattagagaacaaagcatcttcctaatttggacgtttttcaaactctacatcttcttaatttattgagaaaaagacacttaggatcttcctgtaattaatttgcccattgctgggaaatacttgttacctgtcataatgtagtgcttcaaaataacgttatcagaactgcagtcgaaaggtactcaataccagttaagtaacatttgaagtccaggaaagagaagtcaagaattccatgattccatgtttccgtattcatcaggaacataattaagagtttattcatttgagacttacaagcaaacaaaaaaagtttatgtagtttgcaaggaagttaatattctgattttattcttcgaaatgtacatataaatagttctcaagtttgattttatgataaaagtgtagtttgggaaaaggtcattctaactttaaaaaggtcgcgaaaacaatagaggctgaagcattgttagcgtaattgggggaggagggagcaacggcaagaattaagagcagaacacaggtctagaaacagtacctgtcccaaagtgggtctgcccggcgctgtcgctttaagcagcgctcctggaaacctcatctacaaatcctggggcgggtcaggggtggcaagactcctaaggagggaaacgacagaaatgattctgttcttgcgagccccaaagcaagagtacttttctgatgggtaaagtggtatttctttccaggctgcaaagctctccacctttttcctttggtctcagtcagccccagccatgggggcaaatcaagttggggtcaactcggctgccagagacctaagttgccacaagggtcaccgacgacctaagcagcaagtttccttcgtccagcctcctgcccccacgcacattgcctccacagcaaactccacctgactcagcttgtttaactccaatcctgcagccctcccggcctcagcagggtcagggggcgcgggtctgcgccaagacggttaggaggcccaagtcctgggactggacggttactgcgctcccttgggcgcagccgctggcggcgtgggcgcggctgggtcacgcctccggcaccaccgcgcgccagcccgcccgtggcatgggaacctgcgattcagtcgtccccggggacctcccagcgcacaccgctagcctggggctttcacctcgatccgcccggcctgggcggctcgtgtcctcccacaccgccacccgtgcccgcttcccggggtgcgcccggagcctggccgctctccctgcaggtgaccagtactcgtttggagttcaagattcccgccgctccacttgaactccaccctcccctcttattattattattattttaacttccctccggttaagctaaattgatcttaatctttcatctcggacgtccctctaaggggagtgagcgaagattccgattgcaagtcgccgctgtcgcttgtgcccgtcagcccctcgcccaaaggagacgcccccgggcggggcggggcggagcggggcggggcggaagggcccgggtctgctgcggacggggcggggcggagcctcctcctgcacgggggagcccccgggctcgccccagctcagacactcctagccttggggcagctgccgggcgagtcagcggagtagcggccagcgggcgatggagacagagagacacccgacgagaggaggcggggtgggggaggcggggagagtgcgggggcggaggctggcagggggcgctggaagctggagcggtccgtgcgctccccgcgcccgagggtgc

SEQ ID NO: 10036 - DNA, 2300 bp, Homo sapien
agcctaggtgacagagtgagactccatctcaaaaaaaaaaaaaaaaaagaaaaaagttagatttccaggatctctttctaatggccgaagattagagatcatggcttgtggagcacatctcatcttcactttctgtgaatgggaccaatgcaggaattgaaaaatagagcctcacattgacaagacagaaatctattgctaggactttgcaagatttattaagaaagtggtcagtgttttaaaatgacggctaatttcacccagaagcatggaaaaaggcactcattcagccattgtctgcttattaataaaaacctgtagcttacatagtgaagctgagttgccctgagaattacaccagctgtctttctgactaaattcaagcagtggctttaactgacctttttttttttttatctgaattaagatcatttgggccacacctatgagctgaggtctagttcagatttgttggagaatgctcacccatcagtaattttttgactgattcaagccccttgaccaatggacattagaggatgaatgagaaagtggaatacattaagtaacttagaatgaagaaaaatcatagcataagagatacatttttgacactttgtaacatgtaaattataattaatacataaatttgcaccaattacttgactcaagagctcaaaactttctgtaatgggtttgaagcacaaaaatacagtgtttatagtcagagtgcagcctttactttcaataatggttatggaaagcaagtttggctttaggttgtaaagagtttttcagtgccaaggcatttgactgccctttctttcttattctccattgtcttgcagaccagatgatgtgcttctgcatcgcactcatgatgagattgtcctcctgcattgcttcctctggcccctggtgacatttgtggtgggcgttctcattgtggtcctgaccatctgtgccaagagcttggcggtcaaggcggaagccatgaagaagcgcaagttctcttaaaggggaaggaggcttgtagaaagcaaagtacagaagctgtactcatcggcacgcgtccacctgcggaacctgtgtttcctggcgcaggagatggacagggccacgacagggctctgagaggctcatccctcagtggcaacagaaacaggcacaactggaagacttggaacctcaaagcttgtattccatctgctgtagcaatggctaaagggtcaagatcttagctgtatggagtaactatttcagaaaaccctataagaagttcattttctttcaaaagtaacagtatattatttgtacagtgtagtatacaaaccattatgatttatgctacttaaaaatattaaaatagagtggtctgtgttattttctatttccttttttatgcttagaacaccagggtttaaaaaaaaaaaaaaggtgaggacatctgggtctcatttgcttctgctaggttaaacttttacttgacaacaaggattcctgctgaagtctgaaccttactgtgtaaccctcagtttccactattaaagagtatcttttgacgtctgcttggaaaatgaatagtatactggtaactcagtctccagtcacctctgtgtctcttaagcaagagattctaaaagattgggaaaacatatcctccaacacctgcctttgcctaaccattatttttcaccagattacttcttaagagagggaggtgattctgaagaaggcttctatctcaaaaagcactgggcttccttattcatctgttcttgttgtttttgacggagttaaaaaagtttgtgtgcaatacaatatacatgatgtgaaggacactcttcagcttagtgaaacgctgttttcatttttttttttttttgtaggtcagaaaaaaacaacaaaatcagttcaagcatttttttttctttgtccttgccttgatgttatgagtattaaaaccaggaggattgctgccattgtgcagtttgcttagacaaacctggagatgcaacccagctcacatcattgctactgatgagctttctgtgcctttatcaaaagttgattgagaagaccatatttctttgtatctttttataaactcaaattccaagtatcaaatcgcaggtctcagtgaacatcaaacctatttactacatagaatcaaacctttgtttaggtgagatgtacatcgttagtggaggaaaaactgacaacctaatttcatttgttttcttctgatactcttcagacatgcctctattagaataaaggtaaactggaatttaaagaca

SEQ ID NO: 10037 - DNA, 2300 bp, Homo sapien
agcaaggaagaaatttagaatttagtccaaattgtaggcaaataataaaaactttaaaacaatggaaaggctagaacctaattacaggtgtactatgacagagcaggagcatcgccatcttggacaagcccctcattctaaagttcaccttaataaaaaaccacctaaatccaaaggacatcagcctaatggctaaggtcagcatgaccataaaccacaaataacatctccaaccagaaacattccaaactcctccctgaccagagacatgccagaccagagataaaccctgctctggcctggaagatgctagccctgagataaccccgttccaggctggaaagatgtctgtcctaagataacctcccctcctcccagaaagattctgccataaacttttccacacacataaacattcataagccccctcaccctaaaaccaatatatactcctagtctgcaagagaaagggcttctgaccaaaatgggccggggatacctctcaggtttgatctaaagtaaacctgtcttcaactgcaagctgtgttttgtgttcctttcctctttctttaactcttacatactatagttttcttttgactttttttttttttttttttttttttttttttttttgtcagagacagggtcttattctattgcccaggctggagtgcaatggtgtgatcatggctcactgtagtcttgacctcctgggcacaaatgattctgccacctctgcctcctgagtagctggagacaacgggcacatgccaggacacctggctagtacttttttttatttttgtaaagacggtggtctcactatgttgcttaggctgggtcttgaacttctggcctcaagtgatcctcccaccttgacctcccaaaatgctgggattacaggtgtcagccactacacccagctatagttttcttttcgaaacatagtttttctctccagttcctcatttctaccaaaggcaaatcacagtaggacaaatctaagttttagtctttttatgcttggcctgtgctcctttgggacacacacagataattcaggataatctctctatctcagggccagctgagtaccagccttaattttatctgcagtattggttctcctttgcaatgtaatctaaatagtcacaggttccaagggttaggatgagaacatctttggcggcccattattctgcctgccacatgaggatactaaaatataatgaggataaaaatagtacctactcacagcattgtactgaggaaaagtacattctagagttcttacttatctttgagtaagaatttaaatatgagcatttattattattaataacaatctatattagtttgctagggctgccttaacaaactactgcaaagtgagtggcttaaaacaacaggagtatattgtctgtcagtcctggaggccagaagcctgagatcaaggtgtcatcagcgtggttccttctgagggctttgagggaagaatctattccatgcctctaccctagcttctggcagtttattggcaatctttatgttccttggcttgtagatgcatcacttgatctctgccttcatgttcacatggtgttttccctgtgtgcatgtctgtgtccaattttcccctttttataaggacaccagacacattggattgagctcattctacttcagggtgacgtcatcttaattagttacatctacaataatcctcttctcaaataaggtcacattctgaggcgctgggggccaggactttaacatatgaacttttgggatatttggcttaacccataacacaatccaaaggataggactaggaccataggatggaaggcataggaagagcatcatcattttcagctaatttttaaatttttttttagagatgtctctctctctctctcctgccaccatgtgaaaaaggtgcttgcttcccaactttgccttccaccttgattgtgaggcagccaggtgggtgagcgtccctgcagaaactccaacctgccggcccactgaggtggagccccgggaggttcacaccctttgcagcagggaggagcctggcccctcctcttcctgtttggaacctgggattcaaatggcctggcaggaagtgctctagcagagggactctggccttgcaagagtccctatttccccctttttttttgcttttcacacagtaaaaccctgctttacttccctttgagtcgtctgtgagcctaaatttttgtggctgtgggaaggacaagaaccccatctttagctgaaataaggaaaag

SEQ ID NO: 10038 - DNA, 2300 bp, Homo sapien
aggatgttagctataaaagagacctttgcctccttgtttaataagtggggaaactgggatccccagaagcctgatggctcagcctggcctggctggaggctgctgagagcccagtctccttcactgctcacaactccctctgagcagttgctcagcaagggaagttatcagcaagggaaggttccgcagaaatcaatttccttataagagaactcacggagtataaggaagggggcccaatgcacaagcttggctgcctgtggctgagacacagtggcagtggaggtctttatggtcaccaaagcactgactcttctatatctatttatatttcaaaagtagtaaattcttaaatagccaacagatgggtctgtcctcgctatgtaacccttgtagttctctgcagttagccaacatctttgagattcttccacgtggcagacccagatgctgagagaacagaggtggataagacactgaccttgcactcaaagaactaacagtccagcggggcttattgtacacacctcctttttttcactatcttcctagaataaagggaacaaaccagcagagtatgcagtgaaatgattttctcattcagtaatgcaatgaaattgggattcatctaagaaaactggtgtagtgaaaaagacatgaactttgaggtcacatctccaagatcaaaccctagggccccatttcttagctgtgtgaccttggagaagttacttttgagtctcactttgtactgataattgtatttacttcacaaggtttttgaaatcattaaatgaggtaatttacgtaagctacataggagtgtccggcatttgttcatctactcaatttgtaaaggacctactacgtactagacacagttgtaggctctcacagaatattttatatatatatatacacacacacacacacacatatatacacatacatatatacacatatatatacatacatatacacacatatatacatacatatatacacatatatacacatatatacatatatacacacatatatacacacatatacacacatatatacacacatatatgcacacacacatatatatataaaaagaatgaaaaatgccacctctctgcccattaccattgttctcttttcagtggtaataaaagacagtcactcttttatttaccagagaccattagtgaagcgatgttcaagaaatttgctaactatataatcccatcattgtcaacagtttgtgagtttctcatctttcttatgcatgagaacaggccctcctctgacatgtttctgcttttccacagtgtcagtatgtctacctacatcagtgtgtaagagatgtcctcagagcaagaaagctacggagtgaacaagaaaaccccttgtttccaatctatgaaaatgtgaatccagagtatcacagaggtgggcacttacttcacttacttccccaagtttcttcatcaagatatggtcaatctggccaggcatagaggcttacacctgtaatcccagcactttgggaggctgaggcaggaggatcacttgagcctaagagtttgaaaccagcctgggcaacatagggagatcctatctctacaaaaaactaaaaaaaaaaaaaatagccagacatcatggtgcatgcccgtagtcccaattacttgggaggctgagggggaggatcacttgggcttgggaggtcaaggctacagtgagctgagatcgtaccactgcactccagcctgggtgacaaagcaagatcctgcctctaagaaaaaagaaagaaagaaaagattctagctgagtgcagtggctcatgcctgtaataccagcactttgggaggccaaggcgggcagatcacctcgagaccagcctggccaacatgatgaaaccccatctctactaaaagtacaaaagagccaggcatggtggctcacgcctgtaatcccagctactcgggaggctgaggcagaactgcttgaacctgggaggtagaagttgcagtgggccgagatcccaccactgcactccagactgggcaacaagagcgagactctgtctcaaaaaaaagaaaagaaaagaagaggagaggggaggggagaagaaaagagaaaaaagaaaaagattctggaaaccattaataacctaaagctcttccaatgtacaccacccatttcttctcctacccataaagagtggcaacggggaagagagggagggtagggagggggttcctgcagctgagcagcagtttcacaaggtatctcttccagcctagctgaggatg

SEQ ID NO: 10039 - DNA, 2300 bp, Homo sapien
aagaaggcttgcagtatctgtggagagcaggaggggacccctgccactgatgaggctgacaggtatgccaggctgtgaagagccactgaacttgggcacaaaatacagagtaaaagttctttactcttcaggtgacctaggcagagaaatagggagtttttttgttcccagaaatacacagatgttctaggtttgaccttctttgagtgtttgttaacttgaaaggatttgaaatctctggtctggctgtagattaaaagtctgtagaatctctcgaggggaagaaacttcgttttttcattaagaggtatttttaaaagcatgttttctaaaagaattgaagcaggccaggcacggtggcacacgcctgtaatcccagcactttgggaggccaaggcgggtcgatcacttgaggtcaggagttcaaggccagcctggtcaacgtggtgaaaccctgtctctattaaaaatacacacacacaaaaaaaattagctgggtgtagtggcacacgcctgtaatcccagctacacggaaggctgaggcttaagaattgcttgaacccgggaggcagaggttgcagtgagctgaaatcgcaccactgtactccaacctgggtgacagagtgagactctgactcaaaaataaataaataaataaatagaattgaaacaattttcacttttttcttttttcttgttttaactttcctcaaagtagacacagtagatatagtagacaataacatagctttatgtatagcctatttgaaaaagaaaggaatatgccatccttcccgctgatttgaaaattagaatgtggaatttcatttcttttggcagttgttagggatggtgctccaaaaaagcaataaaaaattataaaacttgttgcaatattttgcttttctcacttgtgtacaattaaatatttttgctctttagttattgggagcttttctaaaatcagttttcagataaataaccgtttgggtactgaagcagttgctaaagggcatacagttagggctgaacgctgaataaatgccattttttttttaacttgtggagagctgactatcaacagtagtttccacaaatgagagtttacatggctgtcttcttttggctggacaattagggatgaaatggctttaactactggatgataaaactgttagctgtgggttgaacacttggtagtgattatatttgtcgttagcgctatttacataagatttagggaggatacaaacctatacaagagaaaagggaaagtgattgggagaaaagaatggtcaagctgacaatccttttggggtctttttctcttgctagtgtcaggggatgccaccgggacaaatgaatgctttgaagtgagaagggcaaaagctctctaataaaagacttcaggaaagagtgcaggcgacctggggaaatatgctgcggtcaagtttaatcctgggaaaaagtggtcctggagaaagcagatgaggaagataggaaggaagatagggagggggagacgctgggtgtggagggaggaaaggggcgggggtgggggcctggaaagtgacagggagcaagcactaattgtggctaaggcgactgggtcgagaaccacagactggggaaaagggagagtacgggaggaggaggaggcagagccccgcggagccggaccggacccctggccgggaaggtatcggcgcggggcagcgggggcagcttggcccacatcgggccccttggcaggctcaggcgttggctcctcggggctccctccctcgccggcgcattgttcctttgccgggagacgaggaaattgccttttgattgcggaagtcagcggacggggctggggcgaggcagcgcgggtcagaatggcagcgtgggaagggcggcgcgctgcctgtccccgccgcctctcgcgtccgcagcccgcccggggcggcaggagcagcagcagcagcggtggccgcagtggcccctgcgcgtcgccagccccgagggaagcgcgctgcgcccacggggcgcgctgagcgcgcgcaacaggtgaccccctgccccggccctcgggccgtcccacgtccagccccctcggtctcctctggatcttaactactgagcgcaatgctgagccatggagccgggttggccttgtggatcacactgagcctgctgcaggtgagtggcccgagaaggggtcagagctgatgcgccccctccccgccgaaaaccaaattcccactccactttctcgtctatcgggttgtgctttgaagagggaggtggcaaaattt

SEQ ID NO: 10040 - DNA, 2300 bp, Homo sapien
cctccccagtaatgttacacaggtaaaaattaatcacgtgcctagtgtgtgctgggaactgtgttaagccctttatatacattaccatgttaactttgatagttgagacatttggacacaggtaagagggataacaaaagaaccactaggtcgactgttctatgtgtctttggcataataccctagcttggatgaaatctctgtgttacttgaaattgcaagattttagcaaaatcagttattttatgatttcttccttgcagaggtggaatggtgcaaaccagtgagcagtatgaatttgtgcaccatgctctgtgcctgtatgagagcagactttcagcagagactgtccagtgagtcattgaagacttgtcagaccatcaatctcttggggtgattaatcaaattacccacccaaggcttctagaaggagcttcctgcaatggaaggaaggagaagctctgaagcccatgtatggcatggattgtggaagactgggcaacatatttaagatttccagctccttgtgtatatgaatgcatttgtaagcatcccccaaattattctgaaggttttttgatgatggaggtatgataggtttatcacacagcctaaggcagattttgttttgtctgtactgactctatctgccacacagaatgtatgtatgtaatattcagtaataaatgtcatcaggtgatgactggatgagctgctgaagacattcgtattatgtgttagatgctttaatgtttgcaaaatctgtcttgtgaatggactgtcagctgttaaactgttcctgttttgaagtgctattacctttctcagttaccagaatcttgctgctaaagttgcaagtgattgataatggatttttaacagagaagtctttgtttttgaaaaacaaaaatcaaaaacagtaactattttatatggaaatgtgtcttgataatattacctattaaatgtgtatttatagtccctcctatcaaacaattacagagcacaatgattgtcattgggtatatatgtatttactctctattattgggcataaaggtggcttctgctccagaactctatccactgtatttccacatcgtgagtcattttactttaaaagggaaaaacaaatttgtagcaactctgaagtatcaagagttttaactacttgtctctcttttgctaagaagggatttttgaatatgctatctacctggaatctctctctcaacaaaaggtatatgccttcaggaatgatataatctgtcccattttcgaggctccttataaggacatttccatgtatgtccttacatttctgaaagctttcaatcttcaagagacaaaaaaaattaaaataactaccctcagcaaacactagctgttctgctcatatatgaatttttaatgcagcaatgttgactttgtttcatactgccaataaactcttaatactaaatactgagtaaagcatattcttttttttttttctatttggaaagacgccatcctctgtttggggaagaccaaagtagataatgtgatgggtttaattttagtgtctgcatctccccagtgaagatgacgatctcaaaatgtaatattgtcatcacttgggagataatgatctagaagtgccatcattatgtggttttcctcaatagactcgcagcatatcattatacaaacagtacatgtttatgtctttatatcacttgtcatagaccctcatcaattacatggcttatgtttattcagcagaatcacatcacctgaagagatgtaatgtttcaggaacattcaattatctgagatttcaattcctttctttcttcttgaggttaagaagcagtcacatgccaaaggaaaggtaggtgaggtcttaacgagatttactctgctcttgaaggctggaatattttctacattaaaaaaaagaggtaatcataatcccttctttctaaggaaacagacaaaaggacactggtgtaaaacttccccaaacaattcaataggaggaagtgctcgtcactgacttttccccccaccatgaaggcacatttccttcctagtctttgcttctcttatctgggagaattttttttttccccaagcgaagcatgaacagttgctaagtggaaaatggaggctgaattttacatggtgattcttacctgcttgatcttcaggaactcaggtgagtgggtctgcctcagtgtcctgaggcatttcttcaagatctagccaaggagtccctggtctttgaagtgtctgaaataaggtagaaggggccaggt

SEQ ID NO: 10041 - DNA, 2300 bp, Homo sapien
aattttccattttagtttatttaaaatgaaagagaaaatagaaaagcctatgaaacaatataaatgcagttttctatttagattttttaacttagagacaaatttctgtcattgtctcacctgtccctgatttgactgtagttttctttactggtttacttttttcaccagtgaaaaacttacgcaacttattcaattatctcataaagctcttttctcttttaaacctcatattttattgatttctgtaatatgtaattaaattactggacttcaataataagtacacctgccataaaggtgttttggtataaaaacaacttgaggaacacagagatcaaaagatggtaacagaagtactgagctcagtaggagagtgaaccaagactatgcaaggttgcatgtgcctcaacatatttgacagagggaacaggtcattggtcaatgctgtggttaagtagcattggttaagagtcagtgtggaaatcaaagatggaaagtttcattcataaagtgatattttcttggaaaattctagccccccaaggcaattttcccctaccaaaacacctgagccttcatgtcctcatctgaaaaataatttaaataataataatacctgctacccaccctacctacttcaaaggattgtggaaggggctaaatgatatgatgttggtgaaggtacttaaatctctgagcctatgtcagtaatattccatcggagcaccaggaataaaagtagctatagtaataataattttagacaacctgacccattctatccctctcatgtattaatataacccaaatgaagctaagtatgaagattttatttacttagagccacattctatgtgatgatacagatctttagcttatagagcaatatctctgatatttaaatatatagaaactaaaaagaaaataacttaaaaataggtttttttttttcaggcaactaaacaactagctagaccgcctcctcacatagccctaacttggtgggggccagaaggagaatcaagggaagaaaaaagatcacaaaaatatgagctggcggccgggcgcagtggctcacgcctataatcccaggactttgggaggccaaggtgggcagatcacctgaggtcaggagttcaagaccagtctggccaacatggtgaaaccccgtctctactaaaaatacaaaaattagctgggcgtgatggtgcacacctgtaatctcagctacttgggaggctgaggcgggagaatcgcttgaacccgggaggtggaggttgcagtaagctgacattgtgccactgcactccaacctgagtgatagaatgagactccatcacaaaaaaaaaaaaaaaaaaaaaaaaaaaaaaaaaaagaatttgcattgctttgtgttacatcctacttttgctgtaaaccaccagttacaaagcactggttaatgtccagaatcttttcagtcagagtttgataataacttgtttgcacaagagacactgtcctctggaaacctatttttttcttccaaattatggattcttagaattaatagataattttactgaaaggataagcctagctagcaaaagaatagtgatgatttggggttatattctgctaaatagcatgctattttgaatcacctacaattagtgtggtttcacagtattatctgtaaggcagcatttttcttccctgccttttctgcctcttttatctcattgttagcaccacaataaagaaaccctaaaaagctgtacaggaaaataatttgaacatgaacttgtactcttagaaacaactgcatttgcagctgtcccccacctcatattcaaaagtacccacacttatctggtctctttttctgtcatctaaatgagggaaaaatgtattcagtgtgtaaaaataagctattgtatctcagaaaggagatgggatgctaattaagggttgtttgaatgaacaagtcacattgcattgtctactgggagctgactgccaattgcttttttggtaacgagtcaaaaaaaacattcaagagggcccccggcaagcttgggagagaagcgagcagcatttccatttatcaagtaggtgcagaagcctgtgcaagtattaagagtcagggtgcaggcggcaagctcctgctttgcagcttttcttactggttttgagagccaccttcctaaagagggccctgctgctcaggtctgatcgtggacaatggggcacgtacgccagactgctggactactgaatgaatgcctctttctttgttcaataccttttccaagatt

SEQ ID NO: 10042 - DNA, 2300 bp, Homo sapien
actatacagaaaactgaccaaattttaaataatagaacaaaacccatcagcttctttcactgcaactaagttaaagggcaaagaaatgtagctatgaaataataaaacataaagatgatatagtggcattggcttgacccaacaacagagcctctgaattattcaactctcggccacctgacaaaatataaaaagcatggggttaaccctatgcaaaggttagattgaagattcttgtgaattatagtcttttgatttgtgagctcttaactacaaacttgtccatttattaccctgcccttatcaagttttttagatctctgtacaaatatagtagtgttcagcaggagtagcatgactcagaaagaaatctatttaccaagaaagtgcagtgactaagttctaggagtttaaaacgtgtctttctaactgggagtgggggatgggagggtgggagttaattctttcatcattactgcttcagttaaaaaagaaaacaaaacaggtttgtcttaagcagaaaggaacatgttgatattctaggagttgtagaactacagcaagaaaaaaaaatgaaccaaatcgggttaggaacacaaaatctctttccacccacctaaccacccctttttatccaaattttacatgggcttaagctcaactccttatacttaaatttgacaaatttatgctgcctacttgaaggcttaactagtttgcttttatagcaaacaatggatgctattttgttgcctgtaaaaaattcatttccatatttatacctgatttctgcaagagttttctattagtttccagctatgcttatagagacattggaatttaaaaaaacgatatggctgacgtcaaagaggtgaaagaaaatttgtcgcttgaacccaaagttgttttgcagcagggtacttggtttctaatcatttatcaatcaagtgttttcagattctccatcgatttatcatttatatatctttaaaatacatatctaaatcatttcttgtatctatgcatctatctatgtcttagaaagtaggccagatactattctactataattagtgagcacatcgctgttttacaagtaaagaaaatagaatcctgattacgttagcatttaataaaggctttctccaaataatttttgtaatcacaattgaactcaaaaatcttttctgttcagccttgcttatcttcccaccaaaacacacttgcattccagaatgaaagttctcataaaatatttttcaaggtaaattttttgtctgatttataaatgttgggtatattttattttttaaaagccttaaaaataaattagcaatgatttcaaagttcagacacctacaagacgtgttttactccaggccttcttaatcactggaaacaataaccaaggacagacatgtactctcactaaagggaataaaaaggcacccttcaacaaaatgaaattttagatgagttaaagcatttgacttgatttagcctttatatgtttttcccaatcatggactatttggtttcaagttagtttcgttaactataaatctatactgtcactaaattatacaactgaattttaatctaagaatggattttagtcaatgtgcttctttaaaaaaattaataaaataaaattaatagagtcatgcacactttattcatgcttcttctctgctcttccacccccaaagtggaacaaaaatgatacaaataaagataaacctgtgtattctaccttttattgacaaataattctgaactttttaatgttccgtattactttagaaaaatatgtgatattctaacaatatgtattcttgagatgatattttagtcaggttttgacagcagagactctatttgaaaaaaaaaaaagatgtgattaaaagaaagaaggaaataatgctggcattgttgctgtatttattaatgcaccacaagcttttgtttgcacttgtttcacttttgtttaaaagtaaagaggtagtacagcacgtaatccagggtgctgatgttgtgggaggggacttaaaacagagtaaggaaatcagaaacaatttcctccacacagaaaagaacagaactctcttacctatgaaccaggtagtttccaagagagacgctgagggatgtttagaaagcctgggacctgcagatgccatgtcaggcacgcttgctcctgcataggagactaaataatctcgatatataaggatggcagtctgttgtcttagatcagtttgagaagcagctctggcagcggggggtgtaggtgtgttgca

SEQ ID NO: 10043 - DNA, 2300 bp, Homo sapien
aacattactgcagcattgtttcattaccataagtaagtatattttattcttggagatctatgtaagtttgataattagttattttaggaaacaagaaaataagaaaaatagacctattgtaagtgggatacaattatttttccctaacctccagccctgcagcatttctagtaacagatgttagatgagaagagttattcttctaagctttacagaatgctaaataaattatctcaaaggttgactcagtaagaatttcaaagagttaattgtcagtattgaactttgtcaactatcattttcatttattcatttttgagtatctattttgcatgaggcattgctctagggagttgggacatatcaataaagtcatcaaagttcttcaacattggagctcaaattctgttttgcgggggggagtagggaaatagatactaaacaatagattttataagtaattattttggtttgttagaaagtgatacgggaaaagcaaactggaggacagtgaatcaggaataggagaagaggttgcagcttagagtggtttgggatgaaatgatagtgccacagaaatggagtgtgccacacgcatgggggagtagggggtggagcacgttgctagagaggggctagacatggagatatgtctctattttcagcagagaaggcctgtcaagatattaaaagtacatctcattgtccccttctcccacttgttggagtgcttcctggccttgtctctcagagctgaagatgacataaatcataaaagaaataaatggtaccgcctgggctctctgatcttataaggtcccacctaatttaagctctggtggatagcctatttcccattagttgtctcaattcacagaggatggagaaagaaagcactgaatgagatgtgcagctcaactcaatgggcacttgttagccccaattatttggctaggacaactttattcaagttaatggaatacaaaactcagcagttcttatggagacttcaatgtgctgtagaacaaaccacagataaatgaactgtctgaaagaataatatgaggcacggctaaacaagtgttgtggaagagaaagatcactgtaatctagagttagttagagttagggctttctggaaaagtgagaccaacattacaccttcgaaaactagtgtggtggtggtgcaagtggaggaaaatgggaaagaggcaacagtgtccataaagacacagaggcagaaagggcagaggccctgggatagttaaaagagaagtctagctgagggacttcttgacttgactagcagcaattagccatgactaataaggctttccacactccaaagacttagatggagggataaaaaaccatctaatggcagactgtggtagcctccctagagacacagagctgggccggatgagtccaggcactgacgtgatccattatctttcaccttaaagagtaaaagggaaactaaagttaattacctccacgaaacaaaaaggtgccttcttgtgcttcaattacatggatatattctactagtctaaaagtatcttctcacttctttctgtcactgtgaggacttgagtcagaagaaagtttaaatacagtcattgagctggaaagagtggaaagagaagcaaagagggggaagctgtaggaaggacgaagtcacccccaagatacatggttactgcttacaccaagcaagctgccttgggaacgcttcccccgagcagccagaatgctcagcagtggaagacacctctattcctgtaggcgagtcctgggaagctggtcaatctgcaaatgccaattcccagcagtgagctcggtccacgtgtaaatcaagatttggggaaagagtagggtgggtggcatggttgacaatgtcatcagctccctcctctgactcctgtggtcgtgcccccatctactctcactcagctacaccccaccttcggatttgtgatggacgctgggtccctagtaaccacagcaagtgtctcccccgcacttcccccttccccacccccacccccacccccaaccaccaccccagcgatggagcctactctgctccaagccgccgctaagacccggagaagcggaatttcactttgaaattcccttgcctcgtgagggccggcgctgggcatgctcagtagccgcggcgctgctgctgggctgctgggctggcgcggagtccaccctgccgtctccgccttggcttctgggcgtccagaaggccaggcatttgccgcctctgagcgcttctgttccccttaccc

SEQ ID NO: 10044 - DNA, 2300 bp, Homo sapien
taagggccttctttgtctcttttgatctttgttggtttaaagtctgttttatcagagacttggattgcaacccctgcctttttttgttttccattttcttggtagatcttcctccatccttttattttgagcctgtgtgggtctctgcatgtgagatgggtttcctgaatacagcacactgatgggtcttgactctatccaatttgccagtctgtgtcttttaattggagcatttagtccatttacatgtaaagttaatattgttatgtgtgaatttgatcctgtcattatgatgttagctggttattttgcttgttagttgatgcagtttcttcctagtctcgatggtctttacattttggcatgattttgcagcggctggtaccggttgttcctttccatgtttagtgcttccttcaggagctcttttagggcaggcctggtggtgacaaaatctctcagcatttgcttgtctgtaaagaattttatttctccttcacttatgaagcttagtttggctggatatgaaattctgggttgaaaattcttttctttaagaatgttgaatattggcccccactctcttctggcttgtagggtttctgccaagagatccgctgttagtctgatgggcttccctttgagggtagcctgacctttctctctggctgcccttaacattttttccttcatttcaactttggtgaatctgacaattatgtgtcttggagttgctcttctcgaggagtatctttgtggcgttctctgtatttcctgaatctgaacgttggcctgccttgctagattggggaagttctcctggataatatcctgcagagtgttttccaacttggttccattctccccatcactttcaggtacaccaatcagacgtagatttggtcttttcacatagtcccatatttcttggaggctttgctcatttctttttattcttttttctctaaacttcccttctcgcttcatttcattcatttcatcttccattgctgataccctttcttccagttgatcgcatcggctcctgaggcttctgcattcttcacgtagttctcgagccttggttttcagctccatcagctcctttaagcacttctctgtattggttattctagttatacattcttctaaaatttttttcaaagttttcaacttctttgcctttggtttgaatgtcctcccgtagctcagagtaatttgatcgtctgaagccttcttctctcagctcgtcaaagtcattctccatccagctttgttccgttgctggtgaggaactgcgttcctttggaggaggagaggcgctctgcgttttagagtttccagtttttctgttctgttttatccccatctttgtggttttatctacttttggtctttgatgatggtgatgtgcagatgggtttttggtgtggatgtcctttctgtttgttagttttccttctaacagacaggaccctcagctgcaggtctgttggaataccctgccgtgtgagttgtcagtgtgcccctgctggggggtgcctcccagttaggctgctcgggggtcaggggtcagggacccacttgaggaagcagtctgcccgttctcagatctccagctgcgtgctgggagaaccactgctctcttcaaagctgtcagatagggacatttaagtctgcagaggttactgctgtctttttgtttgtctgtgccctgcccccagaggtggagcctacagaggcaggcaggcctccttgagctgtggtgggctccacccagtttgagcttcctggctgctttgtttacctaagcaagcctgggcaatggcgggcgcccctcccccagcctcgttgccgccttgcagtttgatctcagactgctgtgctagcaatcatcgagactccgtgagggtaggaccctcccagccaggtgccggatataatctcgtggtgcgccgtttttttaagccggtccgaaaagcgcaatattcgggtgggagtgacctgattttccaggtgcgtccgtcacccctttctttgactcggaaagggaactccctgaccccttgtgcttcccaagtgaggcaatgcctcgccctgcttcggctcgcgcacggtgcgcgcacccactgacctgcgcccactgtctggcactccctagtgagatgaacccggtacctcagatggaaatgcagaaatcacccgtcttctgtgtcgctcacgctgggagctgtagaccggagctgttcctattcggacatcttggctcctccccaaggtaaccacttttctgacttctg

SEQ ID NO: 10045 - DNA, 2300 bp, Homo sapien
gcagaaggaacaaggcataaaatccaaaggtgtgttctaggcctgggaaataattctgtggttatggagcctagaagtggaggctgcctaggaagaaaggggagggacaaaattctggaaagtgggtggaggacttgtttgctgtgtgctgtaaatgctactttaaggaatctgaactttatcttgtaggtaaaaggaaaatatccttagattgggttttcatcattatcattacctaatcaataagtatttctcaaaaagaattttaaagtgctaaggcagagaggaactgggagaaactgccagggaaattaattctcattctattgacacagctcaagtaagaaatgataaaggactgaataatgaaatgcaaaaggatgagatggaagaaatagttttgacagtaatttaggagctacacagaccagtaagagtgattggatggaaagaaagagaaatacaaaatatctgtacaaattcagcctgggagagtgttgtgtgattataacattaataggaataggaatttccaggagtgaactgtttcatataggttttgaattagactaggggttctattacacagtcattctcctgtacaaacacatccattgatttttgtgttacagagttcaagagtgattcaactaaagactacacagtattctttttaaggatgttcagcatccaccaaaatatctatttcaaactaaaatttggtagtattcaatacattcttttcaacaaagcagcatttaaatctgtaatttttttttaattttagcctctgataaataatcatttctgggactatgaatcaattttggttttcattcaatctgaaattattctttcagccttggattattctatatacaaaatatctcaatagaaggttgtgaaactatccattttctagtaggaaagagaacacaaacaattttagtgatgatttatatattaagccattatttttggaattaatcctaaatttggcctttaacgctatatattattgttgataatgcattaaaatatattgtatttgtagtcagggagtagaattgtttcaaaaacattgtatgccagtgaaaattagaaataatatttttcttttgtaaggagttcatgcttgcttatcgtgtaaaacttagcaaagattctaaagaataattttctcaacaaccttttaaagtagagggttcttttatttagggggagaagaactccctttgagaggcaggatgtggaaactaacatgacccaggctgtttacacaaagcagtccacacctccctgatgatgtcggagcattttgcctttacctgagacagctgccttctattagcactagaaacaaatagtaaaatctatggtcactgatccatgaccaccttcccattttgaatttttttgtccgggaggacctggaatccagaaactgagttggtggagaacagctgttgctagatacaatttatcagaggaaggaaattacagtgtccaccttaaaaacaaaccaagctatcagaatgactacgcattataaaatgaaaacaatgttgcagtcagtgccactttatgatttctttccctttgtatcataaagaaataaagataaaaagcaaatggtcttatcatgataggcaaggctgcctctccctctgcaatttctgtggtgtatttacggcagctctggaattcttttgaaataaatttagatgttttggagggcagatacatgtaatggttattttactattctaggtttaatgataacaggttgctatgtctaagctttgatattttgcagatttctaaatgcattttattgcatttagaaggaattttgtagtattgagaaaatgcaatgcaaaaatgagtagagatacaatgtccatttaactcagaacaaaacaaccttatttccccatagttgaaatggagggcggggaagtcaggcagtggtttctgaaagccaagaacttagtagcactgtgccattctcttgcctgatccagtgccattcccttcacttgatatctgtttactttagaggaggcagtttttgagaaaggatcataaatatcctggcccagtgccccaggagctatgacaagcaaaggaacatacttgcctggagatagcctttgcgatatttaaatgtgtgagttaatagcctttgagatatttaaatgtgtgggttaatagcctttgcgatatttaaatgtgtgggttaatttttttatccagtttaataactttttattcctccctctacttctttgctttctctt

SEQ ID NO: 10046 - DNA, 2300 bp, Homo sapien
gtactcagccataaaaaggaataaaataaagtcttttgtagcaacttgaagggagctgaaggccattattctaagtgaagtaactcaggaatggaaaaccaaataccatattttcccacatataagtgggagctaagctatgaatatgcataagcatacagagtgttaaaacggattttggagatcccaaaaagggagggtaggagaagggtgtgggattaaaaactacatattgggtacaacatacactacttgggtgatgagtgcactaaaatctcaaaattcaccgctgtataattcatccatataaccaaaacccacttgtacccccaaaagccattgaaattttttttaaaatgtttaaaaaaaggaagaaagacacaaggtaggcattctttaaatgtggaaagaatggctaagggaagcaagaataatgtgagaataagcacagagtagcagtgaatgtggtatacatagggaaaagtgaaggaaaagggtgtccagagacgcgggctctctgtactgattgtgcggaaaccggagttaactcacaattttcagtggcactagcactgtcaagtgctttgtttgttgtttgttttttcacccaagaaaggaagatgttcagactacagattgtggtcaagaaattatatattttaggtgaacaaacagcgaggtttggacatgaaggaaggcacatacactgcacagagaaacagctcttcccaactctaaaatttagacgtttatttgggaaattttgttgggcagtctaaatgcaggaagattaaaaaggacttggaaaatcaacagggtatcctgccttcatgatgctgtgaggcattgtgccccagagtgaaaactgcatttttgtgagttggtgtggcaggcttggaataccacctctttcagcagctcactcaggtctggcgagggctatttgtacctcaacgagggcttctctccaagaaagccctgaatccttttcctcctttttcctgcagattcactataggacactttttgaagcaagagcatgcattttccccctggcgctctgcagcggttctcagagcccagtgtcactcacataggtgggactgctctcagttcagagagcgctgggacacttaagatgaaaagtccctggaagttagcaaacagccatctgtcactctggcatcgatttactaaaagtgacttctagggtattctaaaccacttttaaaaaacaaatgagtcacttcgacttcctcaccccgcaagagataggaaggcagcagtggagtgctcgctcaggagctgtatttgtttagcgattagcctagagctttgattttagggcaaaagcgagccagacagtgcggcagacgtaaggatcaaaaaggccacctatcattcgccggggacgcctgcctccttaccctgataacgtaactatttctctgcataggattttagtttttgtgtttttgttttgttttattctgtttaatcacttcaagtatctcatccattatttgaagcgggctcggaggaaacgtgccgcatcctccagtccttgtgcgtctgtttaggtctctccgaagcaggtccctctcgactcttagatctgggtctccagcacgcatgaaggggtaagggtgggggggtcccctattccggcgcgcggcgttgagcactgaatcttccaggcggaggctcagtgggagcgccgagaactcgccagtaccgcgcgctgcctgctgcctgctgcctcccagcccaggacttgggaaaggagggaggggacaagtggagggaaagtggggccgggcggggggtgcctgggaagccaggctgcgctgacgtcactgggcgcgcaattcgggctggagcgctttaaaaaacgagcgtgcaagcagagatgctgctccacaccgctcaggccgcgagcagcagcaaggcgcaccgccactgtcgccgctgcagccagggctgctccgaaggccggcgtggcggcaaccggcacctctgtccccgccgcgcttctcctcgccgcccacgccgtggggtcaggaacgcggcgtctggcgctgcagacgcccgctgagttgcagaagcccacggagcggcgcccggcgcgccacggcccgtagcagtccggtgctgctctccgcccgcgtccggctcgtggccccctacttcgggcaccatggacacctcccggctcggtgtgctcctgtccttgcctgtgctgctgcagctggcgaccgggggcagctctcccaggtctggtgtgttgctgaggggctgcc

SEQ ID NO: 10047 - DNA, 2300 bp, Homo sapien
tttaggagttatgtgtaaaattaaattttgtttcaaagttacatatgaaaaagtaaccaaactacatataattaaaaaaaaaaatcttttctcttggtccctttggtttatataacatacatttgcttgtggatgaaatgtgaatgcctttaaggaacagcaaagaaaaattcagttttctttttaaaataaaatagctgttctggaccaataaagaaaagtatatttattatattaggatcttcattaggattcagttttctatctgaatgtcacactaactagacagacacatcaaagtagcagagaggagtttacttttaagaccctattaataaaaatgtccacatttgatgcattaaaataacttacctatactaagattagatgttagaactactttatttaggacagatcacaactggtattaaatgttgtaaaccattattgtctgcttttatatctcaaccttggtgcgttccttattttctgctaagtaaactttattagcccctgttagtaaaatcagagcccataaccacttgctggggcagcagggggagagaagagatgaagactgagatttttccagcgttttcactcggtttattggtccagttaaagacctactgtggaaggcagctcagtaagaaaagagaatcaatattaatatttgcactggcttaaaattttgcttttctgggaaaaaaagattacaaaatggcacataaatagtgtttgcattctgtgaagagatgtaggaaactttctttacctacaagtctgactagccagctctcagattgtggtaaatgtgtacagctacttgccaaatgtgtacagctggaacttgccatcatcaatctgtttgaagaaaaggaaatgcttgttctttttttgaaggggattgggtgataacattttgactaaataaatgatgataacctcttacaaataataaaagatagtagttctggctttttaccacatcagtcttggtacactgcaactttttcatcaaggcttaatttctactgggccccagtggagtggagctataactttgtgttccctttcaacatcaaagggaagttattccttcaaataagaaaatcagtagaacacatactcatttatttgaatatgaataaatcaaaattcctcttttatgttttggctgcacaagtgaagacagaaatggtcagagaatactaggtgtaaccaaaagagggcatcatctacccttaatgtctgcacagcgttcctctggttgtaagaaaccaacaaagcccccaaaccctcaatacctgctcaaagggcatcccatgggccctggcattttttagtatatagggacaccaaattatgaaatcacacattataaagaacaccacattgcttatttacttcaggactgacttctatattcagcactcatattccctgaactgtgttgcattagaaataagtatttaacatttactgtatcactttttacagatactctgagtttaatatttcacagggcactgggaaaatgtcttcttaggccagggtacaggctgtcatcacatgagaataatatggcacttaatttcctaatagtatcttaacttcaagaggttatctataatatagatagatagattgttctatctatagatagatagggaacattggcagtaggtggcagtaagttcccctgagcacatggaggacacagttaaatgcatttgaggtatgtgggaaatggtttaaagcagaattttatgccaacttttagtaacggaagcctaacaaatgtttgttctttcaagtgagagaagcaagcaatctggaactattcataagcttattttctgtatccttaaacatattttataatgaatgtatgatttaaatagtaagttaagtgtctgggggtactgcacacctcccttgcatacagtcaaacttcttcagggtgatggggaagaggagttataggctgccaagcaaaattgccaaactggtctcagaaattcactgcattggagagcgcgggatccttgcaacactgactttagcagttaaactagagtggttggggatgagtattctgctttgtagtagagatagctgttcaggaggaggaaatgtgaattctgagagcgtgatcatttaggagagatttccattcctggaacgatatcactaccacatgcacgagtgcaattgaagggaaacctggtggggaaacagttttaacattctttcaggtaaaaaagaaaaagcagtcaaaatagctttatggtagagga

SEQ ID NO: 10048 - DNA, 2300 bp, Homo sapien
atttgtgtaaaattagtttcctttatagatattctttaagaagccattttaagagagtagtggtgattcttcttgatacttaattaatgattaaagtactctggactattattcacagaatcccttggtttctaatttttattttttactgaaatattatgtcttgggtttcagtacctctacttgctttcaggtagtcatctagaaggaaggaccctgtatagtttgatatctatatcttctagaatgctaaatggatataagaattggaacagagaagtttctataattttccttgaagttaataaatgtttcaaatattgttgattttttttaaaattgtaaaaataacactttttcgtggttggctattgatttctggtttgttttgaggttaacatatacttagcttactatatttacagctaaaataataatgtaaagtttatttttttctagtttaatattgctgcagagagaagcatttgagttgataaaatttgcgttgtaattctttctttttttaaaaaatagtctctgccacctttgagccagccttatgtggaaggcttgtgtgtttctcttgaacctctacctcctctaccaccattaccacctctcccacctgaagatccagaacagcctccaaaaccaccttttgcagatgaggaagaggaggaagaaatgctgcttcgagaagaactacttaaatctctagcaaataaaagagcttttaagccagaggtaatttaggtacctaaacctctaggtggtgctcttgagcttagctttacggtagtcctacttttttctggttacttgggcatcattgggcttttcagcaaagtggggataattctaacatgctcaagatttttaaaggtggcagaaatttatttttatttaggaatgtttaatgtctttctcttccttatgtaggaaacatccagtaatagtgacccaccttcacctccagttctgaacaattcacatcctgtgccaagaagcaatctatcaatagtcagtattaacacagtgtctcagcctaggatacagaatccaaagtttcacagaggaccccgtcttccacgaactgtgatctcggtaaaaacaaaaatttaatgctacttttattcaaacagttatgataaatttctatgaagtttagctgtcctgttttctaccccttggtttatttatatacacacatatattcacatataaatacaaatttttaaaatttatttttaatttattaatgataaaatgagagcaacaccttcacttgaaaactggtaagagtttggtgatagtgtgttgggggaggtattgttttcatcagagtggtgtactttcctctgacatttcttcagctttttttctatagaaatgggctcattcagattttctatctttttggagtcaaaattttaacaaattgcatgttttttatttctcccatctctttgtatactttgtgtatgttttccaaccaatgactacactatgatggaagaaattatttatgatgtttattaaggaggttgaaatgatagtttgtttctaccttgttttgtaatggcttcaaagtaaaataaatagaacaaagacaagttgaaatctttcctgttaggtaagccagttttggcaatttaccctctatatgtaaccacaaagtacagaattttgataattattatgtaaaattaacaaaatttttctttggttttaaaagagttaatttaaattgcattgtggttctttataatagaaagttagtgaaaataaaattttaatgagagtaattatagaatagaaagtcttaaagaatatacaacattttatgtctcagtcatataaccagtattggtcgactcagtggattatgtaatacaaccctagaaggagccatagactgtctacttggagcccattatttttgtggattgaaattgaacaaggttaaatgacatccttttgttatcacgagtaataaatatattgtctttgcagcttccaaagcataaatcagtggttgtaacactaaatgattcagatgatagtgaatctgatggagaggcttccaagtcaacaaatagtgtttttggtggattagagtccatgattaaagaagcaagacgaactgctgaggtaagtgcaataattaaaggtggaaagaaagatgaccttttgatgatcagtaaagtttattttttcctgaaaattaaaccataaagttatagatttttaataacattgatttgtggaaatattttaagtatttgtgctattaggacttt

SEQ ID NO: 10049 - DNA, 2300 bp, Homo sapien
gccccttttacatcatgacatttgagaaagacctattctggacctaagtgttctataaaagtaattctgattgtcttccaaataactgtcattacttttaagtttcatatataataacgaaattaaaaatcatcacactatgtgaattacaaccagtaatgaaagtctttaaacaatttttgcaatgatcacagattaagtcaagatagtgttttacaaacccattataaaacaggaaaccttcggatgattgattcctctgtataaatgctgagtaaactcagtaatgtttaaaactgagaataaggttagaagtaggaaaaatctggaatgttactatttcctttctcaacttacccgtaatctccaccctcgcatacacattcctccactctaacgtattaaaataaaaatgctgataagtttatctttctctctctggccctcatttagtcagcacgaagttacacaatgtgcaaaagtgaacacagatagaaacgtaaaggaggtaaagtgttccaaaaagatcaaatgaatcaaaaagctctgaaacagacttggtaaagacaccagagttgttttttttttacccctcccccccccactttaaaaggcagcaaccggaataaatcaagataaaaacagaatcacaaaaatagtgcaggactgtgcagattaaaactttacaattttcaacgtcaaactgcaatatgataaagcaacaatattacttaaactgtttatgaatattttttctctaacaatccaagtcaacttcatataaaacacaaagtttctgtaccagcaaaaatacaaatgctaatgaaacttgggcttctaaggtattattacaaatcagacttaactgtcttagatttcataagcttaacccaatccacagcacgttaatatacccaatgaagcagtcttaagaataacgctatagtgtgacacatggggaattaccaaagaacaacttaaagtatactgacacagggagaaataagcggttctgatgattcaaagttacactcgtctcacagacctagtaatgacgctaaagggaactttagtgacacacccagcgccgaccgccacgttaaggatacagctcttccgaggtggagagggctctcgccagctctgactgctgctgaacccggatcctgctcctcctcccagaggaggtctgcaccccggcttgcctcctcgctcacccactcctcgcccccgactccagcgactcccaccccggtaaggcctgcctcgaaagcggaaacggtccaaggcgaggtggctccgctcccagaaagacggccggggactgctttcggacagtgagctcgaaggcatccgtacagaaggcggatgagaccggaacggttctttgggtcggtagctgctgggtcccctgaggtggccccgctcagacgcgtgccgcgagcgtgagaaattcctcagctgctgctgagaagaggacgatgacgaggaagagccaccgcctccgccagatccaccgccccgggccgagtgaggaggccttcgccgcggatagggtaacagcccgccgccgctgctgctgctgctgctccgactccgtatctggctgttattatcgtcgtcactgatttccccatcttcaagctccccttcttccttcggcgagaggccactggaggccggggccggagtatctgcggtcgccatccggggagcagcgccttccacacaaccttagccctccgtccggggatccgcccgacaattgcctcgtttcccttctttcctaacggactgggtcggtgcggtcttaccctactcggacaccaagcggcctctgctccccaacttccccgcaccccagcaccccagctctctctcgccggaccgtcgcaacccagttccctttcctagcgcccccttgctcctcagcgatcggggttcttccgcctcgcgagaaagggactctggtagcggctgtacccgaaacgtcacttcctgcgacacgcaggaaacaaaggctcccagttcacgcgataataagaccaactcgatactcactaggatttgtagtctttcgtctttcttcgggtttactcttccggtcctagggtcacacccaccgcagggtctggcttggtacagttgggtgcatgcagaagtaggtggagctgctgttgcagccttgagagagttttattgtaaaactcttgtaatttatagtaatcggaggggaaaacacctcttccttttaattgctctgaggaccgctgccaaagaaacgcagtagatccgctccc

SEQ ID NO: 10050 - DNA, 2300 bp, Homo sapien
agcaagatttccctgtgaaggaaaaaaataggtaaattaatattctgtaataagttcctttctcatcaagttcattcccgatgatgcttgaccagcactttcagtaacactacgattctctacactgcagccagaggacttttcaatatgcaaatctaatcgtgccattcttttttaaaccctccatggtttctcaagtactcttaggataaaacagaaaatacttaagtagcacacaggacccaatctgtcatcctttggtctcatttgaaatgtcacatcctttgaaaaagtgttctttgactttccaagactaagttaggtctctgaatgtttcttctgtggcacttaattatttatgtctttctccaccattaaattctaaattccaggagggttagaactttctggatccttagcacaatgtcaggtaattaggaactccgtacatatttgatggatgaatgaacaaagcactacatatgcatgaactagtttaaaaacagaaacatcacaagattttttttaagtggcagcttttaataaaagtacagttcgtaataggtagggaaaaaggtcaaggatataatttctacatactaacatatacgttgttaggtatataaaatatataaaatcaggactggtgtcacttaactttttaatgtgtcttttcttcgggcacgtggcaggcacttgcagagaaggtaaacatttacagagtacctgttattttccaggcattgttcaaagtgctttcaagagttctggtttgacagaactaaagaattttgatttttcttccagcaaacaaaagaaaacctaggttctttttattactctattctagtaagaacagaaaggttatcttttgcactttaattaacatcgcttaattccatggctatcaaagatgactcaattcctccgcagaattactatgtgactattagaaatctaaatgcctcccatgtcaattcatctagtgagaatttcctaattttaacgggaacacagcaggcttttacggtgattgctgattgggaagatctctttctcccttacggcgtcattcatgtcaaggcccggtctaacagaggaataaaacagtagaaaattacgatatcctcctgttacttttttttactaaggggtaatgaccaaacagtacttggatttcttttagaaaatgagtaaagcttccccgaaagcagagaacaattgggcagatttgagaaacacaaaggacatacgatgcttccctgctaccagctgggaaagttattagaattagcagaatcctcctgttccttccacacaagcgatagccacaataggaactccagtttccgtcacccccactccctgcccaggttacctgtggaagctgatgttaatgtgcttgttgtaggtagtggcacagcccgccgcagcgcaattggtcggcatttccctttcccactcattcagcgcccttaggtctctactgaggcgctggctgctaagctttcttctggcagaggctggacaatcgaggcaggcgtgccttaatcgtgagagcttagtcgtgagagcggagtgggaagaaggggtgtgtatgtgggggcggaggcgaaggacggtcagccttccctttctctttattaatatggccgactagagcccacagaactggccctcctggagctctagtcgccttcgcttgacttcaccaacatggcggacacaacccgttctttctccccgcccccaagagggagcggatctactgcgtttctttggcagcggtcctcagagcaattaaaaggaagaggtgttttcccctccgattactataaattacaagagttttacaataaaactctctcaaggctgcaacagcagctccacctacttctgcatgcacccaactgtaccaagccagaccctgcggtgggtgtgaccctaggaccggaagagtaaacccgaagaaagacgaaagactacaaatcctagtgagtatcgagttggtcttattatcgcgtgaactgggagcctttgtttcctgcgtgtcgcaggaagtgacgtttcgggtacagccgctaccagagtccctttctcgcgaggcggaagaaccccgatcgctgaggagcaagggggcgctaggaaagggaactgggttgcgacggtccggcgagagagagctggggtgctggggtgcggggaagttggggagcagaggccgcttggtgtccgagtagggtaagaccgcaccgacccagtccgttaggaaagaagggaaacgaggcaattgtcgggcg

SEQ ID NO: 10051 - DNA, 2300 bp, Homo sapien
tggaaaaacacacaagcaaagcaaggaaagaatgaagcaacaaaagcagagatttactgaaaacaaaagtacgcgccacagggtgggaaccatctgagcataggggctcaagggcctccttacagaattttctagggtttaaataccctctagaggtttcccattggttacttggtgtacaccttatgtaaatgtaaatgaagtactagcccacaatcagtctgattggttgtgaaaaacaaccaattagaggctgaagcaaagttacaaagttacactcctacgcaaacgtctgattggttgcagaaagctaccaagcagagatactttcaattttctatctgccacgcagaaaaaaagaggggtttgcaaagggcgtagctttgggtccttttgttacttaggtatgggaagttggggttttccttttgatttagctctaggaagtcagcatgaatcggccttaggttccctgcctcaataggagaccctattctcctgcctcaagatcatgtttaacccttggtaactgaaactgcctattgcatataagaactactgtattttaattatattaactcctctaaattattttggtcttaagctagaataacttttatggagaaaaacatctataattggtcactgaaaaaaatagaagggaaaatattcatctaaagggtcagttcactgacactactatttaatatgcattttttagccagatctaatagtcatgagaaaatcatccctgacatccagggactgacctgacacagctacaccacagtgttgggagatagcttgacattcacaactaggctatgattttcctatcgaacaccaactaatcagagagggtcactctgtgactgtggtgaagcaaggcaaaaaaaagaaaaaaaaaaaaaagaccagtttataattttgtctaagcagagacaaaaacaatgcgactgtgcaaaccacaaaacattagctttcattattaataattttacccagtagtctggtaacattgatactggccagtcagcttggtgaaataatccaaacatttacctatgcagaacagactaagacaaaaataaagtaggcacataatacatttcagcataaagaccatatatgtatattatctagtacaggaagcccactactatttagtcctacttcacagatttgattcttagttaactacttaattagatgtcttaccaaagaaaatgacaagctgtcttggcatgtattttgaaatttaaaataatgtgagcttttttaaagtaactactcttggggcttaaaacacaattgcatactgtgtctgaaatggatttggctcctcttcttacactgtcagcaattaactgaaaaaattgataaatattatgtaattatcagttaattactgttaacccaggcaaacaagttaatttcacataaaacatgaaatcaggccgggcgctgtagctcacgccattaaacccagcactttgggaggccgaggtgggtggatcccctgaggtcaagagttcgagaccagccgggccaacatggcaaaaccccgtctctactaaaaatataaaaattagccgggcgtggttgtggcgcctgtaatcccagctactccggaggctggagcaggagaatcgcttagaacctgggaggcggtggttgcagtgagcagagatcgtgccactgcactccagcctgggcggcagagagagacactgtctcgaaaaaaaaaaaaagaaaagaaaagaaatcagccacgattcagatttttaatgctaacaagacgttttgctttctaaatgcacacacctttaatataaggggtgtgaggacagatatttccacaatctaagtggtgttatgacaataattacgagagctcagtaatagaaactatgtttaactttacctcgctagcagccaggagtctagcacattataggtactaaacaatgttgtttagtacctataatgtggttttggagaagcagtgcaaacgcagccggccaggatgccagcagtgcctgcccacgtgagctaggcgacatccccctaagcggctgcggcgcatgcccacagcgggcgaggcgctagaggcgggggcgccgggaggcgcgggctttgctcctggggtctcggccttggccggctggacctgaccctagggcggcttgcgcagctgtcgggacgtgactgcgttcagccgcgtcgggcgtgcttcccagacttgcccaagttcgggtgccctagctgcccctttgcagccgctggcctacccggcccgc

SEQ ID NO: 10052 - DNA, 2300 bp, Homo sapien
ggatattttataaaacatagagtctctttaatggttggttctaaacaaatctaaaatattatccttctccaattcacttttcaaatgatagccagagtggtcaaatctgattatgtcagtcatcttacgaaaatccttcatttgcttaaagaccctttcagtattgatccccaacttcctcatggtctcttctggagtttttttttcctccctaaattctagtcacatttacagttgctcaactttagatgctccttcctatctaaagccattgaacatgctgttatctctgtttgcagagctctcctgtccttcctgactaggttactcttacccaaagataactttctccagggaaagcttctctagcatgctaaatcagttgggttctcatatatgcttgcaagatactctgaactgtttcatcaagatgaaagcatttattgtacaattgagtatgtctgtcttccctgataaaatgtaagctctgtgaggacagagacattttatcttgttgatcacagtgcctggcatatggtgggcacatttaaatatttgttgaatgaattaaccgactctctttttttttttttttttttttgagacggagtcttcctctgtcgccaggctagagtgcagtggcgcgatctcggctcactgccacctctgcctcccgggttcaagcgcttcccctgcctcagtctcccgagtagctgggattataggcttgtgccaccatgcccagctaattttttgtattttagtagagatggggtttcaccatgttggccaggatggtctcgatctcctgaccttgtgatccgcccgcctcggcctcccaaagtgctgggattacaggcatgagccaccacgcccggcctctttttttttttttaacctggtttgaagtgtgaaagaagtttgatttttaaaaaaatgtttacctgacaccaggtttccagtaaattttcagaaatattagtatgatttcttggaggagtatggtttcttggaggcaggccgggcgtggtggctcacacctataatcccagcactttgggaggccgaggcaggtggatcacttgaggtcagagttcaagaccagcctggccaacatggtgaaaccctgtctccactaaaaatacaaaaagtagcggggcgcggtggtgggcgcctatggtcccagcttctcgggaggctgaggcaggagaatcacttgaaccaggaggcagagactgcagtgagctgagatcacgccactgcactccagtctgggcgacagagcgatactccatctcaaaactaacaatacaaacaaacaaaaaagaatggggatgcagatgagaaaaaacaagcaatcatcgaacaagccacctcaaggtggagtaccatggaacgtcagaggcttcatgaaagtcagaaaaactgaagagcacttggggttaggaattcaaaggtgggcagctcttatacagaccttgccctcaacaaacctatagtctaatgagagtcgataaacacttagcaaagtattaataatatccatggagtgtgtaaagccctagtaaaggaggtatactggtggtaagaaatacctaattttgtgaggtgggggaatggaaggatgggggaaggattgggtggtcagggacgcggtttaagctgagacttgaaagatgatggagtagttgaccaggcggtcagaggaacttggaagcgctatgattcgggatcccacagagagagattcaagggcaccttggcagatatggtttacagtgacctctggtgtgacagatcattagcattgtgaacatgcaaaaacgatgaagttctgcccttcatttcaccagagctgggctcgcctcaaattcctggttccttattcccgctggctcccaccaactgaaaagcagaggtggctcgcaagcggcggggctctgccctagattgccagtaggcgctcgactcacatccagctccaccccgggagatgccccagaagccccgcccacgtccaggcacgttcttctggggctagtcgcaggggccgccccggcaccggcgctcacgtgacccgaggtgtgacgtaggaggaaggagacgccattagagggaggcagagagggatcgttcttcgcttttcctccggtgcctgacgtggtgggctggggcccttcattctcggactttccctcagcccttccaggcctcgcccgaggagggcgtggggacagcgcccgggtcggcggggccggggcggtgggggctgagccggccgtggctgtgaaggcgctgcc

SEQ ID NO: 10053 - DNA, 2300 bp, Homo sapien
atatttccaagtttctaaacttcaatgagaaggcgaatgtgatcaaaatactaaagtcagaatgaaaatccaattttggggagaagatcggttcagtctttcttacatgtgtttgaaaaagaggcacttaaattgacctatccattaaatattcggataggattcagattttgttttttttccatgtggcattgatattgaaaccatgaaaatgattgagttcaaataaattacacagctagtatgtggcaaagctgagattcaaatccacaggttctgctccaaagttcatattcttagctcctatgctagcatgaatgggagaagacatttattgtcataacatgtatttggtcttctcatttttcaggttactttgctgttttggcatttaatttttcttcttttctgtataatttttattttatttacaaaatatcttgaggatagcttgggccttgaaggcagacatacatgggtttgaacccagctctgccatttatatttatctgtagactccttggttaatcactacatccagtggccttttcttagttctaattttctgtggtgtgcccatagcaaaaagaccttcctgaaattgaggtaaaagaaatctcaattgtttctttccttcagtaattcaccatcctgaccttttatctgtttcaccttctttgcactttcttctatataaataacacctaaatgtgactatctctatacaggtctgaactcagctctctattccttttttttaaacacgtcagctgactctggattctggatatattttgtcttcagtaactcttgatactcttctttctttcctatcttcatggtcttagttcagatctccttttttatatttttctccaattttgtaagtgttctttctacctatcttttctagtccaacctcccttcctatcccagggtcattctcttaaaatatagatctgtttccccattgcttgaaaccattcagtgattctcccttgtcagtagtcctgtttcttcaaacagttgttctttaggatgaatttggtatttttccaggaaaaaaaggttcagtgctatacagaagaaaatcagggaaaaaaagttcaaatgagtttgggaaatgcttgtataaatacagtcagctagccttccttttggcagcatcctaatgtgttaatgtgcattgttggtgtataaaaatcaatacatagtatttccaaagtatacttgacgtgtgtgtgtgtgtgtctaaatacatgtctggtgtcttagaacaggttttgttgagacccacaaggtaaagtccatctgtgtagtttcatctctggtattgaccatacccacttggagttccctgtgggatggagtcatgtgtttgaggcttcagtggcttcactcatctatcaggaacagtccctactgctcctaaaggggagatcattaccttctctctgaagccttctttgactcattcagacaactgttatacttcctttctcagtactatctttacagtgtatttggcaagaccctccattttagcaattatcacatggaatcgtaattctctttatttttatttctctagtagagtataaagggtagaaccgtgtcccttcatttctctgacattaatacttaggataattattgaatatatgttaaacaattgagttatgaagtaactgtggaatcattttgaataatattgatatttgtacattaagtaaaccaccagtaaacatttattttatcttagaaatctcttagactctttctttctgtgataaggtagcatcaaattaaatgctctagggaaaattttgttccacatagataaggaaaaatattaagaaaaaaatacttattttctgtgtgttttgtataacctattttcagaaaacaagatttttttttagataaaaatgtaaataatgtcttatctttaatgaaacaatttcgatcattaatttaaaactcggtgattactttttctcccagataacttttacattgagatgattcattcatctatagttgttaggataaagaaccttattttataagaaacattgtttaatgtttatttctctttttaggcatcattcttaacaaagaagttaaatattggtgggaaaagagtaaaccttgccatatgggtaagtgaactttttcaactattatgcgtggaggcttcttccttttttctttttttttaaagttaattggagcttagccaacacttttttttttttttaattaaaaagaatcttaaaatctggttgagaattatatct

SEQ ID NO: 10054 - DNA, 2300 bp, Homo sapien
gactagagtttaggaaagagagacttgggctgggaatatttgggagtcatcagtacataggagattttgatgccagaatatgaggataacggcccaggaatagtgtttggagaaaaaggaagagaggcccaaggccagcccatgggtagcgccattatttaaggcacacttgtaggatgaaatttaagaaggtcaagaagtagcagatgaacctgagatgccaatgatgcttttcaatgagaagcctgtagttctcaaacttatattttaaaatataagtaataactacatttattgagccttttattcctggcactgtgctaagggcttcaaattttctctaaaacacagggtgtaagaaatgtgatgtcacattaaaatttttctctaaccacatcccaatgctctgagctggtggaaaatgtaatttgggtcatcagtaggattttccactccacacccaagattatatgaaggttctaggggtcttagtctcagtccagtacatttggaaaaggccctctagtcttcactcaatgctgattactgctaatattctcattttcccacctcattcatcccttgtaggtgagctgctttcttgattccctgccaagcttgggcataagggtcttggtcatggttggaatctcagatacctagcacgcaatctccctaatatgctacgcattcattcccacctaaggttccaccactttcctcacctattaggttcctggtagtcacataaccggcaactctccttttctgtcgttcagctagttgccacctacctcaaccaaactcaaaagcctctaacccctctccactgtgtgaagacggaagtacctcaatggacacaagtgtttttggtgaaagggactttttattctgccccggagctagggaaatcccagatctgtgccagagttatcaagggggtagtatataatcattctctgcattcttttacagcactgagaacaagtaaaattcttaccttagtatctttacaaatcattttaccacacatgtattgtcgtatgaaatccctacaaccactccatgcaggagtaattcccagtttacatcctgaagctctgataaatttagaaacctgctttaagtcacagagctaataagtaatgtgtaggtgctataaactatgtgccttgggctctgcagctatgagggcgtggtattatcacagttcctatcgaaataccttgctggaggtcatgtgtgagtggcagtgaccagacaaatagagaaacctcatatacagaggggaaaagtctccatgtatagtgcctgggatatctccatgttagtgctgctctttcttggatcttcaccgcaacgccactatcttgattttactataagaaactgaggtttcgagtgcactggtgatttgcctactgccacaaaaccaggctaatgggctgggcgcggtggctcaagcctgtaatcccagctctctgggcaaaggctgaagcggacggatcacctgaagtcaggagttcgagaccagcctgggcaacattggcgaaatctcgtctctaataaaaatttaaaaattagctgggcgtttgacgcgcgcctgtaatcccagctacccgggaggctgaggcttgagaatcgcttgaaccgagtggcggaggctgcaatgagccgagatcgcgccactgcactccagcctgagcgacagagcgagactccttttctacaacaacaacaaaaaaccaggacaaatcttgctggcttccagtatggtattcgtttcatctcaccaaactggcgtggcctgcgctagcttcagagtctcgacaaactccaatacaagtaaggtacacattattttagcagtcttccttggggaggacgtggggcaagcacaagcgtagcgttaggcctgagactccaccccagccgtctctgagcccagttcagcacgcacgcgtcaggcggcttttttccgcccggctcctttcctccactcccttcccgccactccccgcccttttcccgcccggatgttattctagttttgccggatgttgttgtatgtccgagagacacgtgaggttctgctacgtcattaccaggcacgcgcaggaaacatggcggcggcgggtgttgtgagcgggaaggtaggtaacggcctccaggaagacctcggcttttctctgggacggggatgcttttgctccctggcagctggttgggggagggacacgagggactttctgtgtccggacaacccgtggcgtctgtaggagaagactgggtggtaccag

SEQ ID NO: 10055 - DNA, 2300 bp, Homo sapien
tcaattccctctacatgtaagggtttatttctggacactcaattctatttcatttacctatatatctgtccttagtaccacactgtcttgattattgtaactttgttataagttttgatttgtctaactgcttctcacactttgaaccactctttttcagtctcatctaccttcaattccagaggtatttgagcctttagggtattctgtcatgtaaagtgcgttgcttctaagtcttcttcattgatagcttaaggttcagctttcccatgactgcaaagcctttgatcagttttttcttctttcaagctgctaattttttgttgccattgttttccaacttatgcgactcttgtgtaccttgaaaaggaattttttatcttgttttaatagggtttccagggtgagcaaaagtagttaaatctttaatattctaaatatatattataaataaattacttttaatatctttttttccctcatttccacatccaagcagggacactatctagtggattttatcccttcacatctctggttctttcattacatctcagtaacattagctactattattgtcattagttcatttgccttatttaaacttgcttctcctattagctgattagagctgacccttacagaaaatgtaagccaaataatattttcagaattagatcaattaataattatgtctcttcaagactccagaaacaattaaacttcagtcaatattagttcatcccgacttgttttgaaattttttttctatatagacaagcagtgccagcaccagattttgtttagattttcagtcaaacaagcacatttggtcaagagtttttcattcttcaggagattggtaacattttcctgtggcctggtgaattttatgactttctaaggtttgaatagtaagaatattgattaatctatgcatgtcaagttgctggatttgatctagttgacattgatatttgacagtatgtttagtcattaaaagctcaaatgtcatagtactcttaacctctgctttctcctcaccacataacgcacagatctcgtatatttaagtagcactttttatatgaaagggtcatgtcaaagattaaatttccatgatttccagtagagagaaaaaccacaagagtattaaaatgaatggctgatatatgggaatctagtttccttttatttctcatttagtaaggaagattccaggattagtatctgagctatatgtaatctacatgtggctaaattgaacccttacctttcctttgcaatacattttcctccatataactctgcatagaggcatcacaggattaagaagaagcccttttatgaaagccattacacatatatacactcacacatttgcatgcacaaaattagaatatgtcaagtcagaaaaagcttattaacataaaatggagttggtcaatgagtaaaaaaaatatgctgatgggagggataagatctagtgttcgggagcacaataatttattttcttttgtattttaaaataactggaagagtggaattggaatgtttctaacacaaaaagaaatgataaatgcttgaggcaatggatatcttgattaccttatttgatcattacacattgtacgcttgtgtcaaaatatcacatgtgccttataaatgtgtacaactattagttatccataaaaattaaaaattaaaaaatccgtaaaatggtttaagcattcagcagtgctgatctttcttaaattatttttctaattttggaaagaaagcacaaaatctttgaattcacaattgcttaaagactgaggttaacttgccagtggcaggcttgagagatgagagaactaacgtcagaggatagatggtttcttgtacaaataacacccccttatgtattgttctccaccacccccgcccaaaaagctactcgacctatgaaacaaatcacactatgagcacagataaccccaggcttcaggtctgtaatctgactgtggccatcggcaaccagaaatgagtttctttctaatcagtcttgcatcagtctccagtcattcatataaaggagcccggggatgggaggattcgcattgctcttcagcaccagggttctggacagcgccccaagcaggcagctgatcgcacgccccttcctctcaatctccgccagcgctgctactgcccctctagtaccccctgctgcagagaaagaatattacaccgggatccatgcagccagcaatgatgatgttttccagtaaatactgggcacggagagggttttccct

SEQ ID NO: 10056 - DNA, 2300 bp, Homo sapien
taaaatgccttcaagatttgaagacatgaaagaaacatgtaaaaaggaattacctaattttctattattcacttttttaattaacccagaagccaatcacactttgttttactaaacactggagactcctgcttcctagatgtcacctttggggtggctgttttctgaatattgttccaattagagttcttcgcacaaattctgaaggttggatatcccacatacttatacatactctgcagtataattttaaactccaatatactcagacaagagtccataaccagccaatgggctatgaacctattttgatgctgcctgctgtcagcaaactggtctattgataactatcctaacaaagttaaaacaatgttcatggtaacactggaaagctgcaagaaagtaattatggctaggtgaaatgaaaaactgaccaatcatggaatgtattcgttcaccgttctaataagcccagcttttctcagtctcagggttttggtcctgaatgttacactgtagacattgtgtgttaatcgtttctccaatctaaagatgggaattatcctatggggaaaacatcaccttgctttggcctttacttccggaggattttaatgcttcattgctaacattattttagtactgcacacctggacacatcgcacagtataatgtaatatatgtagtcaggttttggagaatttatttcaatttacatacaatcctccaaatcctctggcgagcttgatgtgaaatctgacacagccacatctccctagcaggatcttcttttgctctctatgttaatagccaaaggctccaaggatctctccctggagcgcggtggggctaaggagtcaggaagaggggtgactgcggggcttgttgcgctgaagatttacaatgtacttcttgcaggcggctcagcaaccccctctgtggctgtgggtgtctggtgtgacagagcggagaaaagctctctaatctcccagtgcctgcctctgccgctcagtcgctcccctccctcccgcctttcctgcctcctcgcgcgctccctctcctttgcctttctctgggagtttcagtccctcaatgcagctggagtagccctggcaatctaaacccgaagcctgtgtatatacacacacgcacacacgcgcacacacatgcacacgcgctcggacatacgcacttcggctctcccccttgggatatggagcaaacccagagcttcatctacctgaaggggatggcccggccggacacttctttctcacttgtcatctccggagggcagagcaagactggaatgagggagtctcgctgtcgggtctgcaacctcctgccgtttgccgccaccgccgcttaaagtgcccagggtggagaaggcttttccaggacggatctccgtcgtagcttcgcggccctgggacttcctcctgctggttcactctagtctctcccacctcggccatccttttctctccagctgcagggtgtatggctcgggtgcctcccgtgctgtggccgccgtcactgctgctgcgagcacattccacccagaggaccgaacgccgccgctggagtggggggagaaagcgaaagccctaacttccctctctacaccctcgctcttcccaccgctcccgtccttctccctagccgagaaccggttggaaggctcccgcggaaagcgaggcgagagcgcggcgcaggggagggagagccgggagccgcaggcgcgcaggggcgggggcagcatgtgccccgccgccgggtgctcgtccgagaagtagcgcgcgctgggcaagcaagacgctttccaagttgggcgcgtcccagagctcacagcccggtgtccagagtgaggcggggctgatgggggtcgcggaagctgccgtcgcttgtgtccagaacccgtcttaaaagaacccgggccagcatccccagtcgcgcgccctcggcccgcgtgagctctccgatgcctgctctggctgtggcccgggtggcccgcccgcggggggtgccagagggggcgggggaggaggaggaggcggtgtgatggccctggacggcgagctgggggagcaagaggaggagaagaaaaagaagaagaaaaagaagaggaagaagaagaaggaggaggaggaggaggaggagggggccgagaagagcagctcacccttcgcagccgcgatgggggaagacgacgccgcgcttcgggctggcagcagggggctctccgacccgtgggcagactcagtgggagtgcgaccccgcaccacggagcgccacatcgc

SEQ ID NO: 10057 - DNA, 2300 bp, Homo sapien
ccccacctgtaaaatagggaatgctgataatagcgtctacctcatagggttcttgtcggattgagtacatgggcgtgcaataagcactagaagtagtcatgtcaggaaaaggttaattaccttcctcaaacctccaccagagttagatgaacagcagagattcgaactcagttctattggattatgaggtctgagctctaaacaagtggtgaaaagctccacggcctctcggaaattttttataaaaatacaaaactacacaaatgtaaaacgcggcaaagacactaacaaggcatttgagactgacaactagctttcccaccgcttggccactggaatcatctccagaggcagcaactcataaacaaacaaccggagtcgccctgccttagcacagagctggcagcgcccgcgaggccacttatcgctggctctggccttggcaacctccacccccgtcccggtcctctcagcctatctctggaaaccactcttttcactccgaatctcaacttgaagtttggggaaacttgacgcagccaaagcccatcctctgctctgcacctggcaggagactaatagtcagggaagatgggcatgttgtgggtgggggtggagaacggtgtgtccctgacctgccctgacatgctaacctggatgcgctgttgtcttggccttcagcgccacgtattttccctcgacagtaacttggcaagcttttcatgtcactctggcatcgctcagattatcagctacccttcagaaaaagagccctgcgtttcgatggctaaggaactctgacaggaagaggagaggtcccgactagaggagggggcagcattcatcttttggcaccggtgagtcagtttgcgaagttggcggcagcgagaccccgaggcatctgggagaccccggagttctgactgccctactccgctttcgtttccttccccccacccctggcttcccgggtattggaagccagctgggtccccggggtcgcaggccgcccagaggttcgagccgcgcgccggggtggggcagcgcggggcaccgcctccctccataccttctctccccgtggagcacataggagctgcggaagaagcccaggagctcattctcgatgagcgcgttgtagataatcttcagattgtaattcctctgcgcgtccagtgtcctattcagcaccaccactaagacctgggtttgcgggtagaggaaaaaaccggctacagggacagccccgaacgcccggtcctcggccagctgcactttctccaccgccactcgggaagcgtgcagcactacgtagcgggtggcgttccggcacgcgatctccacgttgacctccccggagaaggtgaagttctccatgaaggcggtgagcatcagattgtagtgcagcggcttcaggtggcccgacaggcgcagctgcgtccacggctcccacggctcccgctcctcctccgacggcggctgggccgacgtggtccccggactggccaccccacccgcctcgggctgccaggagtccccgcctgcgtggtggttgcgccgggccgatccagggaggctcccgttgccgccgcgctccggaaagcctgaggggccaccgtcggcgcctggcgtggcactcgccccgcactcgtcgaagcgcaggctgagcagcacagcgagcattgtgaccgcgagcaatgccacgagggacacagcgaaggccagcacaagccgcttgtgtacggcgatgtggcgctccgtggtgcggggtcgcactcccactgagtctgcccacgggtcggagagccccctgctgccagcccgaagcgcggcgtcgtcttcccccatcgcggctgcgaagggtgagctgctcttctcggccccctcctcctcctcctcctcctccttcttcttcttcctcttctttttcttcttctttttcttctcctcctcttgctcccccagctcgccgtccagggccatcacaccgcctcctcctcctcccccgccccctctggcaccccccgcgggcgggccacccgggccacagccagagcaggcatcggagagctcacgcgggccgagggcgcgcgactggggatgctggcccgggttcttttaagacgggttctggacacaagcgacggcagcttccgcgacccccatcagccccgcctcactctggacaccgggctgtgagctctgggacgcgcccaacttggaaagcgtcttgcttgcccagcgcgcgctacttctcggacgagcacccggcggcggggcacatgctgcccccgcccctg

SEQ ID NO: 10058 - DNA, 2300 bp, Homo sapien
tattgacattttgacctaagaagcttgttcctaaacatagtatgcaaatttgttttctatgcctttcccccgtatttgacataattctgggtttaaaaaatatttttaatctgtattctttagaacatgttggaggaagtggtagaagggggtttaaaatatccatatctaatgtcaggagtaagaaagtgaataatttatacattcacttataggaggttttaactatcatacagctactaaagcattgggcattttatttataggaggttacttcatagaactctataaataataaaacttttgcttactttcacaacacattgcaatttccccagcctcttacacaataacttcttctgagagtttccaaacaccataagctctgtctggtccagggattagagaaccaaagttcaagtcctaactctccactgacaagcctgctcacctccagggccctgggcttctccgagcccattttctgctgttgtgagaatcacctgagaaaaggagaggctctgcctcattactgatctgtaacctgcctcctcttctaaagttgttggtttaatttttaagctcactttggttgttcatctgccctcagtcatttaattaatctaagttatcttagcaatgtgggaattagagcaaagaacaagaatcacttattcattcaacaatatacctgagagcttactgccacaagacactcatgagagctagcatttatggtggatactctatatgccaggcacaggggtaagtactttgtaatgcattcactcatagacgtctacaccaatcctacaagtagaatattattattggtatccccaagttagaattaaaagtctaggctcaagagccagactccctgggtctaaatccgtgctttgtctgctcactcttggtgatcttgatcaagctatgtgacacacctgtgcctccatttccccacctgtaaaatagggaatgctgataatagcgtctacctcatagggttcttgtcggattgagtacatgggcgtgcaataagcactagaagtagtcatgtcaggaaaaggttaattaccttcctcaaacctccaccagagttagatgaacagcagagattcgaactcagttctattggattatgaggtctgagctctaaacaagtggtgaaaagctccacggcctctcggaaattttttataaaaatacaaaactacacaaatgtaaaacgcggcaaagacactaacaaggcatttgagactgacaactagctttcccaccgcttggccactggaatcatctccagaggcagcaactcataaacaaacaaccggagtcgccctgccttagcacagagctggcagcgcccgcgaggccacttatcgctggctctggccttggcaacctccacccccgtcccggtcctctcagcctatctctggaaaccactcttttcactccgaatctcaacttgaagtttggggaaacttgacgcagccaaagcccatcctctgctctgcacctggcaggagactaatagtcagggaagatgggcatgttgtgggtgggggtggagaacggtgtgtccctgacctgccctgacatgctaacctggatgcgctgttgtcttggccttcagcgccacgtattttccctcgacagtaacttggcaagcttttcatgtcactctggcatcgctcagattatcagctacccttcagaaaaagagccctgcgtttcgatggctaaggaactctgacaggaagaggagaggtcccgactagaggagggggcagcattcatcttttggcaccggtgagtcagtttgcgaagttggcggcagcgagaccccgaggcatctgggagaccccggagttctgactgccctactccgctttcgtttccttccccccacccctggcttcccgggtattggaagccagctgggtccccggggtcgcaggccgcccagaggttcgagccgcgcgccggggtggggcagcgcggggcaccgcctccctccataccttctctccccgtggagcacataggagctgcggaagaagcccaggagctcattctcgatgagcgcgttgtagataatcttcagattgtaattcctctgcgcgtccagtgtcctattcagcaccaccactaagacctgggtttgcgggtagaggaaaaaaccggctacagggacagccccgaacgcccggtcctcggccagctgcactttctccaccgccactcgggaagcgtgcagcactacgtagcgggtggcgttccggcacgcgatctcc

SEQ ID NO: 10059 - DNA, 2300 bp, Homo sapien
agtgctgtatgtatgtggtattgacatgcatgtatttatgtgaatcgttttcttgtattttagatatttttttctaaaacccaaatatagaaacaaaccaacttttatcataatctctagttgtttagaataaataatttaaatacatggaaattatgtttatattaggggcaatgattcacaaacattttatgatcatgctacaaaaaagacacatttgtccttgagaatttttaaatgtcctcaattttctatattctttgccttttaaccagtacttatttggcttcacaatttagctgaaccaactcaatatggaagatatgtactaaagtcaagtttatgaagttaatctgtcttacctatagatgggttttatgccttttatttcattttattccaagtgcattcaatcagattcaatagtaatttatgatttagagtagaaatgccttctattttcaggctttttcaagatctaggtacacaaaaatgagcttatcatttaatttgagaatcagactcatagttgggcatcatggtctcttaactaagtattccaattaaccaagagagacccaatatttttagagaacaactgttaatgaaatagatcagttctttgtctcttcctcaaatctgtcattaaatatctggggcatatttttaaacctatattgaaagcttggaagtatttgttaaagagtttacatgagttgttgttcatgaactactgtctaaagagtcaatatagattttgctattataaattgttttattaccagaccgattgtatggagtccttattagtatagcatagtatctccacatagtttgccctccaaaatgtttttttttcattaagtataggatatagttttaaaattaagaactgtaaacatattattttgattttccatactggagataggattggtataaaattatgaatttcttccaaccttccatttggactctttactattactgaattctgtttattgtgaatgcaaaacatggaataataaaatagtcaaatttcacacgacagagtcataggaaatgcccttctctctcactccccaaaagacatattcattataatgtttattatccccaggcatgtttcccgaacattttttaattctttatttattctcacagttattgagatcacgcaatatcttgtcttacatttctaaaacagaaaaatattttttccatactggaattgttggctaccctattgataacggtgaaatgatagattgaaataatctggctatatttcaagaaggaaacaaatatagtcattggacttattgtaagaccatccagcatatctctggctattcatttgagattaaactgacattactgcatgtataagtataggcctcaatttttatcctataaaaaggtaaatgttacaaaatgcttctttttaatagttgagtttcatgattggtccctgcacgttggtggatgctttgacacatcaagctagaaattccatttcacaaaacagagcattaagtgtgtcccacaatattctttctattgatctggattgtatgggaatctgactagtttttttttctttctgctgagtaactttagatacgtcatattaacttttctgtaaagtacattaatagtgtcctacagagtcattagataataaataaggagaatattaaaatgtaaatgcatgaagccactgaaatgtgtcttaatctaacataaaaacaagtagaaagaagttatgtttagactttaatcaatatggctcaggtgtatagatattaggtactttctatttcaaattcaaaatgcgaatcttttttcccccaagaaaaatggttttgttggcagttctctttgcattgcaattaaaattcttaaaggccaagtcttcttaatggcattgaaagagtgaattcatctttttgacctatgccttacttttgtgaccggaattatttttttttagttcacctaatgagagtaataaaaatcacacagaaggcgcatgggaaatgttttttgtttttgtttcgatatagttatttttattcttaaagcttgtcttttattttgcagttacctgtggcagattccattaactattgtggtaggaaatagaagccatgtgtcttcagaagcaattatttgggtgtctaacaaatcaggtaaactatatattctcccctgaggaagtatctggtttcagataattgtttagcaacttaacctctggtttcagctgttataaaatgtgaataaagacaaattagaaa

SEQ ID NO: 10060 - DNA, 2300 bp, Homo sapien
tattttattctctttctactattatatatgcaactgatgccaagttattttagtttgttcttctagtttgtgttatcccgatttttgtcctgattgtctatgcaacacagatgacaattatttgaagaagaaatttaatacaaaatgctgacctaaaagtgtcaattaagcttaaatgcttcagaatttaagaagaaatatacatggcaaatttttaaagttcaaacttactttccaagagttagagggctctgtgttcacaaaggacttaacctgggtagaaagatcccaaagatcttaacagaatataggcattttcagtaatgattcttagtcattatttttatccaaaagggcatactgaattcaattcactgccttaattaacaaggataagatcaacattgaggcaaaagcccattcgtaattgggtccaaggggatacaggaaagcaaacaacagacaatccaaagagacaagaagacatgacaaacattccaaaatgttacctgaccagattttctgaactcaaaacctagtaaaccaaaattacactgctcatgccacctaatctgatttaataatcattttcaataatattaggattaagtactgctcatgagccttttgattcttaaatttcttatcactgtgccttccatgatgtttgaacactatttgttttcctttagttagcgtaagagcctgccctgtgttttataaaattatcttattttttatactgtactaattaacatacacatttgggattactgaaaagtggattcctgtgacatgaatctttttattggagccatctgatttctgatgcccatcagaattccttcctttttatttttactttaaacctacagaaaataaactgtttaatgattttttttaaaaaatgggaataattacgttcattgttagttttgtctaagcccttagaacagacatgcaaacaaatgggtcattacagttatgatacaattttttacttgctagagaaagattacacattaatttctccctaacacaaagacactgcaatattaaacctttgtaaaagtaaaatatatttttgaatatatttgtacattagaatagcgtatcatgtcagattccttgttttcagtaaacagttaagaatcatttttattgtaatttcattgtttgtattccttggcaaaattcaagaagcacattaaagtgagggagagccaacctgggcaacatggtgaaacccatctctacaaaaaaaaaaaaaaaaaaaaaaagaaatacaaaaattaactgggtgtagtggcttgtgcctgtattcccagctgctcatgaggctgaggtgggaggatggcttgaatctgagaggcggaggatgcagtgagccgtggttgttgccactgtactccagcctgagcaacagagtggagaccctgtctaaaaaaacaaaaaatagtgagggagagcatgccttaccttgatactgacacttaaatgtgtcattagctgaatgaattgttgactttgaaatatcattataattacactgaagagttctgtgtatctcagcttcatcaatactaggccattggttgggccaacatagtagttttgcattaaatatgccttgttgatataaaatgcgtaaatattagatgtccattttcatatagtatatctatatacatttgtacatatgtacgcataggtgttatcaatattctttgttttcctcattttgttacaaaagtcatcatctaaaatatttactcatgcaaattacttagtgatttaataggaagagtagacttgtaccattccaatagcattttatccctcttttctatatatgaaatactaaattaaataaaattataatagaacattactgtacttataattttatggatatttgaaagtaggtacattttaagaatattttaattttattacagaattttaattgtcagcatacagaagttttaaactgaccttatctttatttattctataccccatttaggaatatattttaaagcaagttgcaacaacatatatcaagcttgggtggccgaaaaataattttaatggatctcttgttcaagcatcctaccaacatgagtactgttttattttcttatcctcttctttacccctagagctgtataataatgtactactagtgccattgtgactttagctgcatgagacaatcttcctttcattcttcatcttacatttcactttcccgagaggactgctgctgggtagcacagtttccattgcctgatcctgag

SEQ ID NO: 10061 - DNA, 2300 bp, Homo sapien
cttgttgcagtgacaacaggctccctctatatggctcactttttggccatagttgtaataaaagctataaaatttactcttctgtttttatttttaacctaaatgtgttctgtgaattaattcactggtcaaacatattttatcacagtctaccacaaagatacaaaaatcttgtggcaacttcttagatgtacattcttccaactgtgattaaaaatatatatttttaaatatatatgtaatataaatatatattttaaaatatatgtaatataaatatatatatttaaatatatattttttaaatatgtaatataaatatatatatttttaaatatatatgtaatataaatatatatatttaaatatatgtaatataaatatatatatttaaatatatatgtaatataaatatatatatatttaaattttgacagagtcttgctctgtcacctaggctggagtgcggtggcgccatctctgctcactgcaacctccacctcccgggttcaagcgattctcgtgcttcaggctcctgagtagctgggactacaggcccaggctaccatgcctggttaatttttgtattttcagtagagacggggtttcaccatgttggccaggctggaattgaactccttgcctcaagtgatccacccatctgggcatcccaaagtgctgggtgattttttttttttggcggcgcatttttacttttatcacggacaacgtggccccttccacacccacaaatcagtgctgtccaagccccacccaggagcccctgtccagccactgctctccgagggcttcgcccaggcttccgtcacattatcactctccaggacgcacggcagctcttccactcttacctgaggttgtgttataaaagcacatgctggttgtaaacacctccaacaacgcagaaatgagcaaggggaaagtggaacttgctgtggacgtggccacaggaccacacttttgttcctgttggaatgcttgggtcggtttcacaagtcgcctcacagtcttgcaggctgaacccgtctgtctgggcgcctcgcgctgcctacctcctggggcgacgtggacggatgcgctcttgtctcagctttggtgtgtgcagtgaggagtctgcaccaagaatggtccatcaatgagggagagtactacccggggtgggggggcttccatgcctcccataatgggcacttcctgactttctgcaggaaatgctgtccttgagtcattctgttttgtcctgaggctgctgcgaggagggggataggtaagcacatgctggaggcttcggtccaggcacagcagcaggttccagctgccctgctttctgctttccctggctggagaagagcagcccccagcaggctgcgggcacagtcccagctcacgcacgacctagagcgcactgcagggccccagcaccccgccttaattttcacccttgtccctcctgctttccagcttcggcgtccttgttaaaaggaactcgaaccacaaagttataaacacgacacctgcattcccttccaatccttcatggttttttttttttacacacaaagcttacaacctttactttttccaaatggaaaaacagtttttccaacactttttaaaaaacaaattatccttttatcatatgctgaaagccctaccaataacaaacccacttctgcgtctgactctgttcactgacccttcatttacttcgtaaaccgacccttttggtaactttcagtaaagaggtagctttaataaatacattctccagaaatctccagaacctttgtgtgggtcagggtgagaggtgcccccacgatataaacagaacagctgagtcctccaggtaggtgccaggtgcgatctgcacaaggccgcgtgtgtgggaggcatggagtcagaggcgcttactcaaaatgcaacccttgtctccagcagagcacacaggcctcagagccccgtagacagggctggtcctagcggattcacgccacttcctgggcttgggggatggtacgccagaggctgcccacagcaggaagcccatgcagaggccagggcttcttgtcccactcggcagagaccccagaaggagccgggggcagcatcagagcctggggcctgggcaggggtgcccgagagcacagcagctgcaggccattgggaaggccagaagacagggaatggaaagccagggacgcatggagtgactcagagaagggactattcagctgggagtcctgcatttgccctttgtgtttcatccggggattttgaaa

SEQ ID NO: 10062 - DNA, 2300 bp, Homo sapien
tcccctttcactctctctccctcttgtcaccatgtgaagaaggtccttgcttccccttcaccttctgccataattgcaagtttcctgaggcctcccagtcatgcctcccattaagcgtgcagacctgtgagtcagttaaacctcttttcttcacaaattgcccaatttcgggtagttttttatagcagtgtgaaaacggactaatacagtgagatattaagaatgaatactaggcctggcaaggtggctcatgcctgtaatcctagcatttggaaggctgaggcagcaggatcacttgagttcaggagttcaagaccatctggggcaatatagcaagacctcctccgctaaaaaaaaaaaaaaaaaaaaaaaaaaaagaaaatagttaaaagaaattagtctggggttgtggtgcacccctgtagtcccagctgcttgggaggctgaggtgggaggattgttcgtgccctggagagccatgctgcagtgaactatgatggtgccactacattccaacctgggcaatacagcgagaccttgtgtcaaaaataaaaataaataaagaatgaataaattctaaaatatttagatgttcagatgatcttatacattagaaaataattatttgtatctgattaaaagatacatgtctctcctttaatctggaagggaaagtacagaatcagacagatataaatatgtattttgtatttttctttctttggttaacaatacttttaaaataaattataaagataatacaggctgctctatttcacagcagttctggggaccaaataatgagcaaaaaataaaggatatactacagcgatttttctcatattcaagttcataactaatatgattaaaaatagcttacatttactgaaccattgcttacatgtaaggcactgtcgcaagatttttaaaaatataatttaatcttttttttttttttttttttttttttttttgagacggagtctcgctctgtcgcccaggctggagtgcagtggcgggatctcggctcactgcaagctccgcctcccgggttcacgccattctcctgcctcagcctcccaagtagctgggactacaggcgcccgccactacgcccggctaatttttttgtatttttagtagagacggggtttcaccattttttagccgggatggtctcgatctcctgacctcgtgatccgcccgcctcggcctcccaaagtgctgggattacaggcgtgagccaccgcgcccggccaaatataatttaatcttaaccatgaaataagaattagcttttttttcagatgaggaaacactaaactgttaaatgttggcttcaggatttaaacttaggtagactggctcccgttctcacaaatcatgcatataattttaggaaaaattttatctcccaatatatttaacatatttcagatttccttcctctttaagtcaaaatgtacatctaattttctctctgaattattttagaggtgtatgttatcatctctttatagtcacattgccttaatgatctcataagtgagatagatgccatgggtttatttgatcaatatatacgaattatgactttagtaccaagtttccagtttttccattcaaaaaaagaccgaaagataaactatactgtaatttgtttccttgcaccatctagtggatttaaatgacaactgcagcattgctataaacgattcaccagtcaatcatgtaagtcaaattttcaaacacctccggagaactgttcctaaaatgatgtttcgaatcacaccacaacagtgcatataattattaaaattttccacttttcagaggatatcaattaagcgtggctgctgaattcattagcgaatgtttaaatttacaaataaagtaacataaaatagcatcctcgcaattttttaataatcagagataatggaagtcatacactaagttcatcctgttccttttcataaactcaaacgctctcaaagcagcagcgcgttgagaagccccaagagtctgcgcggaaccagtgcgcaggcgctctgaggggcggaagcggagaggcggggctaggcccgacaggggagcggaagaggcccaggaggctgggtgaggcgctgagacggtttggcggtgagtcctgggccaggcgcagctgaaaggcccgcaacccgggaaacgtcaaaacaaacagaaggacttgggattccggagcagtcgcccctatcgctgctcctgcagttgcggacgccaccgaccccgccgccggaggactgggcactgaaaggcct

SEQ ID NO: 10063 - DNA, 2300 bp, Homo sapien
caacttctgagactagattataaaatgaatcactgaatttcctccctgatctctctctcggatcacctgcaccgggaggagccagattctgcatcagtcctatggataggttcgtgtggtaaggaactgagacctcttcgcaacgacataaaatctattttgctcgtttaatcattctttcatttgatatttatcatgtacatgctataggtaaaacactcacttattaattaattattaatgctattgaaaggttttaagcaagaaagtaataatttggattggatatgggggagtgtgatctttttataaggcaaattggtttatgtcattatcctgcttagagcccatcaaggattatcattgcacaaagaatgaattacaaactccttaaactggtttatacatcgcctgcctacctgtttggcctcatctcaaacaactgtcatcatcatccactataaagctatatcagctattttattttcctcaaacaagtcaagctgcatcctaaacttgttcttcctcctcactgttcttctctcatttaggtccaagattaaatgtcatctctttaagagggcccttgtgatcccaaaatatcatggagccatcatttctcttttacataaacattttcccattctgcttacagcacttattgccatcaaatattttatctacctattatttatatttccctatttaaatgtcagttccagcctagcagagtgcttaactgttgtatttactactgtatttctgggattgagagcaatagttcacagtcactgctcactaattattttttaatcaatgaatatataaataaatgaatgcatggctgaataataggaaaaagaaaactcattgataagtcctatattattgacttgagcaaacagatgaaaagtggtgttacttaaagagactgaagactaaaggagaaaaagttataagtgtataagaaatcaagaattttggttgactcatattaagtttcatattgctattcgatatcaaagcaaagatatcaagttgtcaggtagttaccactctggctctcaatggcaaacctgaggatggaataaaatcaacaaacatccaaacttttcctgtgccatttataataataacaatcagaacaatgaacataccattttatatatataaatatatatatttatatatactatatatttatatatttatatatactatatatgtatttatatatttatatatactatatatatttatatatttatatatactatatatatttttatacatatatatactatatatatatagagagagagagagtaaaatagtatggcccactaatgtattaacgggggctatctactattttaaattttatttagactaactcatctaatctcaacaacttcattttagcagacactgtttctatttcattttatacaattcaagaaattgaaaaaccaagagcctaaatagcatgcctaaagacactgtgttaataatttgtgaatatatgtttgagagtcaggcaatctgattttatagcccacattttaaaaagctattttattttagattcggggggtacatgtgcatgtttgttacatgggtatattgtgtaatggtggggattgagcttctaatgtccccattatccaaatagtgaacattttaaccaataattttcaaccctcactcctctcccttgctccctgcttgtggagtctctggtgtctattattactatctttatgtccacgcatacccattgtataacctacatttttaaccatgatggtgaataaaaagaagagaggtaaagaataagcttcaggttgctctaatattaggaatgaaccatataggaatataaagaagaggcaaaaagcagagaggaaaattaagtagaaaaaaacacacaatgtgttttctcaaaatttgagagaaaataataattccagaagaaagagattatttttgttagatatttctgagagttgtaaaagaggaagatagaaaagtctccactgattttcaaagtagattcaggttaaaaaaaaaagaggctggtggaggaggagccaagatggccgaataggaacagctcctgtctacagctcccagcgtgagcgacgcagaagacgggtgatttctgcatttccatctgaggtaccgggttcatctcactagggagtgccagacagtgggcgcaggccagtgtgtgagcgcaccgtgcgcgagccgaagcagggcgaggcattgcctcacctgggaagcgcaaggggtcaggg

SEQ ID NO: 10064 - DNA, 2300 bp, Homo sapien
cttgtcaatgtgattatttctagatagcttatataatataaccttacacccaaactgattcattagatctttgtctttccattttcctccccatgagtactttgcattatcttttcctttctttttgttttctctgtagttgtcttataatgcaactaatattatgagactaaaggttttcattactgattcctatcatctgtatgagttatctttttacagtcttgcaatttaatgtgaacattctctctatttaaattaaaagggggtaatttatgtgaagcatttttaacatagtaggatctcagtaaatacctattattataaatgcttctgttgctattacagttgttaatttattctaaagcaaaccacattcccccttttacctactgaatttacattaagcaatatatgataccatctagacaatggaagaatgactgttagaaggtgaatatactttttctttgtaatttttctggcaattgaaatttattatcattattatttttggaaatacctcagtgattgataattgtacaaaattaaaataattttcttcacattaaagccttatacatttttgtgtgtgttagtaactcacatgctgggtacacattgtctttacacatttactgtaaaattgtcagtaatttaaaaaataaatgtatatattacatcttttgcatttattttctagacatcaatgaccttccaaagaccttttggttctctactttgttaacctatttaatgtgtcataacagatagacgtttatttggtgaattcacattttactacctgtcttatcactctctatattgctaaaattttcttattaataactcacaaatcttgctttttctaagccatagtatcatatcaatacctgtttatcaaagaaatcttcttccacagaggacctggtgttttccttactgggtggacttcaattctaacaaactatgcctgtagaatagtgtctgccttccttctttttctttctttctttctttctttctttctttctttctttctttctttctttcttctttctttctttctttcatggaatatgcacacagatacacacatgtgcacgcacacacacacacacacacacgatctgtttggtgatgaggcctgttataggttgaatagtgccccttcccctcataaaaattgtattggagtcctaactttcagtacttcagaatgtaaccttgtatggagatagaatctttatagagatagtgaagttgaaatggggtcatttatggcgggccccaatctaatataactgatatccttataaaaagaggatgtttggacacagagacagatatgcatggagagaaaatagtcagaagaggcacagggagaagatgcccatctacaagccaaggagagaggactggaacatattcttcctccacaaccctcagaagaagccaaccctaacaacaccttaattttgtatttgaaactggcagaaccatgagacaatacatttctgctgttaagccacccagtttgtcatactttcttatggcagccctagcaaactaatacaaggggcaatgaaaacttgagaaagggtgaaattggcttattaaaaaattacttggatacttgggtatctgtggattttctcttcagcttcagacaaaaagaaaccctggagcttgtactttgtaaagcactatcttcctgggataaacttctaaaacttgttttgctttagataaccgtggtgtggtggctggagactgacatttgatttgaaaaagcaagccagagctatgcataagacataaaaaacaatatttactgtcacctgttagtagacctctctctccggccaactgtcattgagaaaaaaaaaatgcaattggttttagattctctcacttgttgggaggggtggggcatagcgaggggtggggggagagagagggtgtggagagtggggtgtaaataaggcaggcagaagctccagagagggtggagacagagcttcacggaagaaaaatatgtgaacctggttggtacacatagcttctccagacccacccacccactctttcctgagccctgtgcttcggatggcggcgggaggttgatggcgagtggtgctgaagggacagctccagcagtggctgatttgggggagaaacaaaatctgcagatggaatccgagcagggcgacttcaccttcaagtggtgagctctcctgacctgcggccagtctccactccattcacggccagccgatctgcccgctcccggaggggtc

SEQ ID NO: 10065 - DNA, 2300 bp, Homo sapien
ttcattttgttattatttatagtttcactttttctgtaaaatttttcaatttttttcttttaattccttaaacaggcacaccatggttattttaaagtctgtgtctgtttacttcattttctctttttcttactggttatttctatattctcttctcttggtttttaatcatgttgactgcctccacgaattacttcattttttattgaaattataaatgaaatgttatgaaaatgtgatgacattaattccctctagaaaggatgcaccttccacaagcatttcttttactgctgtataatcttttattaagggttgctcaaaaaaaaataggaattggctattctaacttagcaattatccaggacaagtaagtgcttgactaatttagttaatcttgcaaattaaaatttgacctttaacgatactctttattgatctatttaataactatatattgttaaatatttttaaatctatgcagctaggagagctagtaatgatagatcacttggatccttttacagagataagggtgacttgatctgggctaacgttttttgaagggtttttctacttatttttcaatcttatttctatggtgtaacctttcaaattccaatccaaaggtgggaaattgactagtgctatcccttcttgataaattctggataccaatattttcccatagtcctacaagtctatctaggttttgctctgttatttccttctaagcctttttttctagaattgacaggtatctcttcttgaaatactaccccaagtgtcaggcttacttctctgagtttttatctatccctgaatctgacttcataattcctcactacctgttgactctatgtgctttcaagcaattttgtgtttatattttgtccatttttctagacattctagatgatctgcattttttggctgccatttctaaaagcatttctctgttaccatttgctaaaggttactcaaaaaaagtatggtttgcctgttttaatttagtaatgacataagacaaacagaaacagtgtctgaacaattttatttaactcatttttgcaaagaacttattttagaatactttgtgttatctacttaacaattatttattgagggcttactatgcacaaagtactgcttcaaatcatgagcatacagtaatgaaaagacacccaagtttcttacctctcagcacttactttgtcactggtgtaatataaaaagcaaatggataagaaactatataacttcagattatcataaatggtatgaagagaataaaccgtgaattgttatagaaaagtaaattgcaagataaaacttaaacattaaaaagaatcccttgtgcacagtggtgggaaaatggtgtccaggcataggtaactaaataaaaaaataccctgagaaagaaaaaaaagcttgctatattagcagatcatggctaaactatgatgttgttagcaagcaattagtataatttgaaattcaaaaggagcacagagtctggatcatgtagaaccttgtataagaacagctcagctttgttccataactttttaaaattgaagatcatataagttatggtgctgtattatagctgagttagctgccataatatttcttcccattttcttaccaaaaaatgctgtcagcccactaaactggtaggagtgccctatactgtcaaaacacttcataactacattgtttctactgacagttttacctcttggagggtagtggaagcaactggggaaattgctactctgaacttaataacaaacaaaagggaaaaattggttggaaaagtaaaagtgataagaaccatggggacaggaaataatacttctttagaatttaaaatcgcaccaaaagaaaatcctgagcacattcagacagtcattaaatctttgaagaaaatgtttttattagtttaaaaacaaagtgaaaatggactcaggatgttggaacctaagaaggaagaccgcaagtgtttcagaatgttccacaaaaaatagttctgcttacatcattatggaaggaattttgatgagacaggtcatagagggaaaagaaaaaaaggctaatatagccataaagaatgcttttaaatcaagtaatacacttgacttagaaagacaagccagcggcaattataaaataatgacacctaagaatgttttcaagaagtctggttcataatgcattcaaacttaaaaaaatattaaagacaactaaaaaaattttgctcatttttggagcaaaaaaactaccaaagaaggagcagc

SEQ ID NO: 10066 - DNA, 2300 bp, Homo sapien
agggagtttgggaggcagatcagggacgccacgcaagccaagggaggactttgcctttttctgtgaggcagaaagctacttcgttcttttgaggatgggctttattgagaataggacaaagataaaagcaggaagacctttgaggagactgtcacaataatccaggcaaaatttgacgatgatagcttggacctaggtgatggtagcttcagacttggaacttcgtagtgcctcacaaagtcatattgttgacagattctgaaggtagggctaagaagatttttgaatggattggttatagacttgagagaaagggaagaccgagaatgactctacaaggatgaatgtgcaggacattaaaccaggcacagaaagacaaatactctatgttttcacttatatgtggactctaaaatagttgaacccacagaagcagagagtaaaatattggttgccagggactcggggggaggggttgggaaaatggggacttggtgaacagatgtgaactttcagttataagataaataagttctgaggaactactgtatttgtggtgattatagttaatcatactgtactgtattttttttcctagaaatttgataagaaggcagattttaaatgtcttaatgacacacacacacatatacgcagacaaatacaaatggtaactatgtgtggtgatggatgtattaattaatttgattgtgataatgattacataatctatatgtatatcaaatcatcatactgtacacattgcatatttacaatttttaatgtcagttaaatattttaacataaaaaaacaatggatctaaggcttttggcctaagagggttaccattaactggaggtaggggaagactgtaaggaagtctgattttggaaggttgaatttgaaatattaagtggaaatatcagttttccttttgtaaaaggttgaaaacaagctgacacaaaataaaattatttcgaaagtgttttcaacctgaacaaaatacaatgctttgcttatatttaaatatatgcattaaattaatctgcttaatttacctataaatgctaagcatctttttggtgcctgtttaaataaatcgctatttagaaagaagtatattagtgggtaaataaataaaatgataaagtatcttcataaattgatttttaaatacctaagcgagattcattattcatttattgaataaatatttatcgagtgctcactttgtgttatcctgttctgccaccagcgatacagcaataaaaatgacagacaaggttcctgctttcatggaacttacattaggagaggcaagcaataaatcctaaatatatataacaaaattttatatagcaatcaaaggtcataaagacagagaggagtattaagatagagtgtgacctttcaaggaagatctaaagtaagaataagccctggggggaagaaatcttataatctattaagtttttgaaaagttgctattttattggaaacttttttttgttttgctggggtagcgtaaacgcatagtcaaagaacaatttggtatttatctctttagcatcccaaagaatcttttacctcaaaggttacactcatcttttagtattttatttctgaatttaattttataatggagtagacatgcccacatttattaatttttcaaagattcaaattggacaataataattataatagctgctaacttttatttaatgcttactatgtcaagtagtttttataaagtgttggacatgtatatctcttaatcctttttgtttctggggaagtagttcctattattaattcgcattttatctataagtcacctgaggcacagagaggtcacctagcgggcaagtggaagagctggattcaaatataagcaatctgattttcagagcctgtacttttaactgttgtacaaatagtcactgagatattccgtagttatctattcccatattttgttaaaaacaaacattctaaatatgtgtatgatgcttcatttatttctttcatgcatagtgtgtgcaagatgaagaagccaacacagatgaccttacgactctggataggaaagccatcttacagcaaggttatgcagacaactcttgcgataaacaacagagggcaagaaaattggatgcagtaagttgtcagcatttttacttatttggtgagccattaatcttatttgctttctaagattttaaagactgaatggaataaataattgcaacagttgaatttgaactcgggtgaatattcattaatggaaaattgagtc

SEQ ID NO: 10067 - DNA, 2300 bp, Homo sapien
gtaaaacttttatttccttgaatgcaaattcaaatgaggactttttttacttttggtttaagagaaaaacaaattttatttgcagatatttccataaaattggtaagtatataataagaataaagagctttatagaagccaatatacacataaattcttctggaaaatatgctattttgccactgattttttagaatctatattaaaggtgtgaaattattaagtttaatatgtttttagtggtcttatagaagaacttctagttaaaaagcatttctgtagattctctgtataataattttgtacttaaggggtttgaggaacttacttgatatcttttcaaatgtataccattatgagaatcaaaactgctatataaatggcctagtagtaaattctgttacaattacatgaattaacactagtaatctctggaaacagaagacatccctgatatcagaaatataagcccctctttaaagcagagatcaacatgtaaattgattctctttactggtaaagcaaagctaaaattagaaatatttaggatccagggcaagaactaaaggctatcattgctaactaatcagtatgatacatgagtcaactgataatcagttgaactgcaaaatagaagtttgactctacttgattcttgtcttcgttcattttgtgttgctataaagaaatacccgaggctgggtaatgtataaagaaagaagggtttatttggcttcatgagtctgttggctagaaagttgaagattaggcacttgctaagggcttcaggttgcttttacttatgacggaagatcaagggaagccagcatgtgcagagatcacatagcaacataggaggcaagagagcatgcgaaggtgccaggctcttttgaacaaccagcactcttgggaaataatagaatgaaaactcactcgcctccaaggggacaacactgatctattcacgagagatcgacctccatgacccaaacaccactccaacattggggattaaatttcaacatgaggcttagaggggacaaacatccaaaccatggcaattctaatggtaaatttcctttgctgtgttttccttccacttactataaaaggtgataaatctcttgttgtcagattgttttgttacctaaaatgcaaacttatgtgtacatatatatttttaaaataatgagacatcttgaaattaaacatgaaaatcattaaactgcaattttgtagaaaataatctttatttcctaattgtacctatcattattcatttcaaatacctcttttttcactctaaaaaacttttagttttagaaatgatcaatataatttattcatttattatttattctttcaacacatagttactgaatgcttaactttatgcaatacccctgtccaggcactgggggtaagtcagtgaataaaacagacaaaaatttctgcctctaaagagcttatatcctaatggaaggaaatggcaaggagaaaaaaaaaatcaatcaatggaatgattaatcagtcaacccagcttgtatgacacatggtgaaaagtgtggtgtatagaagggatctaggaaagtcagggctttgggtatgggatagcagcttgtataggatcacaggggagacctttagataagatagcattttagcatacacctgaggagcaggctagtcaagagaaactctgtgtcatgaagtaggagtgtttaagaaatattgaggaggacagtgtggtcaaaggagggagagcaagggagagaaggaaggaggttggtaagagagttaaagggagtttgggaggcagatcagggacgccacgcaagccaagggaggactttgcctttttctgtgaggcagaaagctacttcgttcttttgaggatgggctttattgagaataggacaaagataaaagcaggaagacctttgaggagactgtcacaataatccaggcaaaatttgacgatgatagcttggacctaggtgatggtagcttcagacttggaacttcgtagtgcctcacaaagtcatattgttgacagattctgaaggtagggctaagaagatttttgaatggattggttatagacttgagagaaagggaagaccgagaatgactctacaaggatgaatgtgcaggacattaaaccaggcacagaaagacaaatactctatgttttcacttatatgtggactctaaaatagttgaacccacagaagcagagagtaaaatattggttgccagggactcggggggaggggttgggaaaatggggacttggtgaa

SEQ ID NO: 10068 - DNA, 2300 bp, Homo sapien
aaaagtagagtatatatagtcaaacataatccaagattattgctcttctaagagacgtttttaataaaatgtctgaattgtatacattatgttttttagatcatgttcccaatggcttagacagctatattcagaaatactaaaacaatttaggtgtaaaaagtctaattgccaggaatcaacaagtgcatgtcctaatgttattttcttgaacatctatttctggaatggccaaggttagttggtgcaccagaatttttaagttcttttataactttttaaaagttaaatttaggccgggcgcggtggctcacgcctgtaatcccagcactttgggaggccgaggggggcggatcacgaggtcaggagatcgagaccatcccggctaaaacggtgaaaccctgtctctactaaaaatacaaaaaattagccgggcgtagtggcgggcgcctgtagtcccagctacttgggaggctgaggcaggagaatggcgtgaacccgggaggcggagcttgcagtgagccgagatcccgccactgcactccagcctgggcgacagagcgagactccgtctcaaaaaaaaaaaaaagttaaatttagctttctgttttatttttatgtgtgttttctgctatttatttttgcttttctttctatgtgggggtaatggatagatgaattttatggagtgcagcagaaaaatacagagtgattacattatacctcatttccttcactatttttatactttaaaaatttatttgtatttttactcccaaatttgcaccaggaaatactggaaatattcacgttttgatacatacattctgaggggagctaattttgaaaagttactgcagattagaaaaacatgattatgaaagaactggattaactttcataaactcttacttctaatttgaatatctgactcttggctgtgtaatttaggaaagttagtgcatattagagtggagtggatccttggaattatctcaaaccagctttttccctttatagatgaggagttgatgccaagatattgtgtacagagcatacataaaaatatttaggccgggcatggtggctcatgcctgtaaatcacagcactctgggagtctgaggcagggtatcacctgaggtcaggagttcgagaccagcctgcccaacatggtgaaaccccctctatataaagatacaaaatattaaccgggcgtggtggtgggcgcatgtaatcccaactacttgggaggctggggcaggagaatcgcttgaacctgggaggcagaggttgcagtgagtcgagattgtgccattgcactccagcctgggcaacaagaaggaaactccgtctcaaaaaaaaaaaaaggcaaagaataaaatgcaggtttcttgatttctaggcctttgccctttccacacatcattttaaattttaattatatatacacacacaaatacacatacatatatatgcaattattcatgtaatcatctatatgtacatagtcacacaaatttaaagtaatatccatgtctaatatctatgtatctctatataatatattacagtctttaaaaaaaataagtgcaagctccttgagagcagatattgtagcatatgcttaaatttcttctcctcaaaacgtcattctgggctctgtgcacagacaggtgccttatgaaatatgttaaacagaattcaattagacaaagaattacacaacaaccgccgtggatccgggccgggctttggccctttccctgctcaggagaagcgcgggtgagtgagtccgctccggctcctcgccggggtttaggggcgccgcggagccggttccctgggaggctgcggcggctgtagctgaggtttcacccctttgggttttccagccagcaagtacttctgagagcgtggcggggtctccggccacaagctcagttccggtcagccaggcagcggaactgaggaggcagattggcgggggcgggaggtggcgtagaacgaacaagggacttgggccgacgaccttttcgtccctggaggtcagagtgtaatcagaagccctgcgctgcggcgcctgttgccgggcaacctgcagacgcgggcctggactgtctagactgtcctgtctaaagctttctgaatgcggtttttggaggaatcgcgctagtttataccttttccaactcttctaactctggacctcttcttaccgagcttgttaggtgaaatcaggctgactgtctcttgtgcccctcgcctgtcctgtccaggaatcccagttaggtaggggatg

SEQ ID NO: 10069 - DNA, 2300 bp, Homo sapien
ttatgtgattaagtcaaaaatatttattgagcccctcatatgtatatatacatatatataacaattaaaatatagtttctgctctcaagaagcttacagttgtatacaacattattagaaagttaaagagaactcatttatttattcgaccaatttttattgagagcctaaagattcagttcctgttcaaggtgctagagatgtagcaatgaagaaaacaaagctactgttgtggtgaaggctacaatctgatagagaaggcagatgttaaaaaaataaataacataaattcaggaggtaattaatgcaatgaagaaaaataaaacaggttaaatggataggcactgacagacaggggatatagaatgatcagggaagacttcactgaagggaactctataaagagcactgcaggcaaaagtaacagcaagtgcaaagatgctgaggagagagcatccttatcaagctgatggatgtggctgatgcagaataagccaggagagaatgccagagaactagccatggtcagattatgtagtgtcttttgggccatacctaggacttcagattttttattgtagccccccactgtaatgtgagccaattccttaaaagttctctttctctttgtatacaaacatatgtatatgtatatatgcctatagacatctgtatctctctctgtgtagatgtatatatgtctataggcagacacacacacatatatgtgtatacaaacagatttatacatagagagaactttacatatataaatgtatgtgtgtatatgtatgtgtgtatatgcctatagatatctttatatccaggaagagacatatatatatagacacatgtagatgtatataactgtattgatttatctatctgtatacctacacacacacatatacacacacacacacacgtatatatgttcatgtctttgggtgtgggatatcagaagctcagtttggactatgtatgtgatatgaaagtagtatatacagcaattctccattagctggtagtagactagaaatatattatctattgcccagtagaatttccattaggatccttgcatttttcgttttcttataatctaattttctgctttttatttttaaaaagatagtagctgcatcaaagtagtttgttttggtttttgttttttgtgtcaaggttgactatggcggatcattcagcagatgtaagtacgtgttcacttgaattaaacagcattgtaaacaacttcaaattactaagtaaaggtatttatttgaaacatagaaatactaaaaaaaattaatgtcatggggaaaaatgctggtttattacagaatatcaatataactgatgtaatgaatttaaaacattaagccaaatgacgttgatttatattgcattgcaggtaaaatagacaatcaaatgtactctgtccatcccagtctcagtgtatcaattaaagcaactcttggagtctaccagtcaccatacagtggctctgttccaaactatcaaaaagggaagattttgtcaagaggaactacttggctacattttccaagcatctattgttatctatctaagcattcggtctcttcagacgaaaaaacagaaggaaattattaaatgtttgacaagttgataatttaggatcactgtatgtcactgtataagaattgcctattcttactctattcccaatctctgagggaagtggcaatatgattctagattatttagaacaataaaaatctatacacggaagctgcgtctaagaaacgaatatatagtgctttgcactcgactggcccattgtcagcatcccgcacttgttctttacctaacttgtgtggcttgcatattgcaatctgtattacaatccagacgcgctctgcagattacagattggatccacagaaagcagtttggatggttgaaattccctccaccagagggcgactcagagctttcccctgtagctcagagctttgtggaaggggaaccctgctgcctgttcttccccacagcgacactgacaagttgatccagccgcgctgggctcgagcctgtgcggcaggatggagccaagggagagcgtggtgcgggggcgtggggaaatcgggttgccccagccgttactggtccgcgcagtcagggcatcctccgcatcctccacatccttccatggctctgaagaataaattcagttgtttatggatcttgggtctgtgtttggtagccactacatcttccaaaatcccatccatcactgacccacactttatagacaactg

SEQ ID NO: 10070 - DNA, 2300 bp, Homo sapien
agaaaaggaattggtaaaaaaaacaaaacaaaacaaaaaaaacacagaagtagctctaccactccctggctgggtggcctcaggcaatttgatttctctttttctcagttgtttttccatctgttaaagggataataactatttcttaagatttgtgtgacttgagtgagttgatattgtccaagcattttaaatagtgcctgacacattaaatatttgtgaaatagattaaaaatagtattcaccactctgtattgtaactgtttgatgattcatctgtgtcacctttaattaaaagctccctgtggatagactccatgtctagcttgttcagcatttgagcctttagctgggctgtgacacacaggaagtaccaaggaaatatttattgaatgagatgtctagcagtggaatgggcttccctgttggtctaattatttaagaaaaggatgtgatgatcacctgtcagtgatgttccggagagtatacctaacacaggaggctagcaatagtggctaaaatttcttccaaatctaagattgcattattctatttatactttttctttagcattttttgcagtctaacaacagtaccaccataataaaagaattgcatctttcagcacttgccaccttcacccttaaataggttctagccatactaaaatacttctagcgtttaggatcttcctctccttaggcacattacatgcttttccctttgtttagaatgctatcttagacttgtctgtttcactttctgtatacaatttccagaaaggcttccctgctcctccacaagagtaccaagcaatagaattttggctttgtatttatcacgttttaaatactgcctgattgctaattcactaaattgtaagctgcttgaaagctggatctgtgtcttgtctactgatctttctcaatcacttaaaacttactactatgcagtcatagtagtaagtattcaagggcataaatgaaaccatcttacataggtctattgtttttcaattgtgtgcatcacagacaatttttaaaagcacttttctttttataaatgtttggctaacctgttacaatgttttgtagtaaaattctctcccaatgtcaattttccatatctgcttaatgctattaagcacaatatgtaatatgcaaacgtgtattccaaaactaatacttgctttttttccatgcttagaatttaaagtcttcaaagcaagttggttttgttttgttttgtttttgaggaaaatgtttggaggtaaacagatcagaccaaaatcagctagatattagccaattttgtctggaacaaaaaaagaaaacaaaagagttcgttcttactgtgaatgccacaattagtgaaaaagatgaatcttgatattccgggctgtctgaattgtgctgatgagagaagaagtagaaatgttttaacctttgaagagtttggtgatccctactctcccttcactcccatttattttgtggtttcccacaaaggttcatttaaaaactgaaaaaaatctcatcaattaagttggccttaagaacttctttggccttaagaactagcaatatttctgtattccattctgtccctgaggaaaataaaaggcaggccctgcaccaaatttccaactcaacaggtaatggggaaaaaaaatttaattgaatttgtatctgtatcgcagaaaaatcatttcacctggcacaattagaaggttcctcagacctgttactcagcaattggcatttaccatacaaactgatgactcattaataacgacatatcattcagtgtcagaaatcaattcgggataacatttcactacattagtttagtgaaaagggcttactcacgtaacacaagtctttctttagtttgtcagacatctattaccagctttcttcactctgcaggtctagctttcccctcctctccccctcccctacccactctcccctccctcttctctcctccctcctccttaccccctcctccctcctttgtttttccctcctccctcctccctttctccttccgggaggcgggacaaggcttgcttgcgtcctccgtagattggcaggtcactgggacggccagcgcgtgcgcactggcctgtcagcggccggtggaccatggaggccgcaaggcccttcgcccgggagtggagggcccagtccctacccctggcagtagggggcgttttgaagctgcggctctgtgagctgtggctactgctactgggttctagtttgaacgccagatttttgccagacgaggaggacgta

SEQ ID NO: 10071 - DNA, 2300 bp, Homo sapien
gtttaaataagctgagtgatgtccaaatctgctaaagaaacattttaaataggccatactattatgatagactatactatttacagttaatatttatgtcctaataaaatacatgggaaaaatatacattaacttcaagaaagaagaaaaaggtaaaaatttagggtgggactttaacctatatatcaaatactattcctttaaaaatgtctatatttaaaaatatcgattgtgggtatacaggtatattattttatataccttatgtttgaaatactatataatttttagagatgagatagaaaacctatgaaaagttgtattagaaagtattatgtgtttattaattttcaggagtaaggataatcttcaaattgggaagaaacagaattagtcacaaaaaatgggaaattagttgaaactcccaaatatccccaaactctataattgaattcaaaagaaaaagaattggcttagaaaaaagtatcttcagcagatagaaccaaatgctagcatagttctataagacagcatataatctgacatggaaatgctgacaatataaaaggtaaaggaaatgacgaagaaagaactcaagtatgtcctatcaaaatagtattttaaaatcaacattaaaacaaatgaccatttttgtaatttattcatttagcaagtaattgaacatgtccaaatcagtgaggatgtggtgaaaacagaacagctggtatttgctaaatttggcactaccctttagcatagcaattgctatgtgttaaattaataaaaaatatcatacccttaatttatttatcccatttctgaaatttgtgctaagaactaatgctgaaggaagaaaagacatgtctaggaaagtagtccttgcaatataatttataagtttgaagcttctaattccctaagaggacagttatttatttgccggattttcagtcattttaatgacagtcaggaaaactcaatagcaaccagggaatagttgagttgttaaatgactatagggtgtaaaagagggggaaagcaagaaccgcattgtaaggtaaggcaaaatcagggtcaagactagggtgaggaaactgagacacttccttaggagccaaatttggaatgggcacaaaaaaaaaaaatcaagataacaaacatttttaaaaggcaaagctaatgtgacatcgatgatggaaaaagctaaaaataaaaatttcaaatacaaacagaatctcatcttgatttgcaccaccctgagagtgtcgcacttgtttttccctaatccagacccaaggaacctgtctttgttaaattttttaacattttctttacccttgatattgatatttttgcactgatttttaatttttaaaaacccgttgcattaaaatatcattttcttgaattggcgcccccttaaaatctgcacttcaggccagtgcctccatcaccttagtcctggccctgtgtaatatcatggtaataagcatgtgttagagtgtccgcagtttttctctgtgtaaacttcacgtgtactttaaaaaccaagctaaaagtgcggttctccgcgatccttcagcctcagagcagtggccccaactacccgagatccagggaggcgttgtggcaacggtagtggaagggtcggcaaaccgccttccggcctcaccatgaagcgcaagttagaccctcggggaatgacgtcgccccgcagctcattgtggaggttcacgtactcgttgataaagtctacgtcctcctcgtctggcaaaaatctggcgttcaaactagaacccagtagcagtagccacagctcacagagccgcagcttcaaaacgccccctactgccaggggtagggactgggccctccactcccgggcgaagggccttgcggcctccatggtccaccggccgctgacaggccagtgcgcacgcgctggccgtcccagtgacctgccaatctacggaggacgcaagcaagccttgtcccgcctcccggaaggagaaagggaggagggaggagggaaaaacaaaggagggaggagggggtaaggaggagggaggagagaagagggaggggagagtgggtaggggagggggagaggaggggaaagctagacctgcagagtgaagaaagctggtaatagatgtctgacaaactaaagaaagacttgtgttacgtgagtaagcccttttcactaaactaatgtagtgaaatgttatcccgaattgatttctgacactgaatgatatgtcgttattaatgagtcatcagtttgtatggtaaatgccaat

SEQ ID NO: 10072 - DNA, 2300 bp, Homo sapien
ccagaagaagatgagaagcaggccttagacatggttaccacttcaaactggagaaaggtctctttgtttattgtcactacattgatcaaaaagttgcctatgagacctggataagacactgcttatctcagattcctataatgtaaagacatgctagtagaaattaggcagcctggacaaaatttgaatttatgtatgagtatttttaaggttatttgtgtgtgtgtggcaatagtaattctgccttatggttctgtaatggtttttgtttgtttggttggttggttgggcttttttgagatggagtttcactcttgttgcctaggctagagtgcaatgacaatctcagtttactgcaactccgcctcccaggttcaagcaattctcctgcctcagcctcgcaagtagctgggattacaggcatgtgccaccatgccaggctaattttggtatttctagtagagacagggtttcaccatgttggtcaggctggccttgcacaactgacctcagatgatccgccctcctcagcctcccaaagtgctgggattacaggcgtgagccaccgcgcctggcccgtatgtttgtttttaatgatggggcctcgctctgtcacccaggctggattgcagtgacctgactatagctcttcacagcctcaaattgtggggatcaagctatcctcccacctcaactttctgagtaggtggggctacaggtgtgcctggaatgtttctttactttttgtttgcattagaaatatttccccacctcattccattttccatctctcttaattttctaaaatacacgtgttttctaaaaccaggtctaaaccccacctacagctaaaatcctccaataacttcccatgactttggtgataaaataaaaaatcattagcagaattgagaaatccttcctgatctgactcttaacttctctcccccaagtggcatgaaagcatcatttggattctgaattccatgacaccaggtatcaagttttctaccagtcagaatcactacttatttacagaccatatttacagagggagacaatatggagaggttcttgctctattcttgccataacaccatgtcttcaatttcacaactagatatatagttcctatccctctaattcccttctcctctccagcgctttttcacttgatcaacacctagctgattctagcctcagcaaagacctcacctgctgtatgtaggccggctctgccgtttccagaatgggttaagtatgctctcttgtgtgtccatatctacctgtgctttcctatatccagatctccaacagcccctgttgtaacatccttgtcatcaccatctcacagctcttaccactgtaagctccttggggccagtgactgtgtttttatttctgtattactaaggtgaatatacaaggcaggaatttaatattagctagttcatttgatcctgccaaacctctgtaattaaggaagcagaaaaggtcccatagtctcattcaataggtggctgaggtttagagagttttgtatcctgtccaaggtcttacagctagttagaaacagaaactaaattctcaacttgagtcctgtattctttctactattctccctctcaatccctctctctctttctctctctctctctttctctccctctctctctctcacacacacacacacacacacacatacacgcttacatgtttctaccatcgtgaatgaattctaggtcaagtttatgatgttaaccagatattccaaccactatgtgttgatatgactctaaaaagaaaaagatttctgaaagcattttgcgaggcatttatagaagtaagagatattttcattttatcaccgcaacctccattaaaaattggagactattattcctggagacttcagaattttctttggaaatatctcccaattcaaaaggaagtctgacacagcctcataaaaatctatgtcgtaataggtgctgtgtcactgaaaaccactgaaaagacagggttaagaacacaaagtgagctgcacaccatatatggagaaacccgtttcttaaaactagtgatgaactcatgctctgttctgttttctcaaagctgaagtcggctaggtttgcaaagctgtgggctgagcactcaggcaatcacactctcagaaactgcggcggctctggactgcagcctcccaaggctccatgccagacaaagcatgcgtgtcacacttgctacaatagcctggatggtttcttttgtctccaattattcacacacagcaaatattt

SEQ ID NO: 10073 - DNA, 2300 bp, Homo sapien
cctttcactgagctttattcaaattttgacaatcagagcactgggaagaaataaattccacaactgcctttagccttctggatactttcttttataaaatagaaaccttttccacaccagttctgcagcagtcgctattagatgctcgtggtagaacccatcaatcatctggtcctctgggtactggtgagcatccctggtcttcatacctgtgagtgggctttgtggtgaattactgtaaatatgctaccctcacttttcttggcagttatgtcgatgaaatcaagagtgtgatgttctagttatttttttttatatatatttttaaatgttcaatattcaactattgaaacaaatgtacatctgtgaactagctaaaatcatcttatgtaccactaatatgcccagcacattttgtaaaacagtcctgatttggcctccaagggtatttattgaactaccagcagtatctaggagaccacgaaggaataccacgaaggaatttatgctccagtgcttgccataatttgtctgagaaggaatctgttaaataaaagcttttatcctctaacctttaccttcatcagaccttataaaaggtcaaatggtgattcttaagttttttagtcacaaatcttacttattcagtattagtgcgaagagtagaatactttcaagtaagcctaaacttacatgaaaacaaattacataaatctagctctgagaataggaaattagtgacaagatcaatctgtaagatgttgagcacttatctgaagtaaatgggtaatgagtttcacatcttataaatacaagttagcatgtgttttctcaagagtccaagggttttcattattggactacagctttaatcttctaaatgttattccccaagattaaagagcatctcaagttagatcaccaaagatcaaaagctaaaaccagaagtatttttgtcattgtggtggtggtagtgttactaattgcctagatttttaaagggaaacatttttttcactgggttgtttcgttgaaaaaaatagaagcagaaacttgcccaaagtcacagtggtcaaactggaaattgcaccaaaacttggcatactggttctgaaatccatagttttagcccttatgtatactggttaatttggaaggaagaaatatatacgttctgaagtgaagagtgagtgaaaggaagaattcagtgaatacattgataccttgatattatctgcattgtggctacatgttacttttcttcacaagagtgatataagtgaaataaagaatgattggactgggagaaaaatggctcagaaaactttgcaaaagtacgactgtatgtaaagataagtattcaacattaaatgggaaggaggagagcaagcagtttaatatatagaattttataattttaggcctgcaagggaccttataaaacatgagcaatggaacacttttttccaaactaaatttcgtgcagtggaacttggccgactctgtccttcctctattctaagcaccctactctagcccggctgctctgagttcagtttgttacaaatatggacacgaaagtaccacaggctttgcacagcttaattgaagtttccccttcacaccatggtaaaaaaacatactgggatggaagggtttgtgtctagaacaagaacaagaaataaactcttggtcacttactaatatttcaaaatcacaaagcagaattttgcttggatgtttagtaaaacatccttggaaatttaactgcttgcagcttctacacttcttcattaaatgctgtctggctaataaaaagtgccatgttgcagctttattttattttcattttttggagatagaccctcactgtgtcacccaggctggagtgcagtggtacaatctctgctcactgcaacctccacctcctgggctcaagtgattgtcctgcctcagcctcctgagtagctggggttacgggcgtccaccaccacacccagctagtttttgtatttttagtagagggggtttttgccatgttggccaggctgggcatggtggcatggtaatctcagctacttgggaggctgaggcaggaggatcgcctgaacccgtgagatggaggttgcagtgagctgagatcacaccactgcactctagcatgggtgacagagcaagactctgtctcaaaaaaaaaaaacaaaaaaaaaaacgaaaacagaattctgtttgtttggatgacctgttatacttatttttgatcttgctgaaataagcaaatcttaggaatcttagtctac

SEQ ID NO: 10074 - DNA, 2300 bp, Homo sapien
atttaatttttatacattacttcttataactactagcatcaaattagtatcttgctatattttatctcatattatcacagaggaaaaagtactgtataattatatatacccttcagtatatgattaatagtcattataattaatatttttaaattaatttgtgatttttgttgcaggattcattttttagtaaaagcttttatatcctatatgtaagataactccctattcctgtgatataacttgtgttagattatgggttctggaaggcaagtaacagacttaaaaaaattcacttaacttccaatcatatattgtttttatattgtatattcagttggtggacaacatgagggcttttgagttagggaagggaaagaatcacttaatactgaaataacttattgtaggagcctgatgaatcttttcctttggaaagcagacagttttagtgtggtgtcatctataataggaggtcttgaggacgttagagaatcttagaactcaattattatccatgtttttacacccctttcagtaatgatttggaaaaagatgtaaaaatttcaaaaagggacaggtgaactgtgggctctgcatagtatggtaattaaaaggttgggttttacaaacagactcaatagtgccaagaaaaggatgggtgggttttcgttttcccatctccatcatattctcaatattcctcaaataatagcaatactaagattaaaaatatacacgtaaatgggaagaaaagcctatgtagaaaattttgctataaaataaagggctttaacacaaatattatttctagactattccctccccttaatccctatcagccctctaacacatttgaagctcctaatgaatagtagccccctgaagctgctaggtcaaactgcctgaacttgaagacgggccttccacttattagtgattgagttacttaaaataagaatgataaaaacctgcttcatgaggtgtactcctcactttataactttcacctgctgctatctgttctattttaggaatttatcattttttgaggaaattaaaagaacagagataaaatccctgtcatttataaaactcacaggataaaaacaaaaaacccctctgtcgtgggttcttctgtccatatgtaacaatctgtttcatacctggatctcatatatgaaaacctaaattattgtataagatacacgagagtggatttatcagacaaacgtgtatttcactaatgcaaggaatttaacctatcaaagactttccctatttgctgcagaaaattttagaaatgcaagcaataaaatcaaaatttaaaaaaatcttatatttggcatgtcgaagaactcttatacttccaaaagtgtagttatttgtagttagtgatgaacctctctacacatcttagccctatgtaatgttgggggtagaaaaggagtttagagattttgagaaatcttaggctagttgaaatacttcagaaacgtcaggatgttgaattaccatccctctgacttagagaaataccaacactcgggaagattaccatcagaaacaactttgaaaagtttaattttgtcactgtttttaaaattagaaataatgtaaataaagtactgaaacaaagtagtctcacaataaatagtagctattcctgtcacttgttgcagtggaggcccaatatacattgtattctcatatttgtacttcctcccaacatctagcgcatatttggccaacatataaatatttatcgaaagaatgaatgacatcaatgacaggttggtagcactccgctgtccgatggtccaggttaggccgtgaggccacgaggaaactacggataaaacagtatccaatttgcctataccgcctgctaaactacaagtcccagtacgcaaactccatggtttcagggcatactgggagaaagtctccggctcttcattggccacgtaggagaagctgtggtttgtgtaaaagcgcgggcttaacgcacgtacgcacggagactgcgcagatctcctcgtctgagttccgcggaactcattttgagtgtaggcgttttagccggtagggtttaagaacagtttcatttccggagccaccggaagcagcttgcaaatggcgtctccctcgctggagcggccagaaaaaggcgctggaaaaagtgaatttcgtaaccagaagccgaagccggagaaccaaggtgatgttatgtgggaaccgaagcctggggtttgtgtacgttgagttgcgatgtttttttctttcgttcctcgtggact

SEQ ID NO: 10075 - DNA, 2300 bp, Homo sapien
tctcacctcagcctcctagagtgttggtattacaggtgtgaaccaccatgcctggcccaaaagttgttttttttttttttaagttattttctgtaatgcattttctgtgaatttattgtcttaaaaattggcaaatatggccattttgacatatttgccaaatatgagcatatggcaactatgctcttaatttgttaagtcaccaactgttggtggtaactgttgaaataacaagagcaaagttatcaccaatctacgggatccttacactactgatattttcaataatgcaccgtagtcagacattgtagacttaacctctgagctgctcacaaaattactaaatcattctgaaatacgtaactgcaaattctgggctttaaagtctctagttaaatgggtgattttgaaaattggtggctgttcagacattttcaaatgagaatagaatgcatttgtttcagactgataaactgcagaaggttagataacaccaaacacatttgagtttctcctaagaaaatgacttgggcctccagattacatctcattttttttttttttaccctatcaagtttgtttttccatatgaaatgtctttcccaactacacctgcccttggagactgtgaataacagacttaaaggaagtatcctttccagatgagctgaagaatgtcatcctcttaaaagaatgaacagctggtcatgtagaaattctctggaatgctcacttgtcctacaaaggcaggggagcagaaaacatgtagtttttttgttattggtatacataattgtaaatcttcgagataattttactagaagtccacataattttaataattgcctttctcctgaaaagattgctaataaattaacaatgtgaaggctagaaagctggccaagcataatccggtgggactcaggattgctggctggattgtcccgtttgatcagacattgtttcttagatgaatattcaggacgccctcgtgtataaaagttgtcctttgttctgactaccttggtattaagttcgaatttcttaccatgacacacaaaggattcgattcttgcttagctctctaagctcctctcactttctcttcccctcttgaattctttgctcttgccacacaactagcagatgaactaatctatctgttccaacgtgggcacagtagcagccgtaactcttaccttggcccactctgacttgtccagccctggttgaattcttcgtatccccgtgagggtccgcacgtagttggggctgtttactaaacggatgaacttccctaccgggaggctaggtctcggttatgccttacttcccaggaagcggcttctataggcattgtttaaatgtaggagtaggagggagctgggggtattgcattccccaggtcacagataaatgagattccaaaaccaagatctggctaggccttggaaagagggacctgcgaggccgaccagacgtttggaactgcgccttgcagtgtgggatctcagcaccggatattaccccggtttgtagagagttgagttactgttttaagagacgttgcaaaccgtacgggtcaagaagaaagccgaagacgggttagcgcctgcggtcggggtcgagaaaagcaggcgagatgcgacctgacgtgggtccgcctctctccacccgtggcaagcccgacagtcgcactattgctttaacaatcgccctctttccaagaagagctacttagtgaccgtgagcgaatatgcgtgggaagacacgatgtcctctcggcctctgtgcgctcagttgtttacctaggcgtccgggggaggcacactcgcgggactcgcgggactcggccccggcctcccagctcgcccaggacacgacgctggttctgcgggctctcggagcccagcgcgaatcccccgggctaattcccaagaaccgagaggcagcactgcctggaggctgcccccgcctccgcgcccccgtcctcactttctgaggctgttagcagagagtcccgcgggccggggagaagcgggacgcgggggatggcctcgcagcgccctgtgagcgtcggcagtagtcaggcagccagggctccttgggcgatcgccctgggtagaggagaggagtttccggggctcgggtccgggtcgccttccaggggaacgagcgcggaagcaagtgggcggcgagaggcggagcaagagacgctggagggcgtggacgcagcgggctttggaaaggccccaagttaatgaggcgtgcgccggctgccgagcgcctcttggagctgg

SEQ ID NO: 10076 - DNA, 2300 bp, Homo sapien
ttgtggtatgcatttgttaaatttgtaagacttcttagtgagaaaccactggttttagcttggatgccagtgtttttatacagccttttttttttaaatcattttagcgatttgaaattattaatgcaatttatgaacctacggaagaagaatgtgaatggaaaccagatgaagaagatgagatttcggttagtaccaactttattttggtatgtttttaagatgataaaatcttaggacttgtcagaaatgttagcatttaatgatggagtacaatattatataaccagttgtattttttcattttttaattttacgtctttattacacgtttttctattactttatttttaaaaaacagtcattcaagattgtaatttgcatggcaataagcagcggtttcatgggttctaagtttcttaagtgtccacagcagtttaaaacaccacaagtcttatttccaatttgcagcacctgacttaaagttcgaattcatctgatggagcattaaaactgtcattttctcttgtgaaaagacataattgctatttccaggactgtatattgaacatggttgtacattatttttaattggttagtagaattttactcatgtaatttatatccagaataagaacctctagcatctctgaatggccttcctctcagaacgatgatgattaaatgtctaaaatgtatctggggtgcccccacttgacattaccaaacatgtttccaaataatcttagaaaatatgattctttaaacatatgcataccacatctttaaacataaacataccacacagtgcaccatcacttccttaaccattttccaattgttcacttataacatttgcaattttttattataaatcatattgtgatgaatactttcatccataagttttattgcaaggcttattgtttcttctaatgtcttctaatttcaaagaagtggcttactggttcaaacagtgcacatacgtggttttaaggcttttagtatactttaccaaataatctccagaatagctccaacaactcctaccaacagtatgttattgtgcccatagggtggacttgataacagcaaagcaaattcaaccacagatatattagattctcacccatctcaaaactatcacatcagagaagcaaggagacatattattggtgaggaagccaaattcaaattcttttaaaaaatcactcagctttagatcagtaaaataatcaacaaaaatggtcaccgcaaagtctaccgggtttttcaaaaaataaaaagagagaaagagaaaggccaggcgcagtggctcatgcctgtaatcccagcactttgggaggcctaggtgggccaatcactaggtcaggagttcgagaccagcctggccaacatggtgaaatcccatctctactaaaaatacaaaatattagctgggtgtggaggcgggtgcctctaatcccacctactcgggaggctcaggcaggagaatcacttgaactcgggaagtcgaggttgcagtgagccgagatcgcaccactgcgctccagcccaggcgacagtgtgagactccgtctcaaaaaaaaaaaaaaaaagtaccaaataaccaaaattttttatttgactaaattctgttcatgtatgagcatgacagtctctcctgtttatttgactttggcaataaaaaaataagcagccttgtacagaacagggaaaatgccaagaacgaaggcagtctacagttttactgtagaatacatatatatatatatatatatatatatatatgtaggcctctctccctttggccatatctactgtcagttcaggccattaactacagacaaattttcaaattcacttcttctccaagatcttcgatgctgtcatcatctacttctgtctgtttttcctgaatgacctcaattatgtcatctgtaaagtctccttgaatgataatttcatcctcctctgttactgaggcaccacaggagaatttttgagcaaaaaatctttgtgtgatttaagatcaatttcaaaagttacaaggccacaacccttgtcacatatttctttgctctgggaattttggctatagtaaccttttgtggtaccgtctttgtttttttgttttatttgaccccttccacctctcttctgttttttcttctcctcttcttcccctgctgttccttgaccttgacagattccagcttcttgtttgggtgaattttccacagtaagttttgcatattcatttggaaaattcttctctaatcattgtctacatttagcaa

SEQ ID NO: 10077 - DNA, 2300 bp, Homo sapien
tggcaaagacttagatttacaaactggttcaaaagactatattacaaaggcatgcattattagaaatattttattgtttagtttcttagattggctaggatacactgaaaaaagaagaggaagctggagaaaagggggaaagagcatatgtactggtaatgataacacctaagttataggggttggtgggggggtggtgaaacctaaaaaatccagagccttcatgagcgaagtgccgaaaattgatgaggctctctggtgtgggataaaaaccaccacaaaagctaacttctcaattttgtctcagaaattctgctaccataaagatttatggaaagaaagtgaaagttatttagttcattttaatatgctaattaccttgcatcgtgcacagctttgattaaaatgcaacattcctgaagttcttattgaaattaatgtgtcaaatttatgttcaaactgagcactggtctaccttgtttatgtatagtgggttcttcctgaagatccattattgatgctattatgctccttgtatcattacatcattgttgagaagggtgtacaggaataggctatgagaacaacaaaggaattgtatatgaaaaactaaaatgaatgaataaacagagtcgtctgcagtatagagtgggaaggcaaataatttcaatgaggttctggagggccaaggaaaacattgtatcccctaaaacggaagataaagttgctaaatgtgtggattacaataggggattctaggcagtttgaagtttcaataaatgcaagatttagagaagaggttctcaaactttgtggtcttaggattcctttacactcctttaaaagttgaggaccccaaagaacttttatgtgcattactgatactgatatttatatcagaaattaaaagtgagaaattttaagagtatttcatttaaaaacaataaagcaatcaaatattaacaaaaaataatttttatatgaaaaataactactcccccttgcccccaaatcgagtttttgcaaatctctttaacgtctggtttaaccgcagatgactggattctcctatctgcttctattttcagtctgtttccttatcacatgtcacgtagcctccggaaaaccccactgtacacttgtgagagaatgagaatgcaaaaggcagtcttgacattaatatggaaatagttttgaccttccccatgaaagggtctggggaccctcagaccatactctgagaacaactttttgagttagtattagtcaattcatcatcacttgaaaattagctatgaggttttacaagcctgaggatttaatgtgatttactttttcagaaagatgaaacaacggacgtactgagtgtcctcattataacgcatccagagaatgcacaaatatgccattttcatccgtcaaaagaactgaagccgaactgacggactgtacatcagttacgaggatgtggcggggggttggggggcaaaggatgacgagcaccccctaaaggcgcggagacccgctggcataggagaagcaaaactgtcagaagaggccgccgaagtggtctagaggaaaaaactgtttttcttaggcggggaaggaaaacggttaccgggggccggcgagttgcaggaattaggccttgacagggagcgtccgccgtctaggctgcggcgagcgagggaccaggcgactggcgccagccctgagcgttcccagcacaacgccgaagggggcggggcgggccgggcgccgggcacgcgggccaggccttccccacaactgatggggttgaaatttcctttccggctcagcagggagaaaagatatggtggggtgcttaacagaggaggttagacaccggcgggaaccagaggagcccaagcgcggcgcctgggcctcggggctgcaggagtcctcggtgggggtatggaggtcgccggggaaggaggacggttcagttgctaggcaacccggcctggacccgcctctcgctcgcgttgctgggagactacaaggccgggaggagggcggcgaaagggccctacgtgctgacgctaattgtatatgagcgcgagcggcgggctcttgggtcttttttagcgccatctgctcgcggcgccgcctcctgctcctcccgctgctgctgccgctgccgccctgagtcactgcctgcgcagctccggccgcctggctccccatactagtcgccggtaacggatgggggcctggaagggaagggggaacgtggtgttggctgggcggcctgcgcagatgggagggccggagggatg

SEQ ID NO: 10078 - DNA, 2300 bp, Homo sapien
gcctaaagaggggaggcataaataatccactccttgtttagcatatcatcaagaaataaccataaaaatcggcaaccagcagcccttggggctgctttgcctatggagtaaccattcttttattcctctttcttaataaacttgctttcactttatggactcgtcctgaattctttcttgcatgagatccaagaaccctctcttggggtctggattgggacccttttcctctaacaggtgtaatataaatatctgttgagtgctaactatgccaggcactatgcaaagtgtttagtgaacattctccacctactcaaaacctcttgagatttttattttgtatatgttatctccactggtttttttggcggggattgttttgttttgagacaaggtctcgctctgtcgcccaggctggagtgcagtggtgcaatcttggctcactgcaacctcccttcccgagttcaaattattctcatacctcagcctccagagtagctgggattacaagcatgcaccaccatgcccagctaatttttgtatttttagtagagacgggattttgctatgttggccatgctggtcttgaactctcggcctcctgtgatctcccacctcggcctcccaaagtcctggaattacagccatgagccactgcggcaggcccattgtttttaaagatgagaaaagcagagatcaaagaggttacttggtgaatgccacaggtaaggaaatgacagagcaaatccaggtctgaatccaaagcccatgctctcaagtgcctgtgttttaggccaggcaaggtggctcatgcctgtaatcctaaaactttggaaggccaagttgggaggatcacttgaggccaggaattcaagatcagcctgggcaacacagggagaccctgtctctactaaaagagaaaataaccaggcgtagtgaggcacaaagcgacttgaaggctaagacaggaggatcacgagctcaggaatgcggagctgcagtaagctatgatctcgccactgcactccagcctgggcggcagagtgaaacttcatctcttaaaaaacaaaaaaaatgttataagagacagtattttctgtctttgggttatatacaataatccttggccatgtgttttaaagcatactgttgatcaccgacgtgattaatggatttaaatctgcacagcggctcatgcctgtaatcccaacactctgaaaggccgtggcaggtggatcattcaggtcatgagttcgagaccagcctggtcaacatggtgacatccccatctctactaaaaatacaaatattggcggggcacagtggcgtatgcctgtaatcccagctacttgagaggctgaggcacgggaatcgcttgagcccgggaggcggaggttgcagtcagccgagattgcgccactgcactccagcctgggcgacagagcgggagtccatctcaaaaaatagagacttcgcatcatttctgcttaatatatttgtggtgtctagagttttattgtgatacctgagtctaggaaatgtggtaaagcctctgcagcagacataaagcctgcaattcatggctgtggccaggctctcctcacctgtcctgcatctacaaattatttccgttatggtaaggagagcaactcgtggggaatgtggacaggaacatgcgtgaatccaaggcagaggttttgccccggaaaaagcagcttctggcaggggatgaaagccagcagagttccaaccggggtgccctctccttcacgcaggccccactaccgtgttgacttaggaagaaagtttctcgggagactaagggatttgggggcagcggacgccactggagggagatgaattcacctagggagccggggaggggcttagggttgccgctccaggcacagctgctggaaatcctagtctgttttttctgccttcgcgtacaacgggccagctcaccccacctggcaaagctgcagggcttttccaccaggcggacagaagggcagccctctcgcccaaccaagaagccgtgctaccccggcttcgactcctggcttccgggttttctccccgcctattccgtttccggccgttcccacccctgttttcggtcggcccgggtgttctgcaagctggtcaaaaaggggaagcggcccagatatgttaagttctatggccgctgcagggtctgtgaaggcggcgttgcaggtggccgaggtgctggaagccatcgtgagctgctgcgtggggcccgagggacggcaagttttgtgtacgaagcccactggcga

SEQ ID NO: 10079 - DNA, 2300 bp, Homo sapien
aaaatttgagtcagtatttttttactgcttgtgcattcaatagtactgtaactatacaagcaatttttgttgggttttttgttttggttttacattatatgtaaatataagtgaaaagtaaaatgtttaacattttctcgtttaaaagccattcctagggagtagtgactgtgttaatcaaatatcagggaaacttaaactgggaaaagaagtcctagctactttggaaggtcattgggtaagtattttgtatatgagctttacaaaaagaattttattctgtgggaaaaaaaaaatcacatttaaaatttaaaacttattccgttgctgaaaacatcactatttaacataagcttcatcttaatagcagatattttggtggtgttctgttatcaacagtagttaattttgtgtaatattttatttccaaaacttaaaatcagtagaaatagctaacacttatatatgacttactgcattatttaagaatgttactcatattaactgatttaatatttataacatataacgctatgaggtgagtatataggtgccatgcccattttattattgtttattattgtccccattttacagaagaggacactgaggcacagagagttcacataatttgctcaaagtaggtagtggaacaagaattaaagcccaggaaccctggccccaggactgtgcttttatgcacagcactctactcacatagaagaaagaggcatagttccaattagagttatattcctttcagtggaacatggaaaggatatagtggtgtgtgagagcaatggcttttatttacttctctgctaacctaaattcatatttatgtaattttgttaagagacgcttaaatgaataaaaagaatcatggtactgcatggatataccatactatgagcactgagtatatgctcctttctgcatgcagtaagcagaaaatgttgagaaatatgagaaagtgaagttagggactttgttaagtggccacatacactctgaaaattttttttaattgccttaaatctgagagtcttctggaaaaaagataaagcagcagtcatttttaaaaaatgaaatttctgtctgggtggggtggctcacacctataattccagcactttgggaagctcaggagtttgagatcagcctgggtgacataacaagacctcttctctactaaacataaaaataaaaaaattagatgggcatgatggcacatgcctgtcccagctactcaggaagctaaggcaggaagattgcttgagcctgggaggtggaagctgcagtgagccatgattgtgctactgccctccagcctgggtgagaaagcaagaccctgtctcagacagatagataagatagagatgagagtgagagatgacagagagagagagaaggagaaggatggttaaacaggtagataaattagataggtaaaatagattagatagataaggtagatagcaccgctgcactccagcctacacaagagagcaagaccgtccatgtcttagatagaaagattattcgatagagatagacctcaaatttttaatgctagtaaaggctctttcagagggatgtgtgtgtgtgtatgtttgagtatattgaatccatggatagtcaacagcatctcattgtagctgcaacaaatactatgctctacttggacagtttggagatggttattgaggctttgcatgtaatgtttgaaatttattaagtaaaacttatgaaatttcacaaactggatattcaaccaaattctttttaattaactagtattacgtagtcaatcttaatgtttttataaaaatgataagaaacttggagtttttggaaaagtgctagttatatttgttttaaaaatgcttttaactggaggattaaccagaagaaattatcaccgtcatattactatactatataattgccttctaagtataattctttacattaattttgaatttttttaaatataggatagtgaagtttttattactgataaaaagactgataattcagaggttttctggaatccaacacctgacattaagcaatggagattaataaggcacactgtaaaatttgaagaacagggagattttgaatcagagaagtaagtatactgttttacagctaacttcatgaggatcagagagtagtttttcaattccttaatgatatggtcattttgtcaccttctgtcatatcttaattcagcaaaatagtttatcatttgtggaagtgacagtattctgtttttgtgtatatgaatgtcaaat

SEQ ID NO: 10080 - DNA, 2300 bp, Homo sapien
tgatcatttagacatgtattatgattgaagtcatttaattttatttaatgtaaattttatttactttgaaattttataaggacggttcccagatggtagagttaaacccattttgactagtttaaactattttgaatcctttgtatttgtaatttgaaattgcttttttttttttttaccagggactgaagaaaccttataatcctatacttggcgagactttccgttgtttatggattcatcccagaacaaacagcaaaactttttatattgctgaacaggtattagaaatgcatgtatggaaacaaaactgatctggaagttattggaatatttttatagaaaatatttacccagtaaactcaatattatttagcctttcttatttctgaacatttggtaaacatttaaccttttaatattaaatactactaaagtactactaaatatattcataggtactattattacagtcatggaatcctttgaccaaaaataaatctttatttttcctttgctatgccccctgccctttttttaatttttttttttggctgagctcatatttcctaaacaacttttgatcatgctcaaaattattcagtggtgtggcattcatttgtctggcattcaaagtcctttatatcttttccaaatttatctcaaattaatacctttctagttctccacagtagtcaaacctgtgcagttcatgactaggtaacctgatctagcactttctttcctcatttttaaatttaattctcacactccagtatttcttcttagctattctttatctaaacaaaccctgacccgcttattcttcatgatgcacatgactgcagctcccagtgatttttcccttctcaaacttctgtattgttttttgtgattatccattaagctcttattttaacatttgtatcgtttacctttttacagaatatttattttcctaattgaattgttagcttctttaattccctcttctcccctatgatacctctctttttgttgtatacagacagaaaatattttaatttttaaactttcattaatttgaactcatatacatccataatcatgattttcagtcttctgtctgcataaacttgaggaatacgacattctctttcaataacagtggctccttattatggtaattctcactttgagtgtaaggagaatgaaaagaccatgtgttctttgaaaaaccttcttctcctagaggttttgataaccccctcaagtcaaaaccacttatctatattaattttttaaaactcaatgatttaattcttcatgaaattaagaagcttgaaatgctgattttagtttgtctcatgtaagagaacattagaagtaaatatattgttgaaggcattagattattaaataacatgttttttgtttttgtttcctatagtcattcagtaatccatatgaagactaatcactgtattagttatccattgctgtctaaaaaattagtgccaaaactgagttaaagcagtatttattatcttatatgatgaggtacaggaatctgagagctgcttagttgggtggttcctgctcaggatttctaatgagcttgcagtcaaactgtcagccagctttgcagtcatctacaggcttgactgggctggaagattcacgtccaggttcatcacctggctgttgacagaagagctcagttcctcaccacgtagccctctctgtagggtttttcacaatctcaaagctggcttttcagaactaatgattgagagataggcagagagacagcccccagcatggaaggtgctttgtaacctaatctcagaaattacatagtgtcacttccacacaaaccaacttcagtacaatataagaggggcctatgtgactaccaggagggtgggtctcattaggagacaggaggctggttactataaccatcaatatttaatttttactacttattaaatgttttttcttactcattataagacttgaacttttgataatggcacaataatatgcttatctttttatattttatataaacatgtttttatattttatatatgcatgtttttcttatgtttaataggtgtcccatcatccaccaatatctgccttttatgttagtaatcgaaaagatggattttgccttagcggtagtatcctggctaagtctaagttttatggtgagttttcccgtcccaacttgcaccctctcctgggaggtattattttctggtgagcttttatttaggcagtgtcatgggctattttcaacaaggagtttgtca

SEQ ID NO: 10081 - DNA, 2300 bp, Homo sapien
atgtaattgatagtttggctgggtatggaattctaaattgaaacttgttttctttcatattttgaagattttggttattttttggcctgcttccagtattgttgttgacgtaaatagcctatctgattcatgatccagaggaacttggtgctgtgaattatgtgcaaaagggttatttggtgtaaataaggttgactttcagtttttattactgctgttgtgatttggctttcttggatctgcaagaccatgactacttgttcatctcgagctttgcagtgtcaaatttatgttgttaatatatcctctcctggatatgtacttttgggatatatatagatatttgtttatttttttaaaataccccttttcttgattttacttgagttttaggagggaacgcatttgttcagtatcttcattttgccattttaacctagactcttttaagactttgtgtatcatctgatttaatcctcataacaatcctataatatcagtactactattagcattgtatacgtgagaaaacaaagactcagagaaattaaactgtttaagtatttctaggaaagataaaacagagatttgaatgcagtttaatttcaaatcctgcttaactattatactagcataatgctgtttgtgatgttctttatgcctttaaaggcaagcaccattacatgaattataattatttgttgtctacagttaataataatgtacattttatgatatggagaaaagcaaaaaataataataaccaaaccaacccctaaaacccacaaacttgttgcagttatgggtattagtggtaaacttattctccattaattgattttgaaatgcctttgcccaagaaagaatatgtcacatacaagaaattgagttttgcctggtgcggtggctcacacctacaatcctagcactttgggataccaaggtgggtggatcacctgaggtcaggagtttgagaccagtctgcccaacatggcgaaaccccatctctactaaaaatacaaaaattagccaggcatggtggcaggtgcctgtagttccagctacttgggaggctgaggcaggagaatcacttgaacccgagaggtagaggtggcagcgagctgagattttgccactgcactctagcctgggcgacagtgagactccatctcaaaaaaaacccaaaaaacaaaaaagaaattgagttttgctttttcatgtgttctttctagtaaggacaaagtcttagattatatgagatgttgtgcatgaatagagaaccagcgttgaagtgaatgcataataaggaaggatactgagatcttatggtaagatacctataaaaatgagccactaataaattttaacctagatggttattgtccagctgagtgggtgtattttcagattgaaagaaagaattataaccaaaaaaatcaatctacggcatatatagagagcatctgactagagcttttaaatctgaattaaggtagggtaaggtatatggattttagtataattgggagagaattctttggaattttaaagattaggtataaacagatggtacctgttagatttaatgacgtggagtcaatactggtcacttagttttaaacatagtacatttgtcactgtgataataaagttgcttttaaaaaaaattttttttaagcaggaaagactcattgatagactgaacagtttagatgtaatgaaactgttcaaattaaattttgaacagtttaaatgtaattaagaggaacagtagcagctcatattttcttcaaggaacatgttagagcatacagcattatggtgtcgttttaatctcctctgttgattggtttgcgctaacactgtcttaatgactcatatatccctgctggaggcaaaacttaaatgtttattctctgctttaactgttggaatccatcaacgttgtgcttgaaagagtatctttccttatgaatgtttaatcatggctgaggcaagctgtagattagatataaatctagaagcttcagggaagataaaaagcattatgtttatatccatctttgaagtaagtaaaagctgggaaggaaggagtcggaagaggtgggaagtgtggccggatagtacagaaacataatggatatgataaaaggattgcatttctgagaagagaaaatgactttattgcttcatcttgaattgctaagtattgatcttgttttgttttcctaaagcagcaattcagtgcagggtggtttgataaaaaggtaaaacattagtagaatagcctttcatgttta

SEQ ID NO: 10082 - DNA, 2300 bp, Homo sapien
tgtaatataatttaaggaagcttctagccatcaacatttaagttgtttctagtttttttcatcagatttattactgtgttggaattgtttatatatttctgggcatttgtatatctgtgggaaaatttctagtcttgaaattgctggattaaaacatacatatttttaattgtccttcaaaaaattgtcctgatttatattctcataacaaaagtacatgagaatatctgtttccccacattctctcccatgatggattttagcatactttttagtttttaccaatgtaataatgaaaaactaatttatttcattagttgtaagtagatttatgcatcctttcaaattttaggcagtctcatgtttaaccttgctcttactatttttcttcacttggaatatttttttcttctttcatttttctctgaacctttaccattcttcaagcccatgtcaattttttttttaattattgaatttccaaataacctcagactaaaatgatttttcccttctaacaaactcaatgctttatttctacttgtcacagttttataccagtcctaataaatatcattttcttattttaggatttgcagatttacagaatggctgcacattaatggaaagagaagcataaacctatcttctttcattatggagggaggtttggcagatggagaacctgatcgaacttcggtgagtagttcatatatgacataggttctatcatctgtaactgtgaagtgtttgatgtaagctagggttttgtttttaaaatatattaacaacaaacttttaaaaagtatttttaaaataatgctttaactccttgagaattacagatactttaaatgatatgaaaattacagatagctagctaggcatggtggctcacacctgtaatcctagaactttgggaggccgagatgggtggattacctgagctcaggagttcaagaccagcctgggcaacaatggcgaaaccctgtctctattaaaaatacaaaaattagccaggtgtggtggcacatgcctgtagtcccagttacttgggaggctgaggcacgagaattgcttgaacttgggaggtggaggttgcagtaagccaagatagcgcctctgcactccagcctgggcgacaaagtcagactcggtctctaaaaaaaaaaaaaaaaaaaaaaaaatgaaaattgcaaatagcttaaagtttgttggagcacaccagttttctgatatttctgctccatcctcctcctcttattttatctatccttccagccatatagtgaaagacatactgatagaataatttgttttctcccaaaacctctttgtcttaagtgaaatcaagagaatgttaacatttgaggaaattaaatgcctccaaatctcaaatcacatgcagctatgagtaatagtgggaatgaaacagttaaaataagagcaattgccacatatattctttttataaaaatataaagatttaataaacatttctaccctgtgatcataattgaattctgaaattaaacaagtagtgggtagcaggaaaagtataccttacctaatacattaaaacaaaatcactagtaggatggactaaatgatgatttgtcatttttttctcactgtacaaaaagattttactccagaataatttcattttcaattctcttgttgcattttgagtgactccattatatattgatgtatagactcttagaaatatttctgttacctaaagtaaaggtgcccccttcagtaaaatgtagtcagctggtagctttatcattagttaggtggtagattctttaacaaatttacattgttggaataaggtagagcccaacttttatgtcttttatattgctgtggaattgagagtcactattagattgcggtgtttgtaaattttagtttagtgaatgtcctttgttcaggctccagtgtaggaacagtctaatgattgatagcaaaatgcagttttgctgactaatattaacttggtcccagcctttcttgaattcctggttcagtcttgtttggggttcttaaatgatcaaaaaaagttaaactttaaaataaattgttagtagagaagaaaatgggtgtggaaattcttggcttatgaagaaggctgttgtcacattgatttaaatgaaaaacggatggtaagttactttatttttactataatttcagaagaaaagttaatattaagccttgtctgtagaacttaatgtttattttatgataaactttacctttttttatatctaatggacttagattctttc

SEQ ID NO: 10083 - DNA, 2300 bp, Homo sapien
agatgaaaacaacattaatctttttgtacatctccaccagaacttttgggtgaccaagtgcattgtcagtgagtggtaatattttgaaaggaatattgtttcttagcagtagtctcaacagtgagcttaaaattttagtaaaccatgctgtaaacagatgtgctatcatacaggctttgttgttttatttatagtgcacaggcagagtagttacagcataattcttgaaagggccctagaatttttggaatggtaaatgaacattggcttcaacttcaaaccaccagctgcattagcccctaacaagagagtcagtttgtcctttgcagctttgaagtctggcattgacttctcctctctagatatgaaagtccttaatggcatcttctaatagaaggctatttcatctatattgaaaacctgttgtttagtgtagccatgttcatcaatgatcttagctagatcttttggataacttactgcagtttctccaagtagcacttgctacttcaccttgcattttgatgttatagagatggcttctttccttaaacctcatgaaccaacctctgctggcttgaaacttctcttctgcagctttctcacctctctcagcctgtatagaattgaagagagttagggccttgcctatataattagcctgatcttctatccagaccactcaaacttgctgtatatcagcaataaggctgttttgctttcttatttgtgtgttcattggaataggacttttaatttcttccaagaacttttactttgcattcacaacatggctgtttggtgtaagaggccatgcttctggcttttgacatgccttcctcactaagcttaatcatttttagcttttgatttaaagtgaaatatgtgggtcttccttttacttgaacacttagaggcctttgtagtgttattaattggactaatttcaatattattgtgactgatggaatagagaagagccgggagaaagagaaaatgggagaatggcagatgggtggaacagtcaaaacctcctacatttatcagttcagttacttgttttatatggctgcagtttgtggtgccccaaaatgattacaatagtaatatcaaggattattgatcacagattgctgaacagatactttaatgaaaagggttgaaatatttgagagttaccaaactatgacacagagacacaaagtgagcacatgctgttggaaaagtaccgatagacttacttgctgcaaggctgtcaccaaccttcattttgtaaaaaaggcagtatctctttgtgcagtaaagcgaaacacaataaaacaaggcatgcctgtagatatacatattcatggtaaaaatggaaatatacagaagcaaagagtatcttatatatataaaatgttccatcactcacatttcccaccttatgtgttgtgatcctctttccagtttagtatatatagatctacttcattttttaaaattgctgcatgatattctattgtatgtctgtaatataatttaaggaagcttctagccatcaacatttaagttgtttctagtttttttcatcagatttattactgtgttggaattgtttatatatttctgggcatttgtatatctgtgggaaaatttctagtcttgaaattgctggattaaaacatacatatttttaattgtccttcaaaaaattgtcctgatttatattctcataacaaaagtacatgagaatatctgtttccccacattctctcccatgatggattttagcatactttttagtttttaccaatgtaataatgaaaaactaatttatttcattagttgtaagtagatttatgcatcctttcaaattttaggcagtctcatgtttaaccttgctcttactatttttcttcacttggaatatttttttcttctttcatttttctctgaacctttaccattcttcaagcccatgtcaattttttttttaattattgaatttccaaataacctcagactaaaatgatttttcccttctaacaaactcaatgctttatttctacttgtcacagttttataccagtcctaataaatatcattttcttattttaggatttgcagatttacagaatggctgcacattaatggaaagagaagcataaacctatcttctttcattatggagggaggtttggcagatggagaacctgatcgaacttcggtgagtagttcatatatgacataggttctatcatctgtaactgtgaagtgtttgatgtaagctagggttttgtttttaaaatatattaaca

SEQ ID NO: 10084 - DNA, 2300 bp, Homo sapien
agatggtgtattttgcatattatctatgctctaggaacattcttttccaaatctatttgattgcaactcacagtaagaaattgtttaaatcacaacataggacatactctcaccttccaccatatttgaaacaaaaagtttcaggaagcaatttttgcccttactagacattatgcactctggtattttatattgtattacatcctagcctatttcatataaaaatgaaattgatttttgagttgcaggttgaaaaacatgcctctagaaaacaggagacaagttaatctgttaacaaactccaaagttactagctttgctgaaataatgtcacagaataataaacttccttcacatttatttgtactacagtctctcaggcttcagaacagaacctggtagaatcttttcctctttggaacaccagttcatgacaatatctcagagattctaagactcgttgtttcccagttcatgacaatatctcagagattctaagactcgttgtttcccagttcatgacaatatctcagagattctaagactcgttgtttctgacatgtttacatctctgaattcaagatgtgtctcaggccgggcgcggtggctcatgcctgtaatcccagcattttgggaggtcgaggcgggtgaatcatttgaggtcacgagttcaacaccagccttgccaaaatggtgaaacctcctctctactaaaaatacaaaaattagctgggcatggtggcgcatgcctgtaatctcagctccttgggaggctaagggaggagaatcgcttgaaccgggaggcggaaattgcagtgggccgagattgcgcctctgcactccagtctgggagacagagtgagaccctgtctcaaaaaaaaaaggaaaaagatgtggcttaaaggtgccttacatatcagcggtatggcatagtttcattggcagcctttgttttctttcttgggtaacataaaacaatgtaagtctatgatttttttagagctgctatgaaatatattaataataattatataggccaaactctattgcttattcatttcaatgtatccagcttatcagaatgccttctgatttcttgttaagaaaatgtaatgagatgagaatagcttaagaaaaaaatccttagttctgggctacaagggaaaatgagttatgaccccaatttaattattacagaaagctttctcatttgccttcattgtgatcagggtttgagtatgatctttattctacctcccttacttctgtatagttaggatttcattaggcggctagagggttcttcggatcatggctaaaaaagaaagcaaaaggttaagtcctagagttaaggaattaggaaaaaaaaattaaggcattagaaaaaaaatcaagaattaggctttattttaaaaaatggaacaaactgtcaaattcctgcgtacccgtttaaactgtcaccaacctaacacactgtaaaacttaatgactgtaaaactggcagcaggatcctgaacataacaaggaacaaaaataagtttgctaggctgttttcatcccagcatgattgaaatacaccgtttcctcaaaaaaaaaaaaacctctaatgaggaaagcagtaaattaaatgccacggttaatgtgccactagaaataggaacaagtagtttagttaccgaatgcttcttaggccatacactctacaccacgatgcgttcttttttctgtttcgctaaagctttcaccaagcctaaggctggagaggggtcctaactgagccctgaccagaccagggagccctactgtgcaatctcctcaggttaggaagggcccagtatgaccggcccagaaggcctggccgatcaacaggcgctgggccgacggtggtgggctcgcttcctgaggctgcccttgggcatgcggaaggggactggctggcgataacaccctggcgaagcaaggtggacagtgactcccgcccggttcgagcccgcctagcaggggaagcaactccaccaccgcctccgcgcaccgtcacgtgacgggaagagggcgtggccgaagcccgtgatccggggggcgggcggggcagggggagggcactagaatgtgaaggatcttcgcggttctgggtgcccagaaaggcggcgacgcggcggatgacaacattaggccgcgacgcgctcctggccaggcggcggctgtagtgttagctttggacgccgcagtagccgctgccggtagcaagccgactgagggaaggtgggggtccgcccgggctggtggacctcggggccgaa

SEQ ID NO: 10085 - DNA, 2300 bp, Homo sapien
gttttccatgcctagtttctttacactctcacttcattcaatgctttattaatatttatgccacttaactttttcagtcggtgtcctttatttactctaatcttctatttctagtcaatgcaagacataaaggtaaggaagggcaagattcaaaattgagatttttggccgggcgcagtggctcacgcctgtaatcccaagattttgggaggccgaggtgggtggatcacgaggtcaggagttcgagaccagcctgaccaacatggtgaaaccccatccctactaaaaatacaaaaattagcagggcatggtggcgcgcccttaatcccagctactcaggaggctgaggcaggagaatcgcttgaatctgggaggcagaggttgcagtgacctgagatctcgccactgcactccagcctgggccgcagagcaagaaagactccgtctcaaaaaaaaaaaaaaaaaaaaaattgagatttttggctgggtgcggtggctcacgcctgtaatcctagcaatttaggaggcagacgcgggtggatcacctgaggccggcagttccagaccatcctgaccaacatggagaaaccctgtctctactaaaaatacaaaattagccgggcatggtggcgcatgtctgtaatcccagctacttgggaggctgaggcaggagaatcgcttgaacctgggaggtggtggttgcagtgagccgagatcgagccattgcactccagcctgggcatgagtgaaactcagtctcaaaaaaaaaaaaaaaattgagatttttgagtgaaaatgacttatgtccatgttaacatatgactgaaaacaattcgatgctccaagggccgaccctgagactatctagctgtaaaagatgactcctagtttgggccaggacgaacagaatgaaaatcagctcggactgaaatgagaaaaagtagttgtgctgggaggacagatacagaaaaagccagcagcaaagttaactgagaaacttctttctcccacagccgtgcagtagctatgacacgccatattcacccctctttgagtaactgctgctcttactagtgttgctactttattactggaggtacctaattactaaattgctgtatcctcaagacagcatccaatccctcgtaaatcccagcttttcttcatgccgccacggaaacggcgtcccatgcagaactgattctggctctccttagaccctcctcagactcctttggcgggaaactaatcttacaaaggaggcttcctctttccttttccagtggcattccaagcttcctttggagtgccctccctcctgatttacaaattggcctgacgttatcggagtacaggctttttcctggtggtttctggcctaacaggagacagattagtaagtaccaggatctctaataggtcaactttcatgatctctgctaaattctcagctgtttagacttacaatttttaacagctaaaaggaaagacaaatgctatctaaaactgtcccatcagcccatttacagggagcacctcccccataccgccctaaaatcctttaaaaaatggctttagtcattttatctgccttgcatttaagcgaattcagtttaagtggcttcagttctgaattcctggattatatcgaaatgttgcagatggcggtgtgtgggctttgagctcgtaaattttttgtgtggtactaattcaagacgattgagagcaggttgggatcattttaaaaagagttctcggcagggtgtggtgactcaagcctgtaatcccagcactttgggaggccgaggcgggcggatcgcttaaggtcaggagttcgagactagcctggccaacatggtgaaaacccgtctctactaaaaatacaaaaattagccgggcgtggtggcgtgcacctgtaattccagctactcgggaggctgaggcaggagaatcgcttgaaccgggaggcagaggttgcagtgagctgagatcgcgccattgcactcccgcctgggcggcaagagcaaaactctgtctcattaaaaaaaaaaaaaaaaaaaaaaaaaaaaaaaaaagggttctctagtaggaagtcccgagttgtatccatgtttttccgggcgtcccccggagggacaggttgcgggtgaccttttcaagtgtggaggaaagggaagctgcttttgtcttcaggaatgatgcaggtctcgactcaagcctgacgggcccaaacctccctggagctggctgacgactctgcccgagttcctgaagaggggtcccgggggtcccggagcgga

SEQ ID NO: 10086 - DNA, 2300 bp, Homo sapien
caatttaggaggcagacgcgggtggatcacctgaggccggcagttccagaccatcctgaccaacatggagaaaccctgtctctactaaaaatacaaaattagccgggcatggtggcgcatgtctgtaatcccagctacttgggaggctgaggcaggagaatcgcttgaacctgggaggtggtggttgcagtgagccgagatcgagccattgcactccagcctgggcatgagtgaaactcagtctcaaaaaaaaaaaaaaaattgagatttttgagtgaaaatgacttatgtccatgttaacatatgactgaaaacaattcgatgctccaagggccgaccctgagactatctagctgtaaaagatgactcctagtttgggccaggacgaacagaatgaaaatcagctcggactgaaatgagaaaaagtagttgtgctgggaggacagatacagaaaaagccagcagcaaagttaactgagaaacttctttctcccacagccgtgcagtagctatgacacgccatattcacccctctttgagtaactgctgctcttactagtgttgctactttattactggaggtacctaattactaaattgctgtatcctcaagacagcatccaatccctcgtaaatcccagcttttcttcatgccgccacggaaacggcgtcccatgcagaactgattctggctctccttagaccctcctcagactcctttggcgggaaactaatcttacaaaggaggcttcctctttccttttccagtggcattccaagcttcctttggagtgccctccctcctgatttacaaattggcctgacgttatcggagtacaggctttttcctggtggtttctggcctaacaggagacagattagtaagtaccaggatctctaataggtcaactttcatgatctctgctaaattctcagctgtttagacttacaatttttaacagctaaaaggaaagacaaatgctatctaaaactgtcccatcagcccatttacagggagcacctcccccataccgccctaaaatcctttaaaaaatggctttagtcattttatctgccttgcatttaagcgaattcagtttaagtggcttcagttctgaattcctggattatatcgaaatgttgcagatggcggtgtgtgggctttgagctcgtaaattttttgtgtggtactaattcaagacgattgagagcaggttgggatcattttaaaaagagttctcggcagggtgtggtgactcaagcctgtaatcccagcactttgggaggccgaggcgggcggatcgcttaaggtcaggagttcgagactagcctggccaacatggtgaaaacccgtctctactaaaaatacaaaaattagccgggcgtggtggcgtgcacctgtaattccagctactcgggaggctgaggcaggagaatcgcttgaaccgggaggcagaggttgcagtgagctgagatcgcgccattgcactcccgcctgggcggcaagagcaaaactctgtctcattaaaaaaaaaaaaaaaaaaaaaaaaaaaaaaaaaagggttctctagtaggaagtcccgagttgtatccatgtttttccgggcgtcccccggagggacaggttgcgggtgaccttttcaagtgtggaggaaagggaagctgcttttgtcttcaggaatgatgcaggtctcgactcaagcctgacgggcccaaacctccctggagctggctgacgactctgcccgagttcctgaagaggggtcccgggggtcccggagcggaagtgggagcgcgtgggcgtgggctcctcggctgcctggggctccagacttgtgctgcgtgcggctccggagctctgttctcgctcctgagcagctgctaggtttcccaagcgactgtctcaaccgcccggccgcctcccccgggcagccagagcttcacatctacctccagccgggacccgcccccgagccgcggggcccacgcccagagccctccgccgtccccagcgcagtgcagcagagcgcgatccagtctggggccgggccgcgcttccgcgcacgcgcggagaaacccgcgccctccgaggggggaggggacagagggggcgtcacgggggcaggagaagaaggaggaggaggcccgcgtcgcctccggcggggctcgcgctcgccccgcgctcgccctccgcctcgcccgagccccgggagggtgaaacgctttctcccagcatgcagcgggaggagggatttaacaccaagatggcggacggcccggatgagtacgataccgaagcg

SEQ ID NO: 10087 - DNA, 2300 bp, Homo sapien
cttttgcaccactctgtctaaaaactcttaaataatttcttcatgttcataactaaaagagtcaacagtttaaatagatgtttaaagaaaataaatattttttaaatgttgataaatacaaatacagatttgttcaaaatcacacgttgtatatcatctgcagactcagtgtgaagtacacggagacaaacacatacagggacagacagcagaaacacttttaggtcagaaacaagcccaatttcttttttgttttgttttgtttttttgagacggagtctccctctgtcactcaggctggagtgcattgacgtgatctccactcactgcaacctccacctctcaggttcaagtgattctcctgcctcagcctccaagtagctgggattacagacatgtgccaccacgcccggccaacaagcccaatttcaaatgataagacatggctatggaatttagggacaacatgagcttgacggaaagcaaacagctcaggtttgggaggccccttccacaaagaggcattgagaagaactcagggtaggagagaaagggcagtggtttgctgcagtgagactcactgatacagtttcattcagtagaagcactaggcaaacttatacaagaaaaaataaacattgtaagcagctgagctaaagcgaatgtagaatctgagggactgaattttcctgttggcccgtgagtcaagtcacttacactagctgatatcactgaaataaggattgcccatatttagaaaagctcacagcaggcaagaatgctttccagactcctgccacagtatcaggagatgtcaatcaccactatgtgtttttggacagtacttggtggacagagaacaaggcagctataatgagtttatcctggattggccccagcatataaaataaaacaataataatattataagtcggttctgtacgttgtcatgcggatatgtgctccctgccctctccccaagagggcatttggcaatgtccagagactttttgattgtcacaacgtcgggggcaggttgcaactggcatctagtgggtggaggcctcctacaatgcacaggacagccccctacaataaagaattatccagcccaagatgtcaatggtgtggaggatgagaaactctggaccagaggaggcaatagcatttatggcatgagggggttttggtcactgacttttttgaactccccactccgcaagtatcagttctccgggatcattgcttctggcaggagaggtcatgaggaggcctagaatatgaaccagatagagattgcattgtttattttccttttcatctaaaacaataaatcatcctgtagcttaggcattaggtcccttcggatgtcacggtatccttgtgcttttctgacatcaacacatataaatacagggcctgtggcgcccggggtttctgcctgggtttaggtttcttccccctcagcatcgcgtgctgtgccctggtggaggggaagagcgaaacactttgggaatggggcgttttcgtaacgtcatttatttagtctagatgaattttgctctttaagaataagaagttgtggattcccagaagctggaaatcggacgagagaatatgcgttaactagggaagttaatcacgttgagtttactgacaaggacaaggcaagggggaggtggcggaaagccccgtttggctgactttctactgctggagcctcccggcccatgactgtctccgcgaagagggggatcggcgctcgcggtggacaggtccgacgcagggcggcgggggccactttccagcgggaccgtcccgccgccgggcctccctggaggggaaggaagtccctctccaagtcccagtggcttttggaactgccgggtccctttgggagggagcggtcccgggacgtgggaagatgccgggcgggcgggaagctgcaggaagaggcgggcctcctgccttttgtctcctggtggctagcccggagcgggcagagggcagcccgcccgctacacgccccagcccggcaagcggctccgggaatccggcgggcggggctgggaggagggcggggcggacacaggccgcgcccaccgagcgctctttaaaaggcaccggcgcgcgcttcgcctgggatctcggactccctggaccctccctccagcccagcctcgctagctccgcctgcggtacgtgctcccgcctccgactcaagtgagtaggggcggtggggcggttccgcggcgccgccaaccccggggcgggagttgcagggggtttccaccgcctcc

SEQ ID NO: 10088 - DNA, 2300 bp, Homo sapien
aaagaggttaggtgttggaggcaagtaggtcaagttggcaaaaagctttgaaagccagagaagagttggattcatcagggaaaccataaagagctattggaggttcactgatgaagatcatcctggctactttttgcaggtgggattaggagtagagaaagacaggccacagaacagagcatttgtagtcgttctggtctgctgtagggcagagctgagctgtgctcaccagaggtggaaagaaagggaaaccagtgtgagacagtgagttggcagggctcgctaaaggagacaggcatcagaaagaatgtctgcatgtcaggtgatagtgatgtcattggtggagatggagaagttgaaggtggatggctgggtggagggatggtgggtgatatacccagggtgggcatgttcagtttcacagagctgagcaatacccattactcaaccagaggcagctgattggagagatgactcatctctgcggcccagggtactgcattttattctcagcagcgcagtaggcagtgagatggtaggcaaaacaggtcttccatgattccatcagaaagacggaaagaaatcctggtcctctgtttactgttttttttgttgtgtgtttttattttgttttgttttgttttctgctttttgctttttctttttggagacagagtctcactctgttgcgcaggctggggtgcagtggcatgatctcagctcactgcaacctccgcctcccgggttcaagcgattcttgtgcctcagcctccagagtagctgcgattacaggcgtgtgccaccatgcccagctaatttttgtatttttagtagacacggggtttcgccatgttagccaggctggtcttgaactcctgacttcaggttatccacctgtcttagcctcccaaagtgctgggattacaggcgtgagccaccacgcctggccctctgttcctatttcttaaaggatcgttcttctctattcctaaaaatatactaagaacataaacatggttttaaatatttggaaatttttccaaacaaaaggcccaaacattgtttatatcttatttatttcattttcttattttagagacagggtcacccaggctggagtgcagtggcgtgatcgtagctcactgcagcctcaaactcctgggctcgagcaatcctcctaggccccccacaggaggcatgagccaccctgctggcctataaacttgtacatttatgggacttaattttgattgtgtgctgcctaaaattttgttaataacaccgagcagaatgggacaagaatgacagaaaataataatttagaagataagtttgtttcctcactgtccacttcatttctttcatactggatttgtgaaatgagacaaatgagattaatctttttttaaatcaaagtccagtctctgttactctcccagcgtctctcacagtcactgagaacatgggttttgccatcaaacagatgtgggcatggggcccagcttctcacttcagagctggctcacccgaggcagggtgatcaacctctgcgcttcagtcttcctcgctagtaaactggggaaatgagagtagctattattataataattgcataaaattgttatactattaatgctaattataatagtatgtacatgcctggcaagggtgtaagtgcttgataattgataactatcagatgtggaagagatgaaggaggaatgaatgttcactctcacctgagattccaatggctcttcccacttcggctctcccaccccatcctaaccatttatccaggccatacctgggcgtctaactctgggatgagctaacacgtgctcagcaagtgcgctttcgtatctgcctgaggagtattatctcattcttgatttggcatggctgtctttgggaaagtaaagggtcaggagttggtagaatgtgctaacttcgttacgtttcttttttattataggggaaaagcctttgccagtaagagagtggtgcctccatcaagcagcttggaccctgttgctcctttccctgtcctctctgttgacccagaatattgtgttaatcctttagcccacccagtattttctgttgctcagacggacctgcaggcattctccatgcagaacggtctgaatggacaagtggatgtctcacttgcttctgcagcctctgctgtggagagcctgaagccagcactccttgctggccagcctctagtgtatgtgccctctgcctcactgttcatgctgtatggaagtctgcaggagggaccagcgtcagggtca

SEQ ID NO: 10089 - DNA, 2300 bp, Homo sapien
aggtgggtagatgcagcattctgggccgagtacttactgtagtatgagaaatcgccacttccactgactcctctccttcctcttatactaggaccgaatgttgccatggctagcatgcagcttctgctgatccaaggagcaagagttgccttgcctacacaaactccagtttctcccaatattttacctcttcacacgttgctcatttataggaaaacacttactgtaaccccctgctcaaccaaaacccaagcattcagtagctatacagaatgtacagggaaggagtgactgagaactcatctacctttgtaattatatgacacactattgactggaaaggaatactacagaaagagcagaatctttctgtttttgaatattgaattatcgaattctcatattgaatttttgaaacttttttaggggaaagatacgttttaattacttgttagttccaaaggtggattctatatacttagtccttttttacaatgggcccatcgttagtcttttcttagaattatttaagacagtctacatcaacgggtggtctggaggcagatggtattccacaaactatcaccagggtgcaaaaaattaagaacggaacttgagagttaagcacttaaaaacctcagtagtctagatgtggtggctcatgcctgtaatcctagcactttgagaggccaagatgggatgattacttgaagccaggagtttgagatgaaccttggtaacatagtgagaccccgatctctacaaaaaattaaaaaaggccaggcctggtgtctcatgcctgtaattctagcactttgggaggctgaggcaggagaatcacttgaagccagaagttcaagaccagcctgggcaacatggcaagaccccgtctccacacaaaattttaaaaattagctgggtgcagtggtgtgcacaccactgtagtatgcacaccactggaaatcccagcactttgggaggctgaggtgggaagatcacttgaacccaggagtttgaggctgcagttagctgtgatcatgccactgccctccagcctgggttacagagtgagaccctatctccaaaaaataaaatataagtatttgggtgtagtggtgcatgtctgtggtcccagctacttgggaggctaaggcgagaagattgcacgtgcccaggagtttgaggctatagtgaattatgatcacaccactgtactcaggctgggcaacagagtgagaccctatcttttaaaaaaaaaaaaaaagtaagaaaaataaacctcagtagcaattcagtattgccaccatatctaagcttatgattagtggtctcttcttgttgaagaagctgtgggtcagtttgagtgacaaactcaaatggcaaatcacatctggtgggagttgtgttgcacattagtcctgtgaagtaaggtcacatatcagtttgcaggagtttggaaatctaaaaaaacgagtcctttaccatgggtagtttgagatgcactgctctggagaatgacgttagagagctctctaggttggcttaaaatgtgggattttgttggatgctcttccattaactggtcctgctactaagtgctgtattagcactggtgcacattgaactacagaagcattgttgctcttcactagtcaatgcaaacttgtaagtagtgttttaaaaaaggtgacacttagaaacaatatggactcaacccacattggccctcatagtcctcatctgttataaacatgcaacagtaacagatacgttgtgatttcttttacagagataccatgaaagataggtgtaaaaggagtagcagagtataatctacttctcattggagccactcttctattcccatgactacttttcgttagtcctatcctgatacttttcagccctaaacatatggtcctatttgtattttcaagtcttagtgaatggtgggaacaaagtatactcttagctgatacctgccctttctcattcttgctaaaagtttcttttttaaaataggaaaatatatttgttgatcgatcaaggatggccccgaagactccaataaaaaatgaaccaattgatttatcgaagcaaaaaaaatttactccagaaagaaatcccattactccagttaagtttgttgacagacagcaagcggaaccatggacacccacagctaacctgaagatgctcattagtgctgccagcccagatataagggaccgggagaagaaaaagggactattccgacccattgaaaacaaggacgatgcatttacagattctctacaggt

SEQ ID NO: 10090 - DNA, 2300 bp, Homo sapien
aaatctctgtccttataagccagttgtaatttgttacaacagccatagaaaatgaatactgttgggaaaagtatttccttatctaaacttctgcttccacatatgtgcaaaatttaataagttgcaattttttattgtttaaacttctcattaggtttctacctacaaaagagatttcagttcaaaatgttattcctataaaaaatgtcagatttttattactattttcttttgtttaatgttttgcatacttttctcttttcaatgtatgacctagcagtgatttttttttttttaggccgtatttaccagcaatctagagtacgaagtgaaggacttgattgagcattctgaattctgctgagagttcatttaaaatatatgtatttgaggccgggcacggtgtctcacacctgtaatcccagcactttgggaggccaaggcaggcaggcagatcacctgaggttaggagttcgagaccaacctggccaacacagcaaaaccccatctctactaaaaatacaaaaattagctgggcgtggtggcgcacggctgtagtcccagctactcgggaggctggggcagagaatcgcttgaacccaggaggtggaggtttcagtgagccgagattgggccactacactctagcctgggtgacagtgcaagactccgtctccaaaaataaaataaaataaaaatatttggagggtaagtggtgaagaatggagtcttggtatagaaaggaaaatgatacctttgctgtaaagtagatggggggtagggacatgtctgtacatttaagaatgtctgatgctttaagaaggctgtctcacatttcagttgagggatatcttacaaaatacttgaccaatactactcaaaaatgtccaggtatcaaaaatgaggaaagtatgagaaactgtcatagccaagaggagcctagagacataggaactaaaggtaatgtggtatcctgaacagaaaaaagggccattaggaaaaaattaagtaaatctgaataaagtaatgacttgagctcagaagaatgtaccaatattagatcattaatttcaaaaaatattctatactaacacaaaatgttaatagtgggtgaaattgggtgctgaatatatgggaattcttggtactatctcaatttttctgtaaattgaaaacttctaaacaataaagtctgttttgtaaaaagtccatctctaccaacattcatattttaaacaagaaactgtaggatgaaagaagtgaaacatttaatacagatcagtggtgttgaggaaattttctagactgtctcccagaatgctagtccctattgcaaagaactacttttttatataaagctttttccctcctaattatttgcaatttgccgaaaagggaacaccaaaaaacatttccggatttgccacacacacaaaacaaacaaacaaaaaaaagttagaaaaacttctggtttggcttccagtcttgtctccagggctaactggcgtgccatctgctcgcagcagagcggtaaccatggttcatgtgtcacaccagcgtgcgatgttaagaagtttgccccggcaagtctggacaactccgcttccgcacaggttgctgagggcgggcggggatggcggcagcagcatccagagggtgtagatcgttcttccaaaccccatctgctttcctgtcctctggctgtgcccggggtccccgggcgcggcaagccgcggggacgtgcgcgggtcttctatgcataacaaaagagccctcctcctcctcttccttctcccgccgccccgcgccgccccgcgccgcccccaccttggcttcccgcggccgccggggcccgcgtccccagcaggaattggctcccgggcccgaggtttccaggtacccggaagggggagggggccgaggcggcaacaattgggcgggtgagggcaaaacgcgcggctcggagcgccaagactccgaggggcggtgagcccgggccgtgccgccgcacgattggccggggccgccccgccggccgccgctgattggtggattctcaaattcggtctcaaggcgccagaggaggtgttttagcggggactacgatccaggctggagttgcgctcggccggtctgagcgctggcgctgcccggacgccgcggggtccccgccagcccagggcactcggcgcggggatctgcgcgcctcgctctcccttcccgatgccgccgcccggctgctgatcgccgcaccaccttccctcatcggcttgggtccgtggaggtccctgcagaggcag

SEQ ID NO: 10091 - DNA, 2300 bp, Homo sapien
aattttaataatgtacatctcattgagtaacccgcaaatatgtattttgacaactttatatgcagttttcccagtatacataatatatagttttgatgtattcatccacttaattgtgtaattacactatttcctacttttttaggtcagctaatccctgtgttcatttaatggataaaaaagcagtaggatttcttgcattcataggctacccttctgtatcaggagctgctggacattagtatgattactttagtattaatcactattatactttttattatgtgccaaaaaattatttttttatactgaccttgcctgatgaactcataatcagaaattacacaagctaagaatgattgtgtttatatttttttacattaatactactgagataatatgaatgaaatggtttcctttgaggattaagtatcagtttatagttgtgaattttatgcccatataaacagcatatgtaagttgcccagctgttgagactagaaagaataaacatgccatcttcagatattcagttggttatactctcccaaattaggaaaggcccaataggaagtaaagtgccttccattattcagtccttgccttcctttgatccgcttccatgaagcagtaggatggactattttagccttcacaagttgatgctgatcatatccctgcctacttttctgtataatcactactcagtcagcaatatacaatagctacattcaaggcacttctcggaggacattattttgaagtcacttttccaaaatgttcacaaaaagctgaaatgagacagggtatacatggaggattccttgaaagagaggcagggtacatacccctctagattggggattatgatcttaaaggactagagaggtgtagaaaataataaaattgaattaaggcaattatgtggcctgtggcatactggagagcaagtacttatgtaggggactgtcatccctcagctctgcaaaatactcctgcaggtcaattcctgaaagcagatgagcactttgccaccccgcatttaaatacattataatctccctctgattaacatgggctggcgaaagactatatacccaaaacatgttattctaatctctcttaaaatacagttttttgaattgtaattgtactgtgaattcaacagtctgtatagaagaaattaggagacaaagacttataaagccaaggcttccatttagtatatttctgtatcatagtgtcgtcccatgaggacccattggatgaatgcctggtcatagtatgaggaagttgtgcttccactgtgaacaaatggctgacttgtattaaggataaaataagtaggcatggacgttaccattttatatcaggagctagttgctttagacatggatattccacttaaaagtgtgtcattttggctgggtgcggtggctcatacctgtaatcccagcactttcggaggccaaagtgggcagatcacctgagtttgggagttcgagaccagcctgactaacacggagaaaccccgtctccactaaaaatagaaaaattagccaggcatggtggttcatgcctgtatttccagctactcgggaggctgaggcacgaaaattgcttgaacctggaggcggaggtttgcagtgagccgagattgcaccattgtactccagcatgggcaacaggagcaaaagtccatcttgaaaaaaaaaaaaagaaaaaagtgtgtcattttttggctctttaagctgtatcttgcaaaacttaatctcaatttatgaccaagatctagccaatggagctcaccttacaatatatattctgtcttcaatttatttctggtgttatcttatcctttcctcattcatttgttttaaatcttataatagcctgttactttatcttgtttcattatatataagtatgtataccacgttagaacttttgggaacaggtgagattaaaaataaatagaaaaacaacttccaaaacctgtagtgatcacaattgttcttctcacaatgacgttgcacattagtgtactatgaggtaagtcacaaatgacaatcctttttgtcactaaatataataaagcacgattcttacaatgagatctaaatgggaccattgttcactttcttgagtgtgataaaggtaaatttacatctgaagctgggagtagcatgtaaatagaagtttatcctttgtgtacatgcatgattggcatgagcctttgcagtatcttttcatgaattaagaaagaacattttatcttcccaagggatatagtccaagat

SEQ ID NO: 10092 - DNA, 2300 bp, Homo sapien
tattgaatgtgaatccttttttttcaatctaattgttccaggaattacgatacattctcctccaatgcatgtttccaaaataccaatgagctcatttgtaattggcaaacaggaattttgtactagtataatgcagaagttgtgtagctttatatacaatttattctaggcaaagggaagcagaatagtcagcgtagaattataaccttgggtgggcaaagaagccctcagtttgaatgttgtatagtcagcaggagcccttttggctcagttttaagaaaactaaaaacaaaaacaaaaatgaatgcctgcatctggggcttcctcttcaaaggggcatgcccctggccttgtgcagctcttaaatatttgcagttgccctgaccctgtacccatttcaatggcaagcctactggcttggagtttgccttccaaccggatttcttccaccaattctggttaaagtgttgccagcatttatacccaattatttttttatgtaattctgagtcacttccttgagtggtccaaattattttctgaggtgccaatattatttttgctagcaatatactcccaaagttgcatatgttttgagtgaacttcctagaatcaatttttcccacaagttctattatttaggtgctgttttgttttgcattgtgaggattacaagttgcatatgtcttattatgaactaaacctcattttacgaacatgaacctctccaactctgtattaccttatagtttctgaaagttataatgtgttgaatggtttgcaaattgcaaaataacttacttcctcagagagattatttcatttctttgataccactagtgttgtatttgttttgtattaccccgctgtgtaaagcccacttgggttactatttttaaagcctgcaagacttctaacttacatttcctgtcttctatgctgcatcagcagaacatatacttttagttattggctctttcatctataaattactgcttcttagataaaagtacgtagtgatttaaagacctggaaacagtaggccaaagatgaccatttcttcactaaagaaagacattttctataaaaaatggttacgatttaataatttccatgattcattgtgtctatactaagtgtccaccactcatttttctaagacctttggttgcattattactaatttttatatttggtgtatataattgctctctgtatccattttctgagtgcaatcagtttcagaacaataatgcatggtacattagatgttttcttaaaagtttaccccttgtttatttaaagttcctgacatgctttaaccagaaatagaacatgctatgattatattaaaataattctatggatggaagcatcatcattcattctcactgagtatctgtttggacagtttttagaagcttgggattttaagttggacgtcataagcttgaataacagtgttattttcaaccattttaaaagacaggtttacaaactaaaatcatacattctttccccctttctagcttcatcattttagtcaattttttcagtgtctccaagtcatagctgttctttctataaagtgaagaaaataaatatgcctatactttgagtcattccaatgattaaatgtgataatgcataaaatgcttagctccataactgctttgtaatacattccacataagtgttagctttgaatgtttttataatcatgacttattaaatttgggaacaatgattactacatatttagtgccctgcttcctgtgtttactctattttcataacctaggcagctatggtccgatgaatgatttaactgctttagctagttgcactattgcatgattttagcctgatttcatgggatgcaacagaatgaacatcgtggctcatggctgtcagtagtgaaaaatagctggaaatcagacaaacaactttattgctgagattgtttccgggctaaaagttcttccaacagctgtttgttttggccattaacatgtccattctttttattttttctgagctgggggaaatacaattttctttaaaaagagaatgcaggctggctatttctgaaatcaggaagaacccctgtccttccactgttgtggtcttttggctgctctgacagttggactgaagggcttttccttttgattttttcctctttttcaatctcaaagttcagactcagactgctttagtgagaaaaaaaaataagcaaaactaagagctctttaatcctaagaaggagctttgtagcagttaccttgaagaagagttta

SEQ ID NO: 10093 - DNA, 2300 bp, Homo sapien
acttccttgagtggtccaaattattttctgaggtgccaatattatttttgctagcaatatactcccaaagttgcatatgttttgagtgaacttcctagaatcaatttttcccacaagttctattatttaggtgctgttttgttttgcattgtgaggattacaagttgcatatgtcttattatgaactaaacctcattttacgaacatgaacctctccaactctgtattaccttatagtttctgaaagttataatgtgttgaatggtttgcaaattgcaaaataacttacttcctcagagagattatttcatttctttgataccactagtgttgtatttgttttgtattaccccgctgtgtaaagcccacttgggttactatttttaaagcctgcaagacttctaacttacatttcctgtcttctatgctgcatcagcagaacatatacttttagttattggctctttcatctataaattactgcttcttagataaaagtacgtagtgatttaaagacctggaaacagtaggccaaagatgaccatttcttcactaaagaaagacattttctataaaaaatggttacgatttaataatttccatgattcattgtgtctatactaagtgtccaccactcatttttctaagacctttggttgcattattactaatttttatatttggtgtatataattgctctctgtatccattttctgagtgcaatcagtttcagaacaataatgcatggtacattagatgttttcttaaaagtttaccccttgtttatttaaagttcctgacatgctttaaccagaaatagaacatgctatgattatattaaaataattctatggatggaagcatcatcattcattctcactgagtatctgtttggacagtttttagaagcttgggattttaagttggacgtcataagcttgaataacagtgttattttcaaccattttaaaagacaggtttacaaactaaaatcatacattctttccccctttctagcttcatcattttagtcaattttttcagtgtctccaagtcatagctgttctttctataaagtgaagaaaataaatatgcctatactttgagtcattccaatgattaaatgtgataatgcataaaatgcttagctccataactgctttgtaatacattccacataagtgttagctttgaatgtttttataatcatgacttattaaatttgggaacaatgattactacatatttagtgccctgcttcctgtgtttactctattttcataacctaggcagctatggtccgatgaatgatttaactgctttagctagttgcactattgcatgattttagcctgatttcatgggatgcaacagaatgaacatcgtggctcatggctgtcagtagtgaaaaatagctggaaatcagacaaacaactttattgctgagattgtttccgggctaaaagttcttccaacagctgtttgttttggccattaacatgtccattctttttattttttctgagctgggggaaatacaattttctttaaaaagagaatgcaggctggctatttctgaaatcaggaagaacccctgtccttccactgttgtggtcttttggctgctctgacagttggactgaagggcttttccttttgattttttcctctttttcaatctcaaagttcagactcagactgctttagtgagaaaaaaaaataagcaaaactaagagctctttaatcctaagaaggagctttgtagcagttaccttgaagaagagtttactccccaaaggagtatttagtattacttagatactgagtcactgaacagagagagagagagagacagagagagagagagagagagagagacagagagagagagagagagagagaaagagagagagagagagaatgagaatgaatatgaatcccagccagcaagaaagaaaagatacttaactaaagatgcagggaagttttgcctcttcctgaaaattatattattagctttttaaaaatcaggatgactgctagttttgtttaaagtatttgttctggaaatactaaagttggagtctaccagactgaggttagaagcattttctttggcagcaagaagataattttatagaagccatgcctgttcttggggttgcctcaaaactgaggcagccagctgttgggtcaaagcctgtgcatactgctcttccgataccaaatcttggcactactgggtcacagcactgttcttcaagacctttggaacttactgaaacagagagctccatgct

SEQ ID NO: 10094 - DNA, 2300 bp, Homo sapien
aaaatctaaatttatagtaaagacgtatcacaggagtttgaagcagcaaagccatttctagctgctgaagtgcaagaatgaagagacagaataataaaaccttggggacatgtctaaaaacgtgacactatacacagaacatccatctcaaggtgtctccagaaaactttgatgtacacttaaaatgcaggatactgccacagcagggcctttttcaaaatgtatcacttgatttgtatattttaccctagattccactagaaagatgtaggactagccaaattatagtcatcagccagtgagttctttcaaggttattttctggatactctggagatgagtatctccaaggcctcatctcatagaccaaagttgctattttcaatcagtgtaatgagacaacacattttaaaattcatattagcttatgattcaatgcttcctttatttctggttaacataaatggttatattcctaatcatatttcaatcttcaaaaaaattatgaaatcacgtgaaataaaatccaacttcgataactgaaaatagttattaattgaatttcaccatatgccagccactttgcttagcactttatctaatgtaatcctttacactttatgaagaaaaaattattttccatagtctgcctataaagaaactgaggccgaaagttaaatgacttcccaaaagtaacatagccagtagggagaggtgcctggtagcaaagcccatgttctcaatttttctcttctatgctaaagtgagaaaatacctggatggggttaatattttctagtcttttcttgtctgaaagtagactgctatgcctttcaccaaaaaaaaaaaaaaaaaaggctgtcttgaagaaaccaaggacactagtcatataatctactcttccaaaaatatttgtactttctcacaaattatccaaaaattcaacaagaaattatccttcattttcataacatgttgaagccttattttaccaaagaaaaaactgaaaataataaattcatgaactcagatgtttattatttttattctatactatgtatttactcttttctccctgagatcccaaatttagtcagcacaggactgtcacattgttacagacaacaggacaggtggtaattaagtttgaaggagaaaacaagaccatataaatactagaagaaaatacaaggtcatacctttatagtgctggaggagagaaggcctttcaaattatgacctcaaatccagaattcattaaaagttttataaattcaacttcatcaacagatatagacaagacatacaaaacttttgtattatttaaaacactataatccaaagcaaattacaaaactctcaaatcatgtacatcacagagagaatatatggaagctccttaaaactaagtagtagaaaaccggcacccaacagaaaaatggacaaatatgaacctgatgtttataagttaaaagaaaaaaaaaaacagatgtcccttaaatatatgaaagcatagtcaatgtctctcaaaataaatctgattttgggatcagaacaaaggaataacaaacccaaaactacaccaagatataatttttaacctataatatacatgacaagaacgtaaaatttacaactctattggcaagtttgtgaaaaaaaataacttctctaatatgttgctattgggtgtaaaatagtgagaccctgtggaggcaacttgagaatgaccattaaaataaaaatgccttcactgttgatttattagtctctacttctgagaatttattctgctaatttacatgcatgtatacagtatgatatatgtaaatgtgaattcattataatactttctttataatagcaatagactgagaaaacaacaacaaacatctagcattaggggcatattatataattgactatcttcctattgatacattttttttctgttatcacttttttctcaacataatatgccccagccttgttctagaaggcaaatcacataaactggcctgtgaacacatggaattctgggactaagaccagacagagtcacaaatggttgcctggaaaatatcagaacagaactcacacaagctccctgctctcaggagaatctggcacagcaccatcaccaactcagagggagggaagcaaccttgagtcagctcccaggcagtaatgagtgttcaagggagatataactctaaggaaaaggattgaggtcaaggaattagaagaaacagatggaagaatcatttgaaccatatccaggtcttttgaaaatgatgaga

SEQ ID NO: 10095 - DNA, 2300 bp, Homo sapien
cattaaacagattttgtaaaagttctgaaaataatatttttaaaataccatacaatcaggggataagttaattctcaacagcaaaagtactctagatgtaaaagtacttaagaaatggaatgataagagtgacaaagagctctctctttgtctctacagaacaattgacccgatcttccttttaataaaaatgagtctgcttcaataggcaaagagatgatacacacttgcggcaaagtataatgttgtgtcagcccagtagatccaggaggacgtcttcaacacattcccaagagcttggagagaatttaggaataggagggagagttaaaatcttagtatagctacagtcaccatataaatagagtcttcttattatttatgtacagaaaatgttatcaattctaaagttaagcacaatatacatgtaaagcccatttcttattttaacctgcagtctccctcaaggaacattgggttacaaacttctgataccattcatgttgccaaggattctggccactgaaatagaaagattgctaggtaagatgtgaagtaaacaggaaaagaaattgactaaaatattaatgacaaaatcagtgtctggagcaaaaattttaaaatctgtatttgtattctattgactaatttattctaaaataagcatactttttttctacatgcagctattggtaaataggataaatgtgccagttttaatcactggaatctagaaagtatgctaggcatatatttagaataaagatctatattaagtggatattataataatcttctcatccaaagatatttattggacaacaaaattacagggttacttaattcttcttcgtcttctcttcctccttcttctccttttcctccacctcaccatcctccttctcctccccttcctcctcctccaacttcttctactttttatcctgtcgtttttcttccttctctgtcttctcctcctcctctccttcactaaataactgaaataaaatttagaccaaattcttttatcttatttctccaactatgaaatgattttaaaataaggtttggagactattttggaaaatggaaagtgaatatttacatgaagtcacaagtctggggtgcattattttcacacttctacctctaatgttaaacttcctattattcaagcatagcccaaatacaagtgtttgtcacttagaaggatatatttatatcacgttgccttcttttcccgtatacttagaataaggatcttaatcttaaacattacataagtagaagagatttaattaaaaacttgaagaaatgtgttactgttaattgaattcttgctacatttacctttgcacaccaatgttaataaaactccagttcaaagtggatgggtttggggaattgagatagctatttatttccctacctgagatgccaagataatcttctcagtaaaataaagaacccaattaggagagttctcatttgtagctattgatcaagtttacacaaaatgctaggatttctaaataaaacaaataagaggttcaaaggcctttaaacgaggttgagggagggagaaagggaaatagttctctccgttttgaaatcctttcacctgtggagcagataatggacgggcccctctcccagctgggctccgctcccgcccctagcctggcgcgcggtcccttcccccacccgctgagccttcctgttcggtatttcggtattaccaagctataaattgcctgagagcttagagacaatcaggtcaccaccgccctcacaagagaaaagcttcttacttccgagcagaacggttcagctgggaagagaggaagcagggagagaatctatgctttagtcgtcactgctctggcaaggggtcgagagagatgggggagggaggtggcaaaaaataaaaatgaaaaaataaaaaagcatctccaacaatgttgcacttgacccaagtgtacaaacttattggtcgctgcaatggaaactcccagtgcactctccacggcctggcagccgccgctgatgggtggagtcgcgctcccggccccacctatgggacggagctgcttctcccgcatctcggctccaccgcacccttcgcgggaagtccccaggcttccagcaaagctcagcttatcccgcccccgcttccaacccggaaccccagaagaacagcatgatgagcctccggcagccaggtgggccacctccccgcggctcagtttgaggacacttgtgcggaaccctttcacatccccaccctacccagctttcac

SEQ ID NO: 10096 - DNA, 2300 bp, Homo sapien
ctacatgcagctattggtaaataggataaatgtgccagttttaatcactggaatctagaaagtatgctaggcatatatttagaataaagatctatattaagtggatattataataatcttctcatccaaagatatttattggacaacaaaattacagggttacttaattcttcttcgtcttctcttcctccttcttctccttttcctccacctcaccatcctccttctcctccccttcctcctcctccaacttcttctactttttatcctgtcgtttttcttccttctctgtcttctcctcctcctctccttcactaaataactgaaataaaatttagaccaaattcttttatcttatttctccaactatgaaatgattttaaaataaggtttggagactattttggaaaatggaaagtgaatatttacatgaagtcacaagtctggggtgcattattttcacacttctacctctaatgttaaacttcctattattcaagcatagcccaaatacaagtgtttgtcacttagaaggatatatttatatcacgttgccttcttttcccgtatacttagaataaggatcttaatcttaaacattacataagtagaagagatttaattaaaaacttgaagaaatgtgttactgttaattgaattcttgctacatttacctttgcacaccaatgttaataaaactccagttcaaagtggatgggtttggggaattgagatagctatttatttccctacctgagatgccaagataatcttctcagtaaaataaagaacccaattaggagagttctcatttgtagctattgatcaagtttacacaaaatgctaggatttctaaataaaacaaataagaggttcaaaggcctttaaacgaggttgagggagggagaaagggaaatagttctctccgttttgaaatcctttcacctgtggagcagataatggacgggcccctctcccagctgggctccgctcccgcccctagcctggcgcgcggtcccttcccccacccgctgagccttcctgttcggtatttcggtattaccaagctataaattgcctgagagcttagagacaatcaggtcaccaccgccctcacaagagaaaagcttcttacttccgagcagaacggttcagctgggaagagaggaagcagggagagaatctatgctttagtcgtcactgctctggcaaggggtcgagagagatgggggagggaggtggcaaaaaataaaaatgaaaaaataaaaaagcatctccaacaatgttgcacttgacccaagtgtacaaacttattggtcgctgcaatggaaactcccagtgcactctccacggcctggcagccgccgctgatgggtggagtcgcgctcccggccccacctatgggacggagctgcttctcccgcatctcggctccaccgcacccttcgcgggaagtccccaggcttccagcaaagctcagcttatcccgcccccgcttccaacccggaaccccagaagaacagcatgatgagcctccggcagccaggtgggccacctccccgcggctcagtttgaggacacttgtgcggaaccctttcacatccccaccctacccagctttcacaactccgccgggttaaatggccaaagacaaacttctacctctcctgtccccggtcccagcttttcaaaaacccacagctggcgaacccacacacatcgaaactcctaggtcgctgttgcagtctgggcatgctcagtatcagggtaggttttgattgagagtaaaaaaaaaaaaaaaaaagctttgtattatgctctctttctcctgtgcatactgcttgctgaacagcttgtggggcattcctgagtctacctagaggttttatcagacgcccttgattgtgtctccttgggatctgttcccctcttacttcaccccctcccccaacccgcctccaccccgcttcccaggtccctgtccgctgtggggatggagagacactaacagaactgggatgggcgatgttggctgaacggatccacctattattagtgcgcggggattggctccttggcgcagcgtacccgaggtggagccaatcaggatgctggggctcggagatgatgggcggccgcctcctcactggagggattcctggagaagctgcagtgtggggatgctctagaccgagtactgcccccagtgtctttccacctcctcctgcagcagcggcagcggcagcagcagttagcagcggcaacttgaggctgcaccccgggcaagtccccagggtggt

SEQ ID NO: 10097 - DNA, 2300 bp, Homo sapien
taacatgtagaatctgattctggtggccattccctctgaggaataagatactttctgggacttgtagccatgggagaaaggtttaaaacactttcagagagttgaggggaagccactttatgcttggaatcattgttgaaaaaaattcaattatgaaaaatcacaaatgggtaaaaccattaaataatcccagatagcagtagctcagggcattattgtttaatcatctcatgctcaatattctaaaggacacacacatacacagcaaacaaacagtgttggtgatgttttctgtgttttttagagtgagaaattagaattatttttgaggactggaagaatctttcctcactaactagcatatcccaaatttacaccatgacacttaccaatttataaaaatattttattttatttccatatatgtcgccctaacttctttagaggcatgaacctatcttttctcttttttatccccaaggactggccaaaaagaagaaaaaaaagtttaaaataggcaattaatattcattaaataaatcacagatagtaaagaagtattaaaagcagcctgagctggagtcaactatttcttgtctgtatcagccaggcaaaatgttgctcagaagccattcagggaataaaactctcttgtgaagaatctgttcctttaaactaaggacttacgttttcccaaaccctgtaaattcccatgtttttctatatggatttatgccagaatcattccaatccactggttggcgaagagaatggtttaataactgcaggggaaatgtaaaattctattcagaatataatgaaagctgtatggtattatgtattcatttaccttgtagtaggaaaactcaaatcttcaaataacagagtgttgccatgtcagcttcctctggagagttgaaaactaaactgtaaagacagtagaacgatgtgatttgtattggagtcactggaatcgacaaaacctaaattttttttataatttatttatttcaattaacaaatgacaaattttataaactagtggtatacaatatgattttaatgtatgctctactatgcaaagcctcaattcttaattggtctacaggattcagctgataacgtgaattctgtctacctgcgtttttatatttgtgaaagaattatgctactttataactcagttttttagagtttctatattctaaaattattactttcaaccatcaaatataagatagtagaaatatggggcaaaattttttgcagttttatatcaaaaaagtagatgaatgcaatagggagtgcattaaagagaacagaaaaaaattttaaaagaaagaatggggaaaaaagaagagaaaaaaatgtaaaagaaaggcgaaggaagggaacccgaaagggcaaagaaagtgaggaaggaagggaatattgaagtatttgatagagcttccctaccacccagatgctttagtatgtgcagtatttcaaagttcttcctaggtaaatagcaatgtctttcctttttattagcactgctgcagctgctgttgctcacaaagagattcacaaatcaaaatagactcagttagcttttcaataattctgaaaaggtaggagaacattgccagaaaaggatagcactccagtatcctaacatagagtcttgttagcaaaacaaagtgtgaattgcttagataattccctgctgttggtaattccactgggtgtcttctgtggcagcacaggctacttctcctctatagaccaatgccattgaacagaagatgtcagaatgatatgaaaaagttgctcttttgaaatgtttgttcttctagatttttttaaaatgtcagcatgattcatacctattggttcttagcctggagcacccagcacaaccaggaattgaggaagctagagcaggatgtgaataacgaatgggctgcataagcagaagtctatacccagtcaataagcagaagtctatacccagtcagtgtgcagagttgcaggctagcattttcacagattctattattctctctctctcaagggaaaacgggaaaactagcaagagctagcaagaactagcaagagcttgaacaaacgcctggactcagattggaagactgctcatttgtctactgcctcattcctggaaattgcactggaactgtctgattaaggtatttggaaaaaacaaatttttgacacattttgttgatgatcaacctcctttatccatccatatctttttatatgtggcggcggggccggcggagggaagggtagtattt

SEQ ID NO: 10098 - DNA, 2300 bp, Homo sapien
acactgatgggtcttgactctttatccaatatgccagtctgtgtcttttaattggagcatttagtccatttacatttaaagttagtattgttatgtgtgaatttaatcctgtcattatgatgttagctggttcttttgctggttagtcgatgcagtttcttcctagtctccatggtctttacattttggcatgattttgcagcggctggtgccagttgttcctttccatgtttagcacttccttcaggagctcttttagggcgggcctggtggtgacaaaatctctcagcatttgcttgtctgtaaagtattttatttctccttcgcttatgaagtttagtttggctggatatgaaattctgggtcgaaaattgttttctttaagaatgttgaatattggcccccactctcttctggcttgtagggtttctgccgagagatccgctgttagtctgatgggcttccctttgtgggtaacccaacctttctctctggctgcccttaacattttttccttcatttcaactttggtgaatctgacaattatgtgtcttggagttgctcttctcgaggagtatctttgtggcattctctgtatttcctgaatctgaatgttggcctgccttgctagattggggaagttctcctggataatatcctgcagagtgttttccaacttggttccattctccccatcactttcaggtacaccagtcagacgtagacttggtcttttcacatagtcccatatttcttggaagctttgctcatttctttttattcttttttctctaaacttcccttctcgcttcatttcattcatttcatcttctattgctgataccctttcttccagttgatcgcattggctcctgaggcttctgcattcttcacgtagttctcgagccttggttttcagctccatcagctcctttaagcacttctctgtattggttattctagttatacattcttctaaattttttttcaaagttttcaacttctttgcctttggtttgaatgtcctcccgtagctcagagtaatttgatcgtctgaagccttcttctctcagctcgtcaaagtcattctccatccagctttgttccgttgctggtgaggaactgcgttcctttggaggaggagaggcactctgctttttagagtttccagtttttctgttctgttttttccccatctttgtggttttatctacttttggtctttgatgatggtgatgtacagatgggtttttggtgtggatgtcctttctgtttgttagttttccttctaacagacaggaccctcagctgcaggtctgttggagtacgctgccgtgtgaggtgtcagtgtgcccctgctggggggtgcctcccagttaggccgctcgggggtcagggacacacttgaggaggcagtctgcccgttctcagatctgcagctgcgtgctgggagaaccactgctctcttcaaagctgtcagacagggacatttaagtctgcagaggttactgctgtctttttgtttgtctgtgccctgcccccagaggtggagcctacagaggcaggcaggcctccttgagctgtggtgggctccacccagttcgagcttcccggctgctttgtttacctaagcaagcccgggcaatggcgggcgcccctcccccagcctggctgccgccttgcagtttgatctcagactgctgtgctagcaatcagcgagactacgtgggcgtaggacccgccgagccaggtgcgggatataatctcgtggtgcgccattttttaagccggtcggaaaagcgcagtattcgggagggagtgacccgattttccaggtgcgtctgttacccctttctttgactccgaaagggaactccctgaccccttgcgcttcccaagtgaggcaatgcctcgcccctgtttcggctcgcgcacggtgcgcacacccactgacctgctcccactgtctggcactccctagtgagatgaacccggtacctcagatggaaatgcagaaatcacctgtcttctgcgtcactcacgctgggagctgtagacagcactgttcctattcggccatcttggctcctccctgattctaccaccaagaataaaatagttgtttgtcccctacagtagaacaagtttgcccattcatccttgtgatagatatgcatgcaaaaccaaaatgaaatcaaatccccacagatggctcgtaagtcaaaaacactgtttaattctttcactgcatccctttgggaagcctggcccttggtaagtagtaatgtacaatgtatata

SEQ ID NO: 10099 - DNA, 2300 bp, Homo sapien
tacagatttggtctgattatcctcattttacaaaagaagaaactgaaaaacgaagaagatctgagccgatatctgtccaattctaccctttaggattatattggtagctagtaatggaaaattaaaaacttaaaaaagagaacaaggccaggtgcggtggctcacacctgtaatccaaatacttgagaaggctgaaaccagtaggatcatgcgagcccaggagctcaaggctgcaatgagctatgatctcgccactgctctccagcctaacaacagagcaagaccctatctcataaaagagagagagagaaatagtcaattataaaataaaaattcgtatctatgtatatgtgttagcctcagccatgatctcctggaagtagatccaaaatctctggattttgattaagattttaataagaatcttatgcatctgagattattctattttcaattgtactttcactaaatatgtaactatgcatgaccaactcacaaatcgtttgcatttctttcttttttttttttttttttttttttttttttgagacagagtttcgctcttgtagcccaggctggagtgcagtagcacaatcttggctcactgcaacctctgcctcccgggttcaagctattctcctgcctcagcctcccgactatctgggattacaggtgcctgccaccacacctgactaatttttatattttagtagagatgaggtttcttcatgttggccaggctggtctcgaactcctgacctcaagtgatccgcctgcctcggcctcccaaagtgctgggattacaggagtgggccaccacgcccagactaaatttcatttttaaaaaaatcttgtttgctggttatctccacgtctttgcaaattaaaaggtttttataagttcgtctactttcctgttaagaacgtgaagtgaatcctgtccaggcctctttacttatctatttctgccccaaatcatgcccattctttcctcagaaagcctgaaatcttaagttctgcaggaaaattacaaagtctggaatatttttagaatggagaatattcgttcatttctactcccttagaataccttccttacatttgtaccttcacgtgttctaagaaaaatccaggaagggcaggttttagttcttcatatttcagaaggtggataaattaggatgtcaaatgccctgttaaagtttatttaactagtgaagaggatgagaactgatgtcttctgaattcacagctgtttgtattgattactttattaattattttggcatattttggaggtaaacaaatacttaaaataattgaatacattaataaaataaaatattctaattaaataagctaaataaagtaaaatatctaaacttataagttatgtttcattagcagcaccttgatatatatagtcaaccatgccacatttatagtgacttaaataattacccagcaagacaagtaaattattgatcagagtattgtttacaataaatgtgaaaaaagtgactggggtgaaaacttaccatcaataaataagattcaagaaccaattactgtaatatattcataacatcttagagtatcaatattatgaataatattacttataaccatttttaaagtcactagcattttgagtacatgttatcatttatcaacatttccaatacaaatattttatctctttcttccttttagaaaatacaaaatatttaaagtataaagcatgtatttcatcaagaattgtttcatacacgttttggtaagatatgggttaaaagttaaatctacacagcaaataattggctgtataaataactaatagatttgacagtatacatagtattgctggaatagaatgctattcagtaactatgtctggtcttaccttctggggaagaactcttcactcgctgtggttccataaatatttcatttaccaacacaaagcaatatgctaatgatggactatttacccagtgagcaggtgccacctctgatgttgtttcatctctgggatacctttgatgtgggagcagttaagccattttgaattgttctgtctttgcttccctcccctcacagcttcacctgaacctaaaatggtgagcgagagtcaccatgaggccctggcagccccgcctgtcaccactgtcgcgactgttctgccaagcaacgccacagagccagccagtcctggagaaggaaaggaagatgcattttctaagctgaaggagaagtttatgaatgagttgcataaaattccatgtgagtattctatatta

SEQ ID NO: 10100 - DNA, 2300 bp, Homo sapien
aagtatcaggtatgtggagcaatgtagtttttttttttcttcagtttaaaaaatttttaattgtggtagaagcaatgtattcttaaggtgaaaaacctacctcggttacatgtggtttgtgttttttggattaatctggattttataattagaaataaaaatgtaagattttgaatccacttaatttcttgaaaatagtacaagtcagtgtaatagagaagcattcatatattcaacactgtaagacaaaacagcagagaccttggatttgataattgatctgatatcctggacagtattcatatgtacagtgataggtatctttctttggagttttttttttgtgcatatgtgtatagttttatgggttctgagttggtgaccagtaagttgcatgtagtgctggcacttacttaataactattcatgatattgttaataacttgttataggattgtattcccaattacagtctctaagattgtaattgatattatctgagaggtagtgtgacaactttcttttgttgttacattaagccgaaaacataatactaatagacaactaacagtttgcttatcaggcacatcaactaaggcacctccccccatgctaagtttctcctggatatatggaagttgattgtttcccagtttaaaaacttgaactaatatctcctaagaaaatctgagtccatattgtttttattttacttagctagaatctcatagcatgttaaagtcatatccttatccccactaaaaataactatgtctatgtgagaggaatatagtatgtgggagctgtattaaatactattacaggtgttacagaatctttaaataaatggacatggaccaactttccatctagtagtgtacgatctatatagtgcatgtcagtagcacaaaatgcagtcttagcattagcctgtctaatctgaatagtttactcaaaagtacttctttgtgttaagtattcagccactgtttttagatctagttaataggttctatttaatttgctacaacatttactgaatggtggagtgaaaaaactgatgcatactgggaaatatctaccattttttaaagataatgttaattaggaaaagaacacttttaaggaatttatagcagtgatgaaatgaattcagttatatcagatacaccaaactgttgatggtatttaaatgtgacttcaagttagtatttctgtatatattattgattactggtttgtttttagatatgtaagtctgttctaatctacagttcacatatcgacagttactctggtaataatagaatgttagtgatgatcacttggtggatgttgattaagtgcctgtgttttgtttcctcctctggataccaaataggtgtatgctacttttttggtgaacttatttcttggaagatttggctatgctattcagggtttttattcttatgtttttcttctaaatttaagtagcatcctgctgctaccatattaaagctaaaatttaacttttgctgaagaatcagctaattcaggtaatccaaatatttgtggaaaaacatctggataatttattgaacacattagtattgtgttagacagctttgatcattcccatttcataggtttttattgtggaatagtcaacttaatatagattcactttcaatttgcatgtataaagtaatactcaataaaatttttttcatttatttttcaacagtggttattttttttcttcctgtactatcagtaaaatcctgactatgagttttacttttgaagctaaaggataatgctggtaatctaattatgtacctcttacagaaaccatatgcagcactttaaaaatctttatttggtatattattttaggtggacaatgatttaagactcaaagccatcatattaaggtctaaatacattagtggtggggtttctcgaataaatgaggaagtgcacaaaagttcagcctgactgaaaattttaattgtgttttaaaactacatgaataatttcttgattcaaaatcagaactcttataaactaaatctgatggtgtccaaagaatttcaggtccttcaaagtttgtaaaagataagtaggggcctaggaatataaaaatttagacttttttagtaaatggtttacataaccttttgtcttaatttgtcattcttcatacacaggcacaagctaatcagtcttctctacttctagaactctaaatcttctcagtaatgtcatacaagtctaacaagaggaaaagcatccttaagtcagtctatttagataaa

SEQ ID NO: 10101 - DNA, 2300 bp, Homo sapien
aagcatatgaatgtgaatacgtttaatgtcccagcctcccttactctccttaaaactcagaaaacaaactaatgaatatgtaattgagaaacttcaggtggcacactggggttggtactagcttaggtaaacagccgctcagccttttagacctattcccaacaaaagcttttaattttctaaggatttttccagagctctcgccatacgtttcccacaacagccagaccaaagaccaaaactgtctttccctgagaaatatagagcatgtgaatcactttcttctgttcccagttctgtggcaggcaaacactgattgctcactcatcatgtgctacctgggcaaaacaggaatattaagtaggaagaaaggtttatgttaggtaagagcgtgacttagggctctcctacttttttacaaaatggagacctggcatttgtagcctcccacaatgatgtgccctgacattacttggatatagaaaggtcagtcttaggtgcgtcagtgacagcccaccccgctctgatccagaaatttcagatgacttgcatcagaggataagcctctggcatgttaataatgaaaaaatagagacaatcactgccccagctcatctcaaattagcatcagtgcagcgttagtactttggtagggagctttgctgctaaattcattctctgtaaagaggagaggcagagacagggttaaggggaaaactccaagactggaatcgccaatacaataaactgtcgaactgagttttttctcccgcaaccctaagatactagtaagtccttcctcttagccaacccttttcaccagggcaccgcagttttcttagaaggagggtgctgggtttgtctcaggtctttctattctcctgcccgctgccctagtacatctgaaaagggagcagcgactaggaaaagagacacgtgggtattttcccatcctgtctagtcattccctgaatcatcacaagttatcgcacttttccccttagccagcagcgttcgagactttctctcaaataatacggtcttgtacttaaaaggaagagtggtgggagaagagagaggcggagaagacaagcaagaagggcgtggagtgccgttcccgccccggagtcggaggcgccgggaggccggacgccgcgaagctgctagcccaggaatgtgccgtctaactcgcaggccgcgggcggagcgcggcgggcgcgctgtggtctgcggcgggagcggggcagaggacggctggcgcagggcaggctgcagcggcgggccggacgcgacgccgcgcacctgagcgccgggggcggggcgtcagcggccacgacccttcccaccgcgcgccgcgcccctcgcgcgccgcctcggccttttccgctcgtgcttcggcgccgctcggctcccttcccgcccctggctccctccctccctccctccctccttcttctccctccctcctgtcctgggattgcctggagctccgcaccgcgagtttgccgcggcactttccgcgcggcggaagagcgcgcgccagcttcggcacacctgggagccggatcccagccctacgcctcgtcccctacaagctcctccaaggtaaggcgctcgctcacacccggtcctttccacgctcggcgggacagctgggtccccgcctcctctgcgaaccggctaggagctccgcgcctcgccttgggagtggggttgtagctgacggggacctcggaccggcggtggctagagcgcggagcaggcgatacgacgagccgacaggtggcgggtctagccctagtatctcgaccgccgccggcgcggaccttggtggggatggggcgggcgggccgacttgggggtggggtcagtcctctctcctcccttctaggggcggcgatcgtcggggtccgtactgtaggtgcgtgggagaaactttgcagggtggggacccggcggctgctggccggtagtgactggtgggcgcgctcgaggactccaaggggcgcagcccgggggcagacccttgggtcgggcggggatcttacgcttcccttacccgcccccttttgtctttcacctcagccccgccggctgctgtgggagcggcggccgtccctctcctggaggtcgtctcctggcatcctcggggccgcaggaaggaagaggaggcagcggccggagccctggtgggcggcctgaggtgagagcccgaccggcccctttgggaatatggcgaccggtggctaccggaccagcagcggcctcggcggcagcaccacagacttcctggaggagtg

SEQ ID NO: 10102 - DNA, 2300 bp, Homo sapien
attattatccccattttatatgtaagtaaacagaggcacaaaagttaagcaacttgcccaaagccacacaagtcagtagcagccaaaattcctgactcagaacctattaacactaagagaactggtctaagccatgcagtgataaatttatgtggggtgttatcctagttcattcaaagtctatcgtttttaggctgatattgtatattcaataccccatctgttataatttcctcttctcccatacacttcttagagaccaaggactttaagcccctagaagggactatgtttactgagtgccttcctcgaatcaagcacattttatgtgcagtgtcagttcttaagacagcttaaatataatgtaattgggaggctgagagcaggagaattgcttgaactcaggaggcggaggttgcagtgagctgagatcccgccactgcactccagcctggcgacagagcgagactccgcctcaaaaaaaaaaaaaatgtaatttttgctgattttatagtacagaaagctgagtaccagataatgtaaacatgcccaagatctctcagctagctgactataccctctttccactatatcctgcagcccttccaggagaaaagtcctctgataagttacaaagcatatgaatgtgaatacgtttaatgtcccagcctcccttactctccttaaaactcagaaaacaaactaatgaatatgtaattgagaaacttcaggtggcacactggggttggtactagcttaggtaaacagccgctcagccttttagacctattcccaacaaaagcttttaattttctaaggatttttccagagctctcgccatacgtttcccacaacagccagaccaaagaccaaaactgtctttccctgagaaatatagagcatgtgaatcactttcttctgttcccagttctgtggcaggcaaacactgattgctcactcatcatgtgctacctgggcaaaacaggaatattaagtaggaagaaaggtttatgttaggtaagagcgtgacttagggctctcctacttttttacaaaatggagacctggcatttgtagcctcccacaatgatgtgccctgacattacttggatatagaaaggtcagtcttaggtgcgtcagtgacagcccaccccgctctgatccagaaatttcagatgacttgcatcagaggataagcctctggcatgttaataatgaaaaaatagagacaatcactgccccagctcatctcaaattagcatcagtgcagcgttagtactttggtagggagctttgctgctaaattcattctctgtaaagaggagaggcagagacagggttaaggggaaaactccaagactggaatcgccaatacaataaactgtcgaactgagttttttctcccgcaaccctaagatactagtaagtccttcctcttagccaacccttttcaccagggcaccgcagttttcttagaaggagggtgctgggtttgtctcaggtctttctattctcctgcccgctgccctagtacatctgaaaagggagcagcgactaggaaaagagacacgtgggtattttcccatcctgtctagtcattccctgaatcatcacaagttatcgcacttttccccttagccagcagcgttcgagactttctctcaaataatacggtcttgtacttaaaaggaagagtggtgggagaagagagaggcggagaagacaagcaagaagggcgtggagtgccgttcccgccccggagtcggaggcgccgggaggccggacgccgcgaagctgctagcccaggaatgtgccgtctaactcgcaggccgcgggcggagcgcggcgggcgcgctgtggtctgcggcgggagcggggcagaggacggctggcgcagggcaggctgcagcggcgggccggacgcgacgccgcgcacctgagcgccgggggcggggcgtcagcggccacgacccttcccaccgcgcgccgcgcccctcgcgcgccgcctcggccttttccgctcgtgcttcggcgccgctcggctcccttcccgcccctggctccctccctccctccctccctccttcttctccctccctcctgtcctgggattgcctggagctccgcaccgcgagtttgccgcggcactttccgcgcggcggaagagcgcgcgccagcttcggcacacctgggagccggatcccagccctacgcctcgtcccctacaagctcctccaaggtaaggcgctcgctcacacccggtcctttccacgctcggcgggacagctgggtccccgcct

SEQ ID NO: 10103 - DNA, 2300 bp, Homo sapien
gcatattttgtggttagcactcataaagcattcttgttaaagtggtcaaaaaccatttttggtaaattagtaaaattggttattcagcaagttggcttttgaggaattcattttcagcaaattgaccaggaattccaagggagatgtttgtacagagatcaatgtaaataaaatctaagatgccactgtttttttctttttttttctttttttgttttgttcttaaactgtgcctgtgcttaatgtccagagctctccagtacaggatacaacaggtaggctaaaacccaaggtgcttttccatcccttaaagccaagcttatatatcaggatttcatcagctttgagctggtcagatagtacaggaagtggaaaaaatgaaaggcctgagctcaccagcagaagaaagctgtacagctagaatttcttataagtgaaagtggatgtgaaccaattgtggagcatggatgattggaaaagaaacctagagtgtgagccaagaccaagatagctgtgggagaagataaaaaggccagtttactggtctggctgcatggatacagagtcattcaacctgctgatgaatatatttcaatcaaggtcctggaatctgaccattctgattagccactcctgatggtgtaggaaaggaaagaatttgagcttcagaaggaaagctacagtttttttttgtttttcttccacatactcactcaccctcacgcccaactaaactatgaaagttcctggggaaaagtgatagagaacataaaatgagagctctggttaccattctatttctaaacattcattgcactctttattattttaatacaaatcctgttttctctttgctttactcacgaacctgtgttttactccacttgaatattgtgatttaatacctattaaaagagaattactgtggtcacccctgaacttttttgcacttatctcttttataatttcttactttgttgcagagacaagaaagatttgctgatagatcactgttggaaatggaaaaaagggtaagtgtcccacttattaaataattatttttttctttcttgttttaggtaaacaatggtaggttttttgtttttattttgttattatggatgacagttttaattagtttaaatatttattgagttaatgtattttgcagcaacttctttatagaattctatggggtttctctaggtatgaaatgaccttgttaaataaaatttaatttaccacataattcttttaatgaatttaaaaaaactgtcttgccttgattctgaaatgtactatacacattttgatagtgaatttgatatttttgaaatgccgtttatctcttatggcctgtacctaaaacgttttaatcataaatacatttattttaattctttataaacctaaaatactttcgttcttgaaataaagtttctaaatctggaacatcaaattttcaaattctttttaaagttaatttaataattttttaaaattttgagtttaaatatttaacttaagtaggctattttaaacaaaaaaaagattacaagaaaatccttatgccacttgatgtctttctgcaagtttttattgattgtaatacattcacttgtatttctcttcacttattgttgctcaaaggtctaggagtagtcataggaataactgtacaagtttagcctcatcagttgaaaatgtataaatgatccaaaagttaaaggaaaagtgcccaaagattgtttgtagtgtagctgagcagtagctagacttggtagggtttcgaccagagaagaaatgacatgctggtagctatgatcaaagagtaaatacttaggagctattgatataaaaacatttttcttccattctattttaaaataaccaatttgcccttttcaccaaaaaaaagagaaatggttaaaaaaaaagaatataaaaatagtgttataatgtctgtcatttgctagttgtaccttgcaatagctaccattttattatgctttctgcaagttttaaaaattagtgttctgagtcatgttttcaaaatggacataataattgctaaaatattgttttaataaatttaatattattatatcctgttagaatatttaactgttactgaattttatctccaggataggcagaaataataaaatcagttctctgttatactaacggttgagatgaaaggcatggataacaaactgtacttaaagtagtatttatttttcaaatacaatcacaattttaaatatttaatttttcttatgaaagtaatatgtttatta

SEQ ID NO: 10104 - DNA, 2300 bp, Homo sapien
ttgtttctaagacgaaaagtttttttattttcaatttaagtagtttttgtttactttagattgtttagagttcttttaaagtaatgaataacatataaataaatataacaaatataaataacaatatgaaacctaagtcaaactggattaaacaaagaaaatgtattgtactccagttatattctgcagtcctttgtgtcagcttcatcctcaggctgatgtacctcatagggataggattatagttggcttaggatagacagggcctatcactgaactgttgcagccattttgctaccaacatgggccatgtgtcatctcacctaaacctagtaactgctataccatgagaaaaaggaagaatggatgtagataaataaataaggtgcaatgtatgtgcatagatcaatattttctatattcacatagatattatgtgtccagaaaaggttggttagataacagtggttatctagagaatggagggatgaggaattacacaggaactttgtataccattatgtgaactttacaataccatagtcagaaagatatttctgaatatctttctatatattttaatcttttttatctttaaaaagatatttttactttggaaaattaatcttaaaatttggggaacaagggcgttatgctaaatgaaataagcaagttacaaaaagacaagaactgtgtgattccacttattttatttgggtatcatagaaacagaaagtagaacctttgttgccagagctaggaagaggaggacaaaggaagttgttcattggatatagagttttatttttgcaagatgaaaaagttctagcgatcttttgcacaacaatatgaatataattaaaaatactgaactatatactctaaaaaatggtttacatggtaaattttatattacgtggtttttaccacaattcttaaaagtttttaaataatgctaggccgggcatggtggctcacacctataagcccaacactctgggaggctgaggtgggaggactgcttgagcccaggagttcaagaccaacctgggcaacatagggagacactgtctccacagtaaatttaagaaattagtcggatgtgatggtgcatgcctgtagtcccagctaactaggaggctgaggcagaaggatcagttgggccaggaggtcgaggctgtagtgagctgtgatcatatcactgcactccagcctgggaaacagagcgacacctcatctcaaaaatagtaataataatcagtgataacaccatgatttttaaagataatggaatttgagtgatttctcactagactttttattgttaaaatttaaatcagtgaatgtaagtgcagactataaggtaagatgtattatttttgtttgatatgtagacattttagttcaggaatggccattttactgaatttgattatcttgaaaattgaaatttattctttaaaattgttagttgttgttaaaccaaagaataaatcaataaaagaaaacattaccttaaaaaacaatgtaaggagcaaagttaaaattggttttgcagaggaaatttacagactttagtaaaacatttttagtccaaaatagactttaaacaatcccaaaagtaacctagtaattttacagtatctccaaagataaatataatgggaaatcactaatatttaaattaagaagtttaacaaaccattctgaataaattatagaatcagtgagtatttcaatagaaaaagaaaaggctaaatttgactactgaaaaagactactttggcccccagtaagactgttttaccttattaatcatttcacgatttagataagactttctggaacttcagtgtagcataccacttgcttgagaaaattaaatttcctgtcacctaattgctgaccttaaaggtatatagctagatttcgagaaagtaaattttaaacaaaatatgtatatactgttatgcataaagaaccttaggtgttcattcgtttgcttctattgatactacattaaatttacttataatcataggttaatagtttaatgaaagcataaaaatttagtatgcctatgtttttctctttctttccagacggattccatttctaggtatgttttatttattttttaactgacatttttttcttatttttatctttgttaaaaatgtgttgctaggaatttatggattttgtaagtttatagaattatttgataataaaaaacaaattttgatggccttatcattgttactagctttctttgttaaaggctttacttcaagatcact

SEQ ID NO: 10105 - DNA, 2300 bp, Homo sapien
tccattctgcttaattgggctaaatgaaatccttctatttttttcaatagagctaaaatttttaatcttcagttctctaaatcctttttaaaaatgtggttccatcttaaaattaaattacattattttaaaaaatgtagttaggaagttaaaatgtgatgttaaaatataattattaaaatataactagttccaatctaaaaagaaattataagattgcattattgaatttcaaagaccattttctgaagacttttccttaaaacttactaagatattaaacctgtatgttttattcatatgcattgatagatatttacattcacaggtattgtatttacaactaacgatttttcaatttactactgtagatcatacctcactcctgttagggatgaagagtctgaatcccaaagaaaagcaagatctagacaagcaagacaatctagaagatcaacacaggtatagttaatgtaattaatatataaaacttacataagtagcatataaaatatatatacacacactgacataaaacaagttacctttctctttttcactttgttgtgaaaatattgatgtcagtatatagtgtgagtaaatccttaaaaggtaaaggttgctgtagttattctagtaattctagtgtgaataaatccttaaaaggtaaaggttgctcatagccttttgtatggttacactgctactattgtatttcatctaattagcatatgcctttgtgtctttttgagtattttttaaatccttattcctaatacagtgtctggcccagagtatttggttagaataaattaatcatatgatgtctaataagtatttaaaagttctatgaatatttggaaatcgggggcagagaataggctcgtatattaggtataaacaactaatatgcaagtatgaagaaaatgtcattcaggctggcgatctccttacctccgttttgccattctgattatgctgtatatgatgtatacttttgtgtctttctgctttcccacagttaagaagctccacagtccagattcagctgtctatccttaccattacttagctttcaagctgaactatttgctagggccttaatatactttttctgtctttatacttttcacttcttgaaatctaacctgttcttcaaggtcaaatcttgaaaaatttatcgaaatctcttttaagccttaacaatcatcatgcatgtgtatatagatacatatacacacatatatatacacacacacagacatatatataaacataaatatttataatatacaaacagtacagatactggctattcttctctagtttgaacttgtggggaacatttatatgcatagagtatccagtacctatcgttgtgcttgctaatggtgattcttcatagaatgaatgtaacttgctgtttccatttgcaaaccaattttaaacatgcatatttgacttttaatgcatttgtatgtaatatatctatttctaaaatattccttgaaacaagctttaatgcatctcataattatattgatctttttgtgtgtgcagggagtgacattaactgatcttcaagaagctgagaaaacaataggaagaagtcgttctacccgaaccagagaacaagaaaatgaagaaaaagaaaaagaggaaaaagagaaacaagataaagagaaacaagaagaaaagaaggagtcagaaacatctagagaagatgaatataaacaaaagtactccagaacgtatgatgaggtaacagtatatcaaaagcacatttaagtcaaatggtatgaatagtccttatgatccttaacatacaagagatttatataccaacaaaccatatgcaaaatactgtaaaggattttagctggaaatttgaattactttggcgtgattagtatactactttttctttgaaatgaatttttaagtatttttatgtttttaattgtgtttaatgtttcaaatgggttttgatcttaatgtttcacagacttaccagcgttataggccagtatcaacttcaagttcaaccactccatcctcttcactttctactatgagcagttcactgtatgcttcaagtcaactaaacaggccaaatagtcttgtaggcataacttctgcttactccagaggaataacaaaagaaaatgaaagaggtaagaataccaaattttgaaaacactttgctttcttcatataatcctttggattagggtttcctaaataataattcaacagtaaaggaacagcatcctaacttgtgattcatcgaacctaaacag

SEQ ID NO: 10106 - DNA, 2300 bp, Homo sapien
tcatttataacaataaatgttagcttcatttataacaataaatgttatctgactgactgactctggctgttttataatgggggaaaaaacgtttgtttccaggttttttgtttgtttttttgtttctgttttttgaggaggtgggagacctaatgtgggtgttggcaaactatggctggtgggccaaacctagcccattacctgtttttgtatagcaaactggttggagaaaaaaaataaaaaaaagtcattgtccctaaagttttattggttacagccacactcaatcatttgtgtattaatattatctgtgttccacaaagcctagcatttacagtgtagccctgtaaactcaccaatcaataagcagctgtctcagtacctatcatattgcacagaatattagagttcgcaaactttcttggtcattggagcccctagtgtttggtaggattttttcacagtgccactggcaaaaggaattgcctgtttgtctcattaagtagtttgatggaaatgtgatcaaaatggcagtttgtgcagtgtctatgagatgtcactgtgcttctctcaaaactttaaaatattctacagagcccccgtgattttgttgtgacactctggagcactttggtgcacattttaggaactgaggaatgcttagacactattgatagcaattcattactggaagtaccagaggtatatctttataacagttttgtccatgaagtggccctcaagcatcatcatgggggctttaacaagccctgttaacctgctaattatagcaaatgttggcaatagatatgaaagaaatgatttttaaaaaattattaataccctatgcttgtggcaactagttagttgctgtattcaccaatctatatagttaactgtggttgagtatagaatttctagaagtgaagttgatgaagtgatctaaagataacagaggttgcatttttagggttgttggaaagcccttaaaatagcataaatatttgtacataaaattagtttttattatagttgaaatagttaatgtttggtggggaaatcagtaaatttaaggctgtgatgttaaaaaaaaaagtattataattggaaaaatatcagttactagtttttgttgattatattggacacaaaattttttaaccagagtatatacatggattaaaaacaaaattcatgtgcagtagtttgttcagtcacatgctatattatctactctgtatgccttttaattgctttagaagtttattagatttttttcagattatctcatgctaaaattagaacttgttcccagtgacttttaaagattggatcattacccaattattggggttaattataaaattattttcaaatgaagaaaatattttttgttcataacttcccttttctgttttcatgctttcaatctttgtctctttacctgtcttattttaattggctttagtatgatttcattgctcctatcatgcctgtggtggaatcagtagatcctgcatcatggaggcagggcttgcgcaaaactggcattgttcttgtgcccagtaagggtgaaaaatctatggtgaggcatttctatgtgcaagaatttatattaggttacaacataacaagtttaatataaattggttccaaagatgcatggttttaagtccttatggtgtgctcatttctgttttctgtatttgcatcataatttttctgtgtgatataaagtgtgtagtgtgttttcttaagtctaacccctaggaaggtagtctatttctttaaaatttttagatctttacattttttactaagacattaacctatgtagtaaaagtgttttatcctgaaactgtaaaccataattttaaatatattatctgtaaacttattgtttccaatttaaggactgatcagctttacaaattcttttttcttttcctaaaaaataaaataaacacagtttccaaccacagctacaaaaatttctcccaaagaagaagagagaaaagatgagtctcctgcaacttggaggttaggacttagaaagacgggcagctatggtgcacttgctgaaatcacagcatctaaagagggtcagaaagaaaaagatactgcaggtgttacacgttcagcttcaagtcccagactttcctcctctttggataataaagaaaaggtaatctatttcacagtctggtttctatgaaaactgttatgatttcttttccaggaacatcaaatctggtagattttctgctagttatctttagatctaggtatcaagttaatta

SEQ ID NO: 10107 - DNA, 2300 bp, Homo sapien
attaattttgcatcctgaaataagtgcttgaatcaggaatagcatacttcccactaaattccttttgcctgaatgaaatcttcagattcccatctatactgcaagggcactttaagagctaccacataggccataacgttcttggaaaacaggatatgctgtcagttgcctaggtagagacaggagctgacaaggcaatcctcaagttcctttcttttattctgagagctgtattctgtggatagggattttgtattttagtgctaacaatgtttttcagtacctaacaccatgagtattcaaaggtctgatgttatctttaatgtatgtaatgaacatacaatggtatatcttatgaatattacattcattttctattcctacaacgttttcagaggaaatatttttaccctgacctggattctatcgctatcctaataactgtggttcagaaaattgtctcacaggcagacagtttcctaatcacgttttactcaattattttatttctcaatatgataggctgtgaagtagtccactggaaaaggcatcatgctgagagtaagaaaagcttatttgttcactgctctatctccagcacctagaacaatgcctgacccagaacaggtgcatagtatttgctgagtgaattctaatcctacttctgggtaaaattaagtaaattaattagttcttgagggactctgtctagatgacccctaaacttccatggtaaggttttgtggtttttatcttggcttttctaaatgctctaaaaatagtagtggatggtaacaatgcagtgttcagtaaaatcaattggtggagattgtagatagatggctcataagacatcagtattacaaatcctatgtgtgtgcgcgtgtggtcatacaaggcaaagttaaagtcttttttttatgacgatgataaattagtcttgtttgggcgactgaactcaagaggtggttcaaataaatgtcatatttttcattgtatcttcagtgcctagtacagttactggctcatagtaggtattcaataaatagtggttgaattaattgccttccttaacgttccgtttaaatgctagacgcagctaggtctttacccctccttagaaagagatggagctgtaaccagaaatcccttaaaaggtaaggaccagtaatcaggctgagctaagctcatgggtagtacgagacaggcttaaagcactgaaggaagaaagaagagaacccaagcgtgagagaaagcaaaacaaaacaagtaaagagaggaagaaaaacatttctaaagtgggggttggcaggaagccacagcaattacagcaggtcaacccttgtcaataggtggtcacctcaagaacttaccattaaaaccctcggccacacagaccccacttttaaaaggttattaattctgacatgcccaagttcatctgagttccttagaaagatcaaccagcagcacctacttcacgacctatcctccattccattcaaataacgcggccaataggaaaatcctccgccctgagccaacgactcggcgtagctgagacagcacgggaggcagatctgccctgtagagccttgcggttccactgctggcctccggattcccgggagcccccagcccgacaggacaaccttccttccccgcttcctcctttccaggtctgtcccagcccccgctgcctgggccacacccgcttccctctggtggcccagccaccaccgccgcagttcgcgggagcgctcttcctggggcgggcacaggcccagggcgcatgcgcactggtcgaagggcgcctcccagtccggatctcgcgaagttacgttagattggccgccggtgacgggtggccgtgctgggggcgggagggcttctgtggtaggaagggaggtccgctcggccgggtgcgccgccccagtgctctgtgggatactggaagtctcgagcgtcggctccgggttcccagccctcctctggcccgcactcatagaaacattcacacaccccctgcctcccctctcttccctctccgcctcccccttccccccctcgcgataagaagacccggcggcaggagaggggatgaagatggcggacgcgaagcagaagcggaacgagcagctgaaacgctggatcggctccgagacggacctcgagcctccggtggtgaagcgccagaagaccaaggtgaagttcgacgatggcgccgtcttcctggctgcttgctccagcggcgacacggacgaggtcctcaagctgctgcaccgcggcgccgacatcaa

SEQ ID NO: 10108 - DNA, 2300 bp, Homo sapien
ccattaggaagtgaaaatatttgcattttttccatttgttctgcttagacaaatatgtaataaaagcatgtgtgtgtgtgtgtgtgtcttttttttttttttttggtaaagatagggtctagctctgtcgctcaggttgtagtgcagagagctcactgcagcctcgaactcctgggcagagttcgcctcagcctctcaaagtgataggattacaggtgtgagccactgtgctgggactgtgtgtgtcaataaaaaattttgcttgttctagaattaacccaaggtcttcagtaccattaattcactaacaacaatttaaaaaaaatcctccctaaagacaaagtaggtggcagtttcagagtactttcaatattaacatagagcatcttgacccttagagccacgaaagaagaaaaactaaattcagtgaaatttgcacatgatagcagccctccttggttgttttttccctgacagcttctgggaactgaatgaacttaattatgttttattaataaactattattaattttgcatcctgaaataagtgcttgaatcaggaatagcatacttcccactaaattccttttgcctgaatgaaatcttcagattcccatctatactgcaagggcactttaagagctaccacataggccataacgttcttggaaaacaggatatgctgtcagttgcctaggtagagacaggagctgacaaggcaatcctcaagttcctttcttttattctgagagctgtattctgtggatagggattttgtattttagtgctaacaatgtttttcagtacctaacaccatgagtattcaaaggtctgatgttatctttaatgtatgtaatgaacatacaatggtatatcttatgaatattacattcattttctattcctacaacgttttcagaggaaatatttttaccctgacctggattctatcgctatcctaataactgtggttcagaaaattgtctcacaggcagacagtttcctaatcacgttttactcaattattttatttctcaatatgataggctgtgaagtagtccactggaaaaggcatcatgctgagagtaagaaaagcttatttgttcactgctctatctccagcacctagaacaatgcctgacccagaacaggtgcatagtatttgctgagtgaattctaatcctacttctgggtaaaattaagtaaattaattagttcttgagggactctgtctagatgacccctaaacttccatggtaaggttttgtggtttttatcttggcttttctaaatgctctaaaaatagtagtggatggtaacaatgcagtgttcagtaaaatcaattggtggagattgtagatagatggctcataagacatcagtattacaaatcctatgtgtgtgcgcgtgtggtcatacaaggcaaagttaaagtcttttttttatgacgatgataaattagtcttgtttgggcgactgaactcaagaggtggttcaaataaatgtcatatttttcattgtatcttcagtgcctagtacagttactggctcatagtaggtattcaataaatagtggttgaattaattgccttccttaacgttccgtttaaatgctagacgcagctaggtctttacccctccttagaaagagatggagctgtaaccagaaatcccttaaaaggtaaggaccagtaatcaggctgagctaagctcatgggtagtacgagacaggcttaaagcactgaaggaagaaagaagagaacccaagcgtgagagaaagcaaaacaaaacaagtaaagagaggaagaaaaacatttctaaagtgggggttggcaggaagccacagcaattacagcaggtcaacccttgtcaataggtggtcacctcaagaacttaccattaaaaccctcggccacacagaccccacttttaaaaggttattaattctgacatgcccaagttcatctgagttccttagaaagatcaaccagcagcacctacttcacgacctatcctccattccattcaaataacgcggccaataggaaaatcctccgccctgagccaacgactcggcgtagctgagacagcacgggaggcagatctgccctgtagagccttgcggttccactgctggcctccggattcccgggagcccccagcccgacaggacaaccttccttccccgcttcctcctttccaggtctgtcccagcccccgctgcctgggccacacccgcttccctctggtggcccagccaccaccgccgcagttcgcgggagcgctcttcctggggcggg

SEQ ID NO: 10109 - DNA, 2300 bp, Homo sapien
ctgtccacttctttgaccttctgccatagtacaaggcaggagaaaaaccctcactggaagctcagtagatgctggcgccatgccccttgaacttcccagccagcagaagtgtgattaaatgaacctcttttctttataaactatccattttcaggtattctcttagagcaacacaaaatggactaagatactggaggaacacatctagtatttgtaattatattttcgaacaatgttattttgatgcattgtctccatggtggtggcagatgaaaaagtgcaaaattgagatgattgcaacacaggaattgtcagtcataggcctcttcattacgatcaaaagaaaatgaattgactaataattaaagaaaaaggcaaggagaagtgaaatgcatatatagtttcagaaacaagccagtgtttgccaatatagaaagtatctgtggaagactttgagaatatacacatgtgcttatatttgttctttagagatctatgagatttggtttgatagcaaataggataagagttcactggaggctggggatatggttgataaatacatttatcattattattccttaaaagaactactagatggtcatatttatcataaaataaaacttttacttaaaagtaatagtcactacataatattttgcctgattgcctactttttacttttagattttaaagcagaaatattttgaattttcatatgatgtaaatgttatatgaggtagggactaccttgttttctcatcccactcatttttaacagttactgttttcaaactaatttaaatttatattattgaatttgattaggctaaataaattatattaacaggacttaaaatgtgtcaaaaataatagatcatttcatttatagaagaagacatacagatttacagatggttgtaaaaggaaagaaatttttcttttacttttttcttttctttctttctttcttttctttttttttttttttttttgagacaggatctactctgttgcacaggcttgagtacagtggtcatagctcactgagacctcaaactctgggcctccagtgatcctcccaccttagcttcctgagtagctgggactacaggcatgccactacacttcgctaattatttttctttttggtagagacaaggtcttactctgttgcccaggctagtctcaaactcctggcctgaagcagtcctccctcctcagcctcccaaactgctgggattataggcacgagccactgcatctgaccaggaaaaaaatattttctgtggactaagtataaactttcattaaagaaaaatgtaagttagtggtgatgaaagagaaatctgagaaaaacaatagacttgtgacacatcattatgtcactgggccatgtcacagtctgaaaccaaaacatggtggcatgatttattttagtgcccaggttttgagtgttataatactgttgatctttttaagcatgcactgatagtgaagaccaaccccgcactgctggggagatttggaatgggggcattgatgaatgcactctatacaaatgtttggagaatggaagcattatccctatagaacctgactgtgatgaagagcccacgccagtttgtgaacgagaagctgaagttgtcatgggcatcattgataaatggacctgctgttcaaaggaagtttgtggtatgtatgcagaagccttatagtcaattgattccacaaaatatgttgatattctttgtgaaaaagcagagcatatataatgctttgtatttttaaaaaagggccataaatgtcattttctcaaagcaagttttgtttcattacaattctgttgaatacacatgaaaaactctggctattcacagttaataacactcaacaaaacatgagaagaggaaagatctggaaatctttgatgtatgaatcaagggtgaaagacaataatagaaaaatgtcaaagctgctgcattttcatatatggcccactttgttagatgagtgggttaactgcagtgtaaaaacatgcataatgagagtcatttcccgtctttgagtttcctgtcttgagttggcagtcatttccctgctttgagttggcagattttagttgtgttcactaatattttaacagtttttcttatttataggatgtgacacgactttgtgtgaaactagcattccaacatgtacaaatagtcaaaaattgattgttggccacagtcctctttcttgctgtccacagtacaaatgtggtaagtaatcaatatagaaaattaagagtgagg

SEQ ID NO: 10110 - DNA, 2300 bp, Homo sapien
taatgccatctttttaaagtatttggagtagtcatgcactggaagaattcgatttattattatttttagctccattattctaacatttatttccagtcccattggaattgtctaatgactaaagtcctgaaatatcaaatgaattagtgtccataagactactttacaacttacaaggcactataaaaagcaagacattattagcttatgaggaaaaatgccttttatgtgaatgtattggaatcatttatttatgtcaagaataaaattcattttattactgatgtcatatgaaaactaaatgcatccaggaaaagttgatgctttagacacaattcttgaaactttaagcctggtcctgtatttggtgggaagaatctttgtcagtcctgatagggcaaagtttgagcatctgtcatagtaacaatgtactaacagcaaaatgctctacaggactttctgtgtgtcagtcctattctgaactctttacatatattgatccatttatttctctcaacaatcctaagaggcaggctgtattattatccccatattgcagataagggaagtgaggagcagattgattaagtaatgtgccctaaatcaaaaagttagtaagttatggagccaggattggtgcaaaggcagttccattcctaagactgtgctattaaccactgtactatactcattgtgttgctgatgtgtatactatagcagccttgtgcagatgcagacatcagaaccctaggctgccttggtagagcagatcaagaacatttccatgaagcaaagttcctaaggttggcaaatgttgtctttgattgccctacagaagctcagaatcaaacaatatgattttaaagtgtctggctgtgtgataagggacttattagatgttatcactgagtatgtgtgtgtgtgtgtatatatatatatcaattgttttatatatataggttatatatatatatatatataaaataagctaaatgataagtaatagtagtatattttcaatagggagaatttactgcaatagaccataacttccagagtgattgtggatgcatacagtatctctgtggtaactatgtcttttgtaacttttaaattataaatgaatatcattagtatctgttttttcactattaataagttaaaaatctcatttttgagacacatacattttaagccatttgccagtatttgagtataaaaatgtgttattatgtttcaatttcttcttttgtaatatctctaaatgttctgagaactgaataacagaacagaaatataaatattttttcagaggcctcagagaattttacagtgggcattaggctctttttaatatgtctacatttaatttaaaaatataggcatctaaaaagtatgatgttatgcccattatattagtattattattattaatgtatttttattaagacagagttgctctgttacccaggctggaatatagtggccccatcctagcccactgcagcctcaaacttctgggctcaggcaatccttccaccttaactgcctgagtagcttgtactacagacatgcaccaccatacccagctttttttttttttttttggaaatggggtcttgctatgtttcccaggctggtctcaaacttctggtctctagcaatcctctcactttggcctcacaaagtactgggattataggcatgagccactgtgcctggccaagagctcatattctaaacttgctataaagtatagcttttggaggaagttcaatcattaaacagcagttgattttatagatgaatttttattttatgttaaggaatagtgtactacatttttaagtaaatattgggccattaaaatacgtaaatatgaagatcttcattagttttgaaaaattggcacatcgcaatgaaaacatagactcaaatataagttccaacgatggattagtacaaaactcaacagtatattttcttattgactatgttttctgttcttagaaaaggatgatgtgtgtgtatttcaagaagtatcagtattgaatcctggacaatccatgataaagtatttggaagaagacttttgttatgctatagagtgtctggaagaaaaagataaccatacgggctttcacactctgaattttacactggtgaattgttcaaaaaaatgtgatgttgtaagtattccttgtaatttattctggtgagagttaatgcattcaaaaatggcagagttatagaatttgaaatggtgaatactccattagtttaaaatatatattatatag

SEQ ID NO: 10111 - DNA, 2300 bp, Homo sapien
tgaaacctttcagtgactttctgtgtcattcagagtaaaaagcaaagtcttataattactttttaggacctaaagcaccacttatactccctgctttttctagccattatctgttactcttccccctcatttactctactccaggcacctgctgttcctagaacattcctgacacccttctcctttaaggtcgttggacttgattttccttctacccacaattcttttcccccgaatcctgcaggcctcacttctttccttcttcaaaactgtcttcacattatcaccagtgatatgtgaagtttggagatgggctggagaacactatgataagtgaaataagccaggaacagaaaaataaataccgcatattctcatgaagtatttattttttctgaataacctatttctgaacagcctattttctgaaaagcctattttctgaaaactttctctcatagcccttatcacttttataaattctatgtaatttgcatacataatatacattaatagacaatgtctatttctcctaatgataaaataaacgagggtaggaatttcagtgtctttggtcagtgatgaacccccagctcctaaaatagtgcctggaatgtaatagtcactcacaaatattgattcagtggagaatgtgcatatttaaaaaatctgtaaagaaatcaaccaaaatgttaatggtccttcactctggatagtgggattacaggtgaattctactttctattatgtatttttctaaattttcaaaatattctacattaacatatattatttttaataagaaaagatccctcacactttaactacatatttaggtctttcggttgagactggaaagacagaaaagctgcagtatactgtgtatttaagagaatcaagattttctacaagcaaatgttcctggcttgcactgtaatttgggaaaatcacctaaagtgcctcctcattgttccttaaagtaaaataaacttgctggattacattttagagtccctggaaaatttaaatatatgttattttttgtatattactattctctgactactgagacaatttcaatgtaaaaaagtaaatgttaccttttattccatattccttaaagcatcttcctgtttgaaatagatgtcattccattactactttttaacttatacattacctttctttaaaagaaatccacagatactgttcacaattatataaactcaagtgtcatgcttttatgttccaggtaaatagaccaaatttcagagaaatttgataaatatacacaaggatgtcataatagatttaagacagatctcatgtcctatgagtttactgtattagcaaaatgaaacttcatattaccatgtttttcttgggtcagaactccagacagtaaatgccactagactaatgactaatgccacagtttaagtagataagtaatttcttagaggaagagtgtacatatatctgcacaaccaataaatacatggcagaaacatcatggagtgggtttagagagctggttctgggctcaacctgccttaccaattttgagatcttggcaagttacttcacctttctaagcttcaatatcttcatctataaaatgagcataatattagtactaattcacaatgattttataagaatattgaatataagatgcttagcaaactgctacaaagactcagacttaagacctttattaagttctgttattattgtaaatattattatgtagtccttaatgttttattcaaaagttagacataaattttgagaaccatttgttgtgtagtatatcagattgtgaggataaatttagacgttggaaattttgagtatttaagattatctagtatttacggtattctaaaatattaggtaattttacaaccagcatatgtttcatgcattgatcgaaaactaaaacactgtatctgtgaacacagtgatgcagtgtttgtaattatatccttctagggttatttatgtccaaatgaatttattgctactcaaggtccactaccaggaacagttggagatttttggagaatggtgtgggaaaccagagcaaaaacattagtaatgctaacacagtgttttgaaaaaggacgggtaagttatttgaaaatgttttacaaatgttgttttacgattgtgttaacatatgtgtgaatatttcatctaatactgtgagtcatcaataacctggacatctataaagtaattttaacttagtcgtaataactgtggtatacatatatatcaatataacaatgacgctt

SEQ ID NO: 10112 - DNA, 2300 bp, Homo sapien
catttttatcttaatgttcttaatgatttttatcacaataatcttagttaacttttcaaattgtcttcacatttacaagagacaacataaagtgtggttaagagcacaagctaattttctataatagatgttagattataccctgagttgctgaaactttcaatctgcagttttaattgctgacttgagcaaccaagaaactggcgaaaatagaaaaaaaaaagtcacagaagaagtattggcctcttgcaactcttctctctccttcttaccattccaaaaatctaagaatagtattaaacttgataaggaataaaaacagccaaaaatatcaaagcttaacatccagtctgtggctcaatagaaactgtgaagaatcatcttctagaataggcgacttgattagctaatttctaaattatctgacagttgatttcctgcattatcttcactctattcattttttaaaataaagtcataaagaacacagcttataatcattactgcttggggtagagcaataagattttatgttcccacatagtttttgaggcactgactataaagaccaaaaccaaggtcaactgacatcccaaaggccagttacagctaggaagtctttctagagctctaggaggaaaggtgaaaggaagggaaagaacaacaaaacagagagagggaagaaaaagaaaaacctctccaacagctatgctttatttcattcataggaatgagtctttgccctaacatggctttatactacaaatgataactactgttcatcaagcagctatgtgctatgtgtttcacatgcatggtatcatttgattgaatcctcactaaaactgtaaggaaaccactatcatcttgaagacatcaagatctagtacttacccatggatatatacatagaaattaaccttgctaggacttgatagttctttggaatctagggcccccgcacttgaccttcatattgtactgtctcccgaagaacaatacatgtatcttgtggaccatgggcaagctgcaatttaaaaaatgctgtttccttgctcgtgccttggttgctaacctttctcacttaaatcctatcaaacaacttatttggagtcaatggatagtgagaatgcaaaagaaaaagtggtgagcacacagtgtgcagaactggaatcataagagaggcaccttggagggggccacaagtaaatgctgaaatatcaagtagctgtggtgtgagtcttgttttcactaaaactatttttaaggaggagttactacatgtattgtaaccccatcctctatcccactccctacctcatatgtaatactgctccacaaatggaagggtacagaattcagatcctggttgcccctctccccaaaggaaaaaaaaaaaaaaaagatagtcaaggacggtctctatggaaggacccagagaatcatttcatccagtatcatgggatgtgagcacccttcagcaaccccctccatttcccaaatcatcttgcagccttagtaaaagagaggaaagagatttacctgcttctattgaggttgaagcctgaaagtcatgtataacctttgaagcactgtaatggttttaatcacaggaatagcatctttttgagaggcaggagagagaaaggagctgaaccactctgcaaatattaacccggctattttggagcaatggctattgcctttgaaatctttcatcatgggtctatacttagaattcagatgagcgcagggggaggggaatagggcaatgttaatccccagttgttttgaagttgtcctgtaagcaggttagtatctaaactgcccaaaatggaagggttcaatgctttgtttaagttatgtgattctctctgtgtaacctggtctgcacatagattgtcacaacactctgggaggtgacacttctcagttttctttcaaactagatgttctagagagcactagctgcaatcacattgggagactgatgctccatgacagctaaaagttggattgagtttcaggagctactatatataaagctgggtcgacttatgtcactgcactaattaaatgccatctgggtggttcctctgggtttttgagtccatcacccagttcagatcgagtcagaggccaaggaggagaacatgatgatggacctttttgaaactggctcctatttcttctacttggatggggaaaatgttactctgcagccattagaagtggcagaaggctctcctttgtatccagggagtgatggtaccttgtccccctgccaggaccaaatgccc

SEQ ID NO: 10113 - DNA, 2300 bp, Homo sapien
ttcctgggggaggatatctacccactattgtatttcagaggtagcaatgtgctttgcatttgctgtgcatttgaatgtttccaccagcgtggatggcatcttagtttccacctgggttcttcttgaacttgcctctttttatctggcgtagccctggataccgtattcatttcaaaggcatagacttgttaatagccctaaaaaaggtgcagatggatttcccactggtcagatgattaagcagcccattggtgtgagagggaacctgattttcaggagagatctttttcttagagatgacaggacagaagagaggagacagcaatggtgtggctagcaaaccttagtgactgacagtgtcactctcccacctctggttttcaaggtcttcactttagagagatcgcaccctgaaaaggttgctacttctctggcccctgaagatgctggatcaatgaaccagtgttgctttaagaaaataattctgaaaaaaaagtacaaagtaccattcactgaaagaaataataataataataggaaggaaaactccctcctcctcgcaataacttcggagccactatatttattgaactgggttaccctagattgagttgagaacactcctgcttctttcaacggggccacaagacctagtccaaaaccccaagactaattgtgtagaccttaagtaattgcttttcctaaatataaacagcacctccccaacccaaataacctgaaagtggattaaggttggaggaggattggtaaaagctgattaatagattcattcccacttaaatgacaaccctcccctcttgccttctatccatcgaagttctaaagaccctgctgtgattgcttttctggaaggcttttgtcactgaagtgtgtgaagttactcctggtttgaggagttggaaattttacacgagtcaaggattgcagtggcggcagctgggacgcatctgtaacggtgttagtttgcctgaaagcagaaaattagcaaccccaaagcccagcttggctgtttagtctgtagaaatgacagggcggagcagaaagagagggagaaaggagactcacccctggaaagggagtttgccgtcgaaaactgggcttcttctgttggaaatcttagagacactttcagtgcaggtctttggcctgctcaggatctagggaaggcctggcacaaaggagaaggtgctcaacaaatacgtacagaaggggaaaatgaaggaagcaagaacgggaggaatgttcctggtcacctggccctcctgtgccccacctccttttagatgagcagacatacagggagaactcagagcaagcccagtcatgggaaaaggaacctccctccctactctcaataaggtagagcctagaataaatgacaatctgagcaaaactttactcatctgaagctatacaaaatagatttggaaaggcaaaccctgtattcactccaagattgaaaatgccacttcaagtttttagtaaccgttattcaatccaattgctggaaaaagttttcgagataattgaagttcatgaaaaagagaaacaaacacccccaaatcaggtgattcctcacgcccaggattgggagggcaggtcggctcttggtgccagctgaaagggatttctatttattaccactattttaaaatgtgtgtccaattgcaaaaagttggactgccttggtcacttttgtgtgaaacactccttaagtgatcccttgttttagcctatctagagagtgcaaatgagcaggttggggacccactgccgccccagcagaaatacagtaaaaccattagcgtcaaaaggggcagtacacagcagattgtctgtagaggaaaggcggaggtttgtccagacagcccccgcgggggttgcggtgggatatgctaatagtgcctggccactggggccggcctccctcccgaaagaatatataaagaaccccaaccccagcttgtctacccaggccaacaggcgtctgcccttgttaattaccggagcgacagactagggagctccgcccgggatttgcccatcggcggaggcgccaggctcccgtttctccccatccctctcgctgccgtccaggtgcaccgcctgcctctcagcaggatggacgtgatggatggctgccagttctcaccttctgagtacttctacgacggctcctgcataccgtcccccgagggtgaatttggggacgagtttgtgccgcgagtggctgccttcggagcgcacaaagcagagctgcagggctcagatgaggacga

SEQ ID NO: 10114 - DNA, 2300 bp, Homo sapien
atagaaccgaggcttgcattttgtcaatcttatattaaaggggaaaacaagtaagaacagtgctcaataaatcatcttcaatgtttctcagatccgctctacacattactctttcctccttcccacccattcaattattcagcaaatatttattgagttttttaggaagtgggggcacaccgatgaataaaacagattaaaatctctgcctttgtaaagtttttaattcagaagagggaaacaatgaaaaataagcagcacagaagagagaaagagaagggctagtgcagggggcagatacagacacagatatgcatgttggaagctaataaatactgacgaacaaaggaaaatattaaataaagtagatagagtaggccatactgtgaaaacaagatcccaacgaagtgttgaaggatctgcaggaattagcccagcagttgtctcgaagaaagtatcctaagcagagagaaggctagctcaaatgtcctaaggtagacatacccaatgttcctgagaaacagctcaggggccaatgtggttggaggggagtgagctaagcggggctagtaggacatgtggcagaggagtaagagagagatagatcacaaaaagccttgaaggctcttaaaagaatctgtttttactctaaagggtcattacagggttctaagcagaggagtgacacagtctgacttatgcttttattaaaggagttgctttaaagacagcaactccttttggagaccaactgctgtgttgaggatagattggggcagggcaggggccaggtgggggctgggggacctggaatcgggaagaccagcaggaagttatcatggtgattcaggtgggagatgatggccaggactgaaatgacagcaatggaagcagtgcaaagggcgcagctactgtttataccttgaaggttgagtcaacagaatttcctaacagactggatgtgagtgtgagagaacgcgtgaagtaggggaatcactccactaagtattgcttaaacaaggggcagggtggagcagccacaaattaagatgcgggtactccctgaatgtgggggcagggtggtcaggagttcagttttgagtgtactgggtttgacatgtgtattcatcatctgagattgtaccttcatacttcttagttgagaaggagcttagagaccacagtaaatatggtatctgtctgcctaatcaatattctttctttacaaattaagaagttcatttgtaaaaacaattcaatgaattgcacaaggctacgcagcataacaattgtcatgcacagttgttcttttaaagtactgtctgggcaataaatcatagccaagttcagaatcctctggcctgtttaagtgaaaaccttccagggctaataattccagtcactaaagaaggggctttaaaaaaaaaaaactcccttgtgccagtgcacggtgtctcacaactgtaatcccagcactttgggaggccaaggtgggctgatcacttgaggtcaggagttcgagaccatcctggacaacatggtgaaaccctgtctctactaaaaatacaaaaaattgccaggtatggtagctcatgcctgtaatcccagctactggggaggctgaggcaggagaatcgctggaagccaggaggtgaaggttgcagtgagccaagatagtaccactctactccagcctaggcgacagagtgagactctgtttcaaaaataataattattataattattttaaaaaatgaaaaaattacaaacctcccttgtaaagaagacatacaactaacattcattaagagattatatcattccggacacactctctcacttaagggtcacaacagccctatgagttaggttccataactattttccccattttacaaaagaggtaaagaaattatagagacgttaagtgatttgttaattaagtagtaaagctgagatttaaaccccgcattctgagcctaaagttctgcactagacctttaccctttcactgtagtattcaagctctataaaaatgcagtcagtgcttggaagggcaactttgaaagctggtcattatgtcacaattgtgtttgtgacaacaggtgttaagaggaagagaggagcaagcatatatatatggcactccaggaagatgaaggtgggattatagaagtaagagttaaaaactggggaatggaggttactaacacccagatttcaaagatgaattttctaacttaaatttactgaagactctatcctctggggaaggcgtgtttaaataaaaccaaggaagg

SEQ ID NO: 10115 - DNA, 2300 bp, Homo sapien
atggaagaaggaaatgttttacatttgaaatgtttccaaactggtgttctttatttcattttagggaacaactgtggcttttccatcctcatttgataattacttcctttgcaaacatcaaacgaattttttcatatgtagaagatggtgcatgaatgatagcacccaaaataatccttgctgttctcacatagcatatgctcttttgatatttttagcatattgtagttgacaaatgaatactaatcactgatttctcttcactctttttctctttcaggcccttgagggaaagctacttgatcaaacatccgatagtcacaaatttgaaaccgtgcttcagaatcccagcacatagtaaaagacaacactgataattatacctgtcaagaagctgtgaacacatggtgtataaattctttaccaaggcaactcaacaccttctttctctgggcttgaaccgccactgctcacgtgggctttacatacattgaccttccattcactgcagtgggaattctcagtgtgcagagggagaggttttctagtctgcaaactgaaacagtgtaagaagaataaagtctatgacttttaaataaatcaccagggccaagattgagtgaatcttgggtccatagcttttccagatattagcaaacccctcattaggctataattcaaactgcatcagttcaaagtgaaacctacacattgctccttaccctcacctgctccacaatccatagtgctgagttgtctgaattggaattccagttaattgcaagttcaacctgttttcctcttgaaaatcgcaaggtatcatactatatttatattttcttcaggttctagaagcaatcggctttttcttttgtttccatgaattttattatgcattaatagaatggaccaattttagctcaacttttagtttgttagaagcaagtgtaggaactctagcactgtagtttttaattattgcttgtatctattattattaattccaacagagtataatgtatatttattctataaaatatatattatcagagtgcatttgttacaacttaggttcttttcttaccaagtattaagaatctagtaagagaatactagcaaaggacctagccctgtgaacagattctcgtatgttatatacataaacccactctcaatattttttgagttttatactttttgattgataaacactgaagaaatctaaactctactcacactgatgtgctgtcatagaagcctatttcatattttaaagcttagcaaaactaaattatatgtgcatatatattcaaatatttgtgtcacacaaagtttaggtcaatttccccaaatataaaccagatatttttggcactctcagataaacaagtattatttctcttataattgggcaggtggaaaccagtgatatcaatattgtgaatggcagatgctgcttcctctagaaaaataaaataaaatcaccaactttaatatattcccataggtaaatagacaatgagatatcatttttcagaaaatatcattcactggaaaataatctgttataactacatttacaggtcataatttttggtttatggtaaatctaggcacctaagtctgattttactttatgaaataaataggaagcaataattgtttgggcatttgaataccttaagcacataaatgaacctaagaaaagaataattgcttagttgaagtattcaaaatagatcagtaaaccacaggcaaatatttgaatgttcccttttctcaaatacagaaattgattccccaagatacaatacaatttgacacttcagataatcccccaaaatagaaatgtatgaagctcagtttagactgtcttcttgaaaataaaacaaaaccaatcaaaactacccagcacattttattatgccctgttgggtgatagtattgtcaataccaggttttccctgctcttcacaatgcatccctcaccagaggaaaaacagcaagaaaactaggacatttgctaatttcaacaatacacccctgtgataacagattcccatccttgaatacatatcattttttactagagagaacgggggtggtgaggtgggggcagttaggaccctgtatgttatgtaaaatagatttacaaaaaggacaagcatgataaaagggaatgaatggagacgatgtattattcagtttgaaagagatagttcacatttttataagaaaaatttaataaaacatatattttagttatcatttaacaaagatatattaaagctattcaggca

SEQ ID NO: 10116 - DNA, 2300 bp, Homo sapien
atgggtacaatttatgacttttgggctgatgaatcaagctgcttaaatacatattccctaataaaggatgttgtaaaataactacattagaagtcaagggatttgtatgttcttttatcctcagttaccgagtgaggtttaataactttgtgcaaaagcttgtaacacactctggtatcattgcgctcatctcaacttctttctgttgcttaattcagggcatgtgaataacggtaaaaaaccaaagttgtttttgcaacctctggccaccgagggcacttccttttaatagtgcttagagtactgcacagaagcttatggtttgctcactgtctcccaagcaagactgggcagaaagggggccatctcattaatctttgcatggttagcacctagcacagagcttaccacacggttccaggggatgtatgcttgtataaataaatttgtatattctttactgttttcaaagcacagtcacatgtatgactccattagaccctcataaaactctgtgagattgcaaggtagaattagtttcctcatatgacagatctctgtgacattgaatgatattatttccattgtatgacagaggaggaaacaggatcagtgagagattgtgtgacttccgaagagtacatgactaagactcaaatgtcaagatcagcattctttcttaaatactaaataaaaataaacatatcgaactactattttaggtttgttcttagggtctgttaagtctatatatggccaatcatctttggctttcccacattggtgaaatgttgttttttaaaattcaattgtagactataaaatgaaaaagaccttcagaaatcctatctgtaatcagaagaaaatggcatcaattatatgcaaatattttgctataaaacagtatctgccttttagagtttattgttagcccaaacaattcagctctgtcacaggaaacaagatggaggcagctttgtcatttccaatcctgcacccacagtcacccctattcagcttatagaaggtttctttatgtttcttgatttcgtagtcaggaaatgaatccctactatgacaagatagtgaaagtagcctttttattggggcgaagaggtcacagccagtatttgaaggctctcgtaatttaatcctgatcaactgactctaaagtcaggtttttaataacaccatctcccactagattacaggctacaggaagtcggagactaaattgaactcctaaatcaaggcgtggcacaaggcaatgtaactcttctatctcaattcctggcatatatgttaatcaatcgataagtggcatctctgaaccactggttagaaatcaacatgaaaagtgctaggtacatatttttcaaacgtagtcatagacaaccaaaatcagtttggacattaagagcaaagtttttgttgctgggtgggtgagggggagtggggcatgtttacaggatgtggtatgtaaaaaattcggagaaaatctgaacactgtacttgtttctaagctacatttactgaattggtaatgtattaacagtggcttgaaaaagaaaaacttagcgatagaaacttacctacacgttttttattttgaagcacttttaagaggtttgcctttttttttttttttctccaggcaatatactcaggtcctaaatgaacatctactgatggaacgctggcctttagtcagttatctttatatgccgttataggtcaacattccgaaaaacttcaacagaaattaactgcaaatgtaattacatcccaaacatttctgataatggaagcattttctctctaaaggggatgggattattggattggcaatttctcttaatctgagaaaactcatctcccactcccttccccatatcccctttccatcctctctcttccccttatacacacacgcacccgcatgcacacacgtatattctgaccattttattagagtggaaagttgaaaggaagcaacccgccagctacacccacccagcgctcctgggggtggaatagcaaagttctagggcagagccttccctcccagagcccggcgatgcagtcgctctcggatacctgctcagctccgcaccgcaactgaagatctgccgccgcggaacagttgcgtctccatctggctaccaacccacccaagctttcttctccaccaccaccaccttccttccttccccctcctccccctcctttccgtcttccctctccacccccgcccccaatctcctcctttttttctcactacgagcggttgctgatgctga

SEQ ID NO: 10117 - DNA, 2300 bp, Homo sapien
gtttttaagctctgaacttcatacttccttctgaaccttcagaggaacccagcacctccaaaacttgagacataccaggttcctaaggagaaaatggattctccttaggaaaatctattttctcctccacaagctcctcctcccacttttaaatcatattccacagattcatcttctttctattctttcatttggtttcttttcttttcctgttctctttatccttgtaggatttttaccacgacaaccgccctctttgattctctttcagtggagtttctttaaggagaagaatgaatgtggctattcaatttgtcatattttactggaattctaagattttttttttttttttaaagtagaagatactcagcctggaattaaaatggtggactttggagtcagattcccctccttgttcaagttgtggcacagagataaaatgatcgtatttgcacagtatcctggagtgagtgacaggattagagtgggttttcccctagccctccaccttgaggtgtcagtaaattgtatcacggcatatctgtaattcaaagcatctgggctttgaaatactgggcatccataaagtttgaatcctgactgtttcacttgctagctgcgtggccttgggcaagtcgatctatctctatactagctccatttgtaaacatgggattatgattcccacttcttggtactttcatgagaattacaggagctaacatttgtttaaagtgcccagtataatgtgaacacatgctaggtgccaataataaatctgtcgttctggaaggatgaagaggttaaatggctttgtaactttctctggatttaaatggtgactgtgtctttggccattcgacattatttgatttgagacctttggaaggactaaagtagactgcagatgtcagggaaaagtctagtgccttgcctctcagtggaaagggaggtggttatttaaagaaatattctctgttttgcattgcacttacctctgttctgtttagcctttatctccacattattcttttcctgcagaatcatttgtttacggattctcaagttatgatccttcccaaggtcaggggcatgccactatttctcacctcagatttggaaatacgtatctttacatttaaaactgcaaatactgtcacaccaagacagaatgtgtttggcataatattaaggcaaaagattgcatctgaatctcgctaaagcatgaataatagcggagcttgacgaatgttaaacctagacagtactatataccacctttctttttacattttcccagtttcctcttttgattcatctttacttacttcctatttttgttttttgtttatttgtttgttttgttttctcattagaaaagccacagaaactccaagcaggcaaattagaagggaggcaatgcaacaagtcctatctgttctctgtctagatcacatgcggagtctggtcagcaggtgaatccgcatcccagtggggtcaccttccctgtgacctgtcaatcaccccaagaagcacttcccaatttgtctggcacaacctccttccactcctcctaccctctcagtggtcaggaaatcccggagcagtccttgccctggagctgcttgtgtttttagtaaccagggactgagctgattttgaaaaatcaatcaatcaataaataacaatcaaagagccttgcctcaacgcaccgagttgctggtttcctgcaggtcagaggcgatgccacctccaccaacgaccttccaaagattaaaccagccgtgtacaaactgctggattgaaaattgagagatgggccgttggcctcctcctaggagtacttgtgtgttgaaatcggaaggacgttctggagtttgagcgcgatttttcccggaaggctgcggggttggaagtgcatgttggggtttggatctcgtgcagcagcgcaactaacctgctgcaacggcgctgtgacacccctgtcccggggcccccactttagcctgttgcttctctggtcgctccaggtcggtttttcccggcgactctagtgtggcttccaaacttctgggctctgggctcacttcggaatttgcccccgccccctactcccttccctcaggccccaggaagttgcaagagtaccatttgtcgcacactcggggaccgcgggtggccggaggagatgaaaccgtcttggctgcagtgtcgtaaagtcaccagcgccggggggctcggagggcccttgcctgggtcctctccggcccggggagccggtgcggccctcagggctt

SEQ ID NO: 10118 - DNA, 2300 bp, Homo sapien
ctatatgcactttcttttttttcctttgagatggagtcttgctctgtcacccaggctggagtgcagtggcacgatcttgctcactacaacctccgcctcccaggttcaagcgattctcctgcctcagcctctcgagtagctgggactacaggactacagaggcatgccaccaggctcagctaatttttttttttttttttttttttttagtagaggcagggtttcaccgtgctagccaggatggtctcgatctccagacctcgtgatctgcccgcctcggccttccaaagtgctgggattacaggcatgatgcactgcgcctggcctctctatgtacttatactctacctaccttaaaagtaaagtcactagatgatctcatatattctcataaaaaccctgtaacctgccaatatgctgttccgatcttttggtaggatcagtcataattcttaaagatgtctgcggaacttgaaaaatatccagatgggactagcactctgtgccctgaataaagacatgaaagtgaatcctatctcagacatagcaatggaagcaatatgaaggtgctctcttttgggagtgggggacaaatacaatgtttatggtgtttaaaaaatccaatcagtgcaagtaaaagtaaagggtgaatgttagttactcagaaataggaccacaaagttatcacagatagttctttataatttccagcttactgagctacttttgaagacaagtaaactcacagattgtcataaatggggctattaaagtaaaacagaaaacatgttggtgtaaatgttgtgtgcagttttggctgccacaacttgaaaaagaaaaatgcaattgtaacaataggtgttgtagaagaggagggaagcctgaagtgtgtggtaagattaagaatttgggattcttcattgtaaaaatataagtttttttttttaatggtctttaaatatctgacaggcaaatcccaaaatactgagagtagaaaagcttagagtacatgacaaaacttcctatttcctacattaagtccctctatcatttattttgtaataaagaatcatacaaggcaaatatatatatatatttacatatgtaaaatgtctattcacatacacacatgtaaacatatgcatgtatccatgcatgtgtacatatttatatgcttatgtatatgtatgtatacatatatatatacatgtgtgcgtttgtgtgtgtgtgtgtgtgtgtatcaattcagcctgacaagaaacaataaagggggaaaataaattttatttgaaggaaagaaaagaaacccatcaccagatgatggcaggcgtcagagaaaaaaaatgaatggttctgattgtttaaaagatctaacacgtcagcactaaaccttgttttgacagtggtttgacagatggcatcccctttttctagagtaagcctccaccccttttctaaacctgatgaactccaatgtcttcaccaggagtacttcaagacattgcaaaaataccacctcttctgggaagtttcaccccatcctgttatttgtgtcaaatgtctttcaggtcctctttcacagccctcagggcctgcaaacctcatcagaggactgatatccccacctagtgctgtgccttctccaccactttgagcacagtgaggacaacatctttgtatcttcagcacagtgtctgggatagaataggcatttaatacatttgttgactgtctaaatgagtgaacagtttagtgtataaacccgtgtgaacaatgcaattatttcaacaaacactctttgttcaggagaaacccttgacacttgtagaacttagtgaatcttgaatcttcttagaaggcataaaaagtttctattcgggatatttcatcaaacatgaaatatcttgatacaggttttcagatgattctgaagctatgtccatggaggatattttggcagttgtataatttttttgtcgatctgaacaactgtgagctaaggggcaagggtgcaaccagttcagcactttaactgcaagagcgtaccacagatcaaacaaaaaagttcactgctgttttttatttgactttcactcttttttttttctggggcaggaagtaagtgcccatcaggacaaaaggccttatctaccactttcttgtcatgctttcttttcaatcttttccttttgatttctttccccctgttctcttttgacactgaacatttttcctttttatattatcatgatccctttatgatatcaaactgaacaagataaatattataatcactaaat

SEQ ID NO: 10119 - DNA, 2300 bp, Homo sapien
tattatctgagcatttgagaggcaagaccaaattgcagatctagagtctagattaataaatggtaaaaagatgcttgattaaaatttttatactcattctttaaaaaataaaagtaagtgggtatcaaagactaacgaaaaacagaaattacggctcttctcactccttcagcttcattttaattgttttaaatgagaatctttgacggcaacctctaattattttgacatttatgccttttgactgataggagcacagggtaaaataaaaagcaataattgctagaaccaaggaaataatattgttaatgaaattttaaattttagtctttacaacttttaatgctttttcacgcatgttctcatttttaagtctcttttttttggtcagatgggtttaagtattcactaatttacagacaaagtgacattggtaaatgtcgtttgaagaagtactcatctgagaggtaaatagaaatttgtcaacttatcctttacatttatgtttcaggttttacaattgaattactactcagttatgtcttcccttaccttttatttctggtcatcatttctagtcaatgcatcttaccctctgtaccatatggtctaaacatttacctagttttaataatgtttagagttactgataaaaatgggttctaaatgcagggacatgtaggatggagagaaaattttaaaacatgtttaattgaaattattactgatattaagtatcaccatctgtcataacacatggacagcatattgtctacaaaagctactttttctagtctgtaaaatgaatagtttttataaagtgtttgcaaattgattaatatcagattcatcaatctgttgagccataggaaaagatcttctcaatagaacaaactagcaaagtgcatggacgataggataggatacagtggaaaaataactgtttcgtttacatgggaaggtgcacgtgtaaagcctactggcagggggcttagaatttctaatgttcccatggagatcaacagggccagctgcatgctaaccatgtcatacaatctagaaaatagctctcaaataccaacaacactgcatctgatatttgctaagagaccaggtgttgttacaggtgaataaaataatgttccacagcatgatgcctatgttttattagtggcacctgaggagagcagcaatgttagtaactaacggaaagtcaatttctgtttcattttcctgatttgtgtatgtgtgttaaggtgcagagctatgctaaaaagcataactaatagcacagttattgattagatccatgtttgccctttcataaaaaacaattttttttgcataagagcagttataattgttgtactaaaagatgcttcaaaatacatgtgaatggaatataccttctatctcttagcaggtgttcacctactcattctgagtattcactcagttatgtcttattgggccaatgatgattaatgttttttaaaacaataaatgaacttaattattaaattttccattagttcttatttatggtgacatttatacccagtgttcaaatattaatctttcatttaggttgaatatggtcccagtgttggggagagctatttgaaactgatttgtgaaaactttactacaatgatataatgatccctacttttgcccaaaatgcaatataagacaaattttttaaccttagattcaactcactggaattcagccctaagagttctagagttcataactaaagaattgctcagctttaaagtgtgcttgcatgatcctcagtgaagcgttgtaatgagattccagttagaatatgactttgtttcctccaagcagctattattatttaatcatcttaagaaatagaggtccttatgttagtctgcatttgaggtgtataactacattttacctttcttcgcattaaattttgttctggaaatatgtctgaaaatgtagtgttgataatgtgtggtgccattagaaaagtttgtattgcatgtaattttgtgaaatcatgttttctttagaagactaataatgttatgtgagaatggattctaaaaatggcactaatgaggacaaattattttgtgttgactattgaaggacccaaagaaataatgattcaaagataattttataaaagccaaagtaacttgtagctaatatataaaatacttttgaccaggaacttttaaagtggatgctatgaagatagagagtgtttttacacattgtttattgattttaatttcactttttctctccttagggtgtga

SEQ ID NO: 10120 - DNA, 2300 bp, Homo sapien
tcaatttttgtttttaaatttacagtagtaaccattattattaaacaatttatcttggatggctctctctaggtgtataaattatacaagtcacataactttttgaacactgtttccttatttctaaataagagtaacatttttatatgctttccagggcttctgttttgtgatgttatgcaataaagcattaacacagtgcctaccagtagaaaggcagaatatgtcttagctagtagtgctactaatatttcagaaaagtcagaggactgacttgatttagactaacacattcattttacagacaaggaaaatgaggcacagaggttttgtaatttgcttaaggtcacacaatttggcttagtagacctatgaagaaaacctagctttgggagacaaaatatgattcctaacatatgtttcttatttgcatataaactacaaaattcagagatttgacttttgcttctctaacataaaaatattggatttcccttctaggacaatggctagttacaaaaacgtggatcatttggtttaacctagcagatacatttataaaaagatacttcagattttttttttattcaaggcggaaatagatattctgtgaagtcagtgacttctccagccctggaaaggtgaacccagatttagtgaaatcctctgtttaaacagtctgtcatctctgctccttttatcagaaaaaaatgttttgtgttgagacatttttaggggtttctgatggtggaagacgttaaacacatttctctgttagtatttcagtgccatttttatatctagttgtaagaaatagttaagctttcttccctcatgtaacttcagtacagaagtttctcaactggcttgcagacagtacaggttaaacatttaaaaccaaggaatcagtgactttatgactgataatttttatgttttgtgattgtttagagattaaaatcataatgtaatattaaatagtataataataaaaaaaaacgcaggatccttttaggaaagaaaagaaaatcctttttgtctaaaaaacaattaatttaatataacacatttattgagtaccttatgcaaacttgtcactttgcatacatttttaaaaatacttcttgcataagcactatgagaaagagatttctcccatttcatagacagggaaactgaacgggttacagaatgtgcctggggcatatagtgatttggccactgtactgagatttagggaaacaaagataaattagccatggcctccgtgaactcacaatctagttagatacagatacttctactaactgtcaatacagaattttaaaacaaagtgctccaggaacacaaagaagggaacaattaatttttttctgagagcaacaaccttcttttctcatatctgcttaaggtagaattacctggatgaatgaggccacataaataatctattaaagcctaaaagatgatgacttatcttcatatttagtttgcaccaagggttactgaatgtggatacaagctttaatctcctaaactcttttaggattctatcaggacagcacagaaagtattgagataatatttgggaagattaaattgaccaaatttaaagctcctaagtggatattacgctttaaatcagaataaggggtttttggtgcttgtaagtattttatttttgttgcgtatattttttggtgtgtttgaaaacttcatttcctttactttttaaaaagctgaacatgtttttaatgcttctaatagattacaagggtatatttagtggacatagacatagagatgaaattaccacgtttgaaatatgatgtcttcatttaagggatattctgaaggaaaatttctgatgttattaggaatcagatacatgtgctctttatttttttgtaagatattttagtttatatttgttcatggtctcacaggaattaaaagattactctcttaagctagagctttttgggttgaatataaaaatatagaaaaatgtttaagctttaagattatgaatttttattcaaatatttatattttactttgtagttatgattttggatgacaacatgcaaaaactgaaggctcggtgtttaggaaatattgtggtaaagtaagcaaaaatttcaatactactatattaaagggcaaaaactggtgtatatactaagaaaaaatggggtcattgcagtgttactgctactgaggaagttgtagaaagaacttgtgtgttgcttaagaactgtgtcagctgtgttgtaatttaaacatagaagccccataaa

SEQ ID NO: 10121 - DNA, 2300 bp, Homo sapien
tgtcttgagtcagtcacctaattaatttaaacactactaactgcatgttaaaatgtaattttgaaggatcacagatatctttatgaatttagattatataatttcaacaacattttgatccacttactctaaaatttaaataatattatttaaatttttatttttaataaaatatatttttaaataatattatttaaaaaattatggcatttggggaccatggtaactctgtatagcttctaaattggaaatttgaggacgacttggaggaaaggaattggttatcatgtctttattatcttccacatttataaaataagaatatcagaaggaaagccttacaaaatgtaaatgttgaattgtagtttgcataagcacaccagaattgaaatgttaaatgtttgctttcatagattaaatttgaatttattgcataaaatagtatatatgcatctgaatcaaatgaataggttactatttcttttcagttactgcatgacatatttatatatagttctatattggcataaagtgagtttcactgttttagaatgagcttataaaatgtgacagaatatgctgtggagttaaatttgtagtcctgacatagagtcctttaaatgtaataattacttaacttgcaatgattaaaatgttgatataacttcatatgtaatccttgcataacatactaacaattttgctatcagcaatgtcacatgtgttgaacactctgcacctgtggtaacctgacggtcacctccaagacatgtatctaaccttggcactgggcaaacatgagcttacaaggaaactgtgctgcctattcactttaggcactattttgtttccacagcaacaaatcaatgcaggaacagtttgggattggcccctaatgtcatttaggagagtcacaaacaagatttcttgttctcacagcattgttgtcaattgataatttgaggactttcaatcattttcatttaaaatttctaattaaacctatctgagagtaagccattaaattctagaccaatatctgagagtggaccgttagaccaatatttgagaccaagtatctgagagtaggccattagattctagaccaatgaccatagtgtgcattcagagaccagaagtcatttcataagttttcctgttgctgaggaaactcaatcttgcttgaattggggactactcacaataacccccaggcttagtttttttatctttttttctacagagcaaggtttagaataaattttgttccaaattaattacacctgagtcattgtctagcattttcctcaacattgtgaaactactgtttccattatttttaagtaatatagacaaacaaaccctaatacaaacttttaacaatctatcagagacatattctggtgtttggtttcccataattccaattattatataactctttcagagttgctttattcattctgtagtagtctttcattgccagccatcactaacctttcatatcttaggttgatagctttttattttagtatattattgttttttatttaaaaccatcaactgcatcgtgttcaccaaatatcaatgtagttctttccacataaaattctgtctattaaagtattaaatttgctgtcacacttttcttttaagcattctgtgctatgttctgtttggtgtcagtgtctttagttctgatttttcaattttgtccctctccttttccttgactcgttagtctgatccaacctcttctacctcatctgatgattatcaatatgttatggaagctaaactacaagaaatgatctccatacgtaggaaggtagtcctactggactttactttctattgctaaatagaatccatctaagtttttcttttcatttataaaaattatgttacttttatttattgataatcaaccatctgtgcagttcagtgcttcaggagcttaagattggacaatggcaggtttgtgttcaaaccatgcacagtctgcatgttacatttggctgatttcattgctcataaataactccaatgttttgctgatgcttggatgtaacaggcctttgtagctgacacatttcaagcaatgctgttcagctgcctgtttgaagaaagtttattttttaaaaactatgtttgcagttggtagtagcttgctttacattttatttcaatttatttagaggaaaagtgttaaccaaatcttacatttcaggtgtattcttcatatttcttaacaggctgaagagagacatggaaatattgaagaacgtatgagacattta

SEQ ID NO: 10122 - DNA, 2300 bp, Homo sapien
tatgaagtttgtctgaaaatagactaggctatcctgtgaggtgaagagtttcctgtagttaggggtatttaagccacatcaaattgtgggtcgattgggtggtctagacccttcctcctcaagtgtagtaccatctgggagtcattagaagggtagaatttcaggtttcaccccattcctggtgaatcagtatctacaacttaacaagatccatggatgatctgtatgcacattatgtctgagaaatagtgctccagttgacatctaatgaattttcgtattatttttatacttcttataggattgtgttgtgttgtaaaatttaaataacagtctagaatagaagttgggtaaatacatgagctttaccccactttccattgtaaagtcgctaactgaattaaatacttccctcagaaacaaagattgtttcttggatattgtagttaattttaagtgaacagttatttacatactagttctttgttaactttggactcttggcgttacacaaaagtaaaacacgtcttttggctttcgtgtagcacactcagaatattttcagtaacccccaaaatatattcagtgtttaatcctccaattccttcatgcatgtcctcttcattttcaccaaacccagcaggattcgtgactctccctcacagaaacgttccctttctgctcagagtaggtactgattttgtctcctgcttcctcagtctgtatgaatggacagcagcaacggaaagaaaagagggtaggtaaagggaggtggagatataagggggactggagcgcgatggagagaccagactctgctcaaagctaaaatttactcgggcagggaatacttaacatacaattcccattaccaaaacaatatgaatgaagaagaactgaagaggtaatgagaaatgacagatgccgccacaccctagattggctcaggtccctacaaccatgactaccatgccctggcccagtgggaagaaagctgcttaaagaaatgacaagcacagaagaccggggagccaaaaggtgcccaagtccgttcccatccccaccagcgcaggctgacacaagcgaaggctgtagagcccattgtgtgaaagaagcccaggcggggaagcgtgtgcccccttcccactttgcccatccctggccctcgccttcgcagggggcactgggagcagagcgagcctcggcagcccgggagcggctctgggggagacgagtgtatccgcgggcgcgtgtgcgtgaggaggagagcaaagacgtgattacttcagaatttatttaagggccggtggaaaccactgcagcagcttccaggggaagcccttgttccagaggaagaggaggtggtggctgccaaggaggaggaggggaggagacggaggaggaggagtagcagccaccgcacgaggcaagtgaggagagaagatgctgtagcgtcctcaccggctgccagcaggttggttcttccggccaattgaagcaagcaaagaggcttgcagaaaggccgggaggagaaaaatgggtgtgtgtgctgtggcggcgggggggcggcgggggggagggaaggggggccgggggacggcgtggggtgatgtttgcctttccagagaaaaagcgcctcctttaagtgaaacgagacacgggagcgcgcggaaacaggctgggggccaggaggagacctgtcctgctttttgcatccctagggactcgttttcctttaggtttctaactcccagggttagccttaaactccagaggggctccaggaggggagactgggtggagaacttctctcccagatacttctcacgccttttctccaagctttcttttggagggacgccccacacaccccgggtggcccgggcgcggagggggagcggcgccgcgtggttaagtttctgaaagtcaaacccagtccccggtctccggtctccgccccggggctccagctgcacgcggggagctgcggctgttctggcaaaggggccgcggctgctttaagagccgcctccccctctcctcctttgacaatggtctgaaccgagctttgcttcccaaagcaaaatttgtaatatgccatttttccgatggacgcttctccttttggctgctgacggagccacgggaagatgccgagctcctgccacgccaccgggccggggcacgttccgggagggcgccggggcacgcgtgtgtctgagctgcctttctcctcccgttgctagggaaatggtccaggagtgctgggtgtgagcctcccttctcctcaagccggagac

SEQ ID NO: 10123 - DNA, 2300 bp, Homo sapien
actcgaaggatagggcccagcaatctgtgttgtaacaagcccttctggagtgtctcttgtatgctaaatttaagggcctaaactagagaaactggtgcaggtggtaactcttctcatgtgaatcggctcacctaatgcctcatgcaaaattgctactttaaacagtctttctcagttttaatatattatttacactctttgcagtgaagttagcagtgataatgtcaagtttttcagctgaaatttactatgaagactgtatcttcttaacaaaatatcctttaactcgtgatatttttttctgcctcccattatcaaagtttttctttctgcgatacctaccatgggttagcctttaactatgctgtgtcaactgtatgtggggattatacttacaattaaaacttgtatttgacatacgaatgggactcaaggaaatcaaaactcttcttggaaacagtaggaacatctgagccagtaattaacaaacgttgattgccaaggaaattcaaaccaaggtttaataaggaaggaattcttgtaaaaatagacataatagctatatgtaaaaataagaatatctctcatgtataaggaatttttatgttttgtgtagaattctagagagtgaaagttatgagtactgatatatgattagtatgttgaagctattacaatatgaagtttgtctgaaaatagactaggctatcctgtgaggtgaagagtttcctgtagttaggggtatttaagccacatcaaattgtgggtcgattgggtggtctagacccttcctcctcaagtgtagtaccatctgggagtcattagaagggtagaatttcaggtttcaccccattcctggtgaatcagtatctacaacttaacaagatccatggatgatctgtatgcacattatgtctgagaaatagtgctccagttgacatctaatgaattttcgtattatttttatacttcttataggattgtgttgtgttgtaaaatttaaataacagtctagaatagaagttgggtaaatacatgagctttaccccactttccattgtaaagtcgctaactgaattaaatacttccctcagaaacaaagattgtttcttggatattgtagttaattttaagtgaacagttatttacatactagttctttgttaactttggactcttggcgttacacaaaagtaaaacacgtcttttggctttcgtgtagcacactcagaatattttcagtaacccccaaaatatattcagtgtttaatcctccaattccttcatgcatgtcctcttcattttcaccaaacccagcaggattcgtgactctccctcacagaaacgttccctttctgctcagagtaggtactgattttgtctcctgcttcctcagtctgtatgaatggacagcagcaacggaaagaaaagagggtaggtaaagggaggtggagatataagggggactggagcgcgatggagagaccagactctgctcaaagctaaaatttactcgggcagggaatacttaacatacaattcccattaccaaaacaatatgaatgaagaagaactgaagaggtaatgagaaatgacagatgccgccacaccctagattggctcaggtccctacaaccatgactaccatgccctggcccagtgggaagaaagctgcttaaagaaatgacaagcacagaagaccggggagccaaaaggtgcccaagtccgttcccatccccaccagcgcaggctgacacaagcgaaggctgtagagcccattgtgtgaaagaagcccaggcggggaagcgtgtgcccccttcccactttgcccatccctggccctcgccttcgcagggggcactgggagcagagcgagcctcggcagcccgggagcggctctgggggagacgagtgtatccgcgggcgcgtgtgcgtgaggaggagagcaaagacgtgattacttcagaatttatttaagggccggtggaaaccactgcagcagcttccaggggaagcccttgttccagaggaagaggaggtggtggctgccaaggaggaggaggggaggagacggaggaggaggagtagcagccaccgcacgaggcaagtgaggagagaagatgctgtagcgtcctcaccggctgccagcaggttggttcttccggccaattgaagcaagcaaagaggcttgcagaaaggccgggaggagaaaaatgggtgtgtgtgctgtggcggcgggggggcggcgggggggagggaaggggggccgggggacggcgtggggtgatgtttgcctttcc

SEQ ID NO: 10124 - DNA, 2300 bp, Homo sapien
cttgcctggcaactgcctcagaagaggccatcactgttgcctcaggcagtgcagggtttttttttcctcagacaaagatgaaaaggctcttggcagcatgggtcggggaggggatgttgccaccattggggatggggaagctgtttcttcaggcaaaaatgattcatcagagtttacaagctcagtgtccctagcttcatcagggtcctcccacatgtccccattccaaagtgcacagtcccattcttttccaatcaatgccctcactttaacagtagacacctggcgaggctgtgcaggcacctttggttgcaggtcagccactcgcgtgataagagctggtgtctgtttttccacagtttcagctctttctctacaggagatgagactctcactcagggcaatcttagtagatttgaggttcagtatctgcttctaaatctaggagttggaatccctgagttcatcattttctttcatcactttgtccactaaacttaggagcaaccaaccagcttcattatgttccttggttctctacatatggtcaaaggtattgtgtatagagtcactaaactccttgcctcttatgtgtggtcaatcaggggtgtcaaatgcatttattttgcataactctctaaacagttcatggcaaggactatcagtgttctctatagtattagaagtagagtccctagcaattctgggtctaatcatattgagcagccaactccagaagccccaaaaccaacaaaagaactccatccttaatattctattcctctagaaccactcctggtacccaaatctgtattaatcagggttctcaaaagacacagaactgataggatatatatacatatgtttattaggagtattaactcacatgatcaataggctgtctgcaagctgaagaacaaggaagccagtccaagtctcaacctgaagaacttagagtccaatgtttgaagcaggaagcatccggcatgggagaaggatgtaggcttggaggctatgccaatctagccttttcacgtttttctgcctgctttatatccaggccatgctggcaactgattaggtggtgcccacccagattagggatgggtctgcctttcccagcccactgactcaaatattaacctcctttggcaacaccctcacagacacacccaagatcaatactttgcatccttcaatccaatcaagttgacactcaatattaccatcacaatgaggttcccagaagtttcatagtgtgggcagtatctgtcaaattgcctagggtaaaattacttctgttataataatatttaatcgttatgtttgtattttagagcatattaatgtgtctttattttcaatttgtgctttctcttttgtttgtgaaaattttaatagcatctttacctgttttttatagctgagtcacttacaaaaactacccaaagctaaaataatttttaatttttgattcaattgataatttttagaatgctgtaatcaacatatccatgaaaaaattgcgtgtactttgtaaaatatatcatgcatgtggcaagaatttaaagaaaagagagggttggacactatatttagaaaaaatacatggatcaaggtcatagtattgtttttagttttaaaactacagtgtgaccatgagagaccaatgaatttggtcaggaatattttgagaatcatagtcgcattaaattttgcacctgcactgcttaaatgaggggcagaaagctacaagtcaagataggatctttgctgatctgacccaaatatttgcgtagtttttgccctgttaaagagaaattggctgggtgtggtggctcacacctgtagtctcagtactttgggaggccaaggcaagcagatcagcaggtcaggagttccagacaagcctggccaataaggtgaaagcccatctctactaaaaatacaaaaattaactgggcgtgttggcaggcgcctgtagtcccagctacttgggaagctgaggcaggagaatcgcttgaacccgggaggcagaggttgcagtgagcctagatcacaccactgcaactccagcctgggacaacagagagagactctgtcaaaaaaaaaaaaagaaaaaaaagaaaaaaaggaaaagaaaaatagaaattgcaccaaaccagttaaaccatcacaaaagactttattcaagagttttacaataggggagatagaaaattgctgtataagagaagggctgaactaaactccactgaagcaaaaggtagaagagtgaaaaagtattgaaaagacttggg

SEQ ID NO: 10125 - DNA, 2300 bp, Homo sapien
catagagacaggtaatcaattgtttattactcaaggagaccagctgggaatctatttatttcaataatcatggtaagaagtgaggagggtcacaattgaggcagtagtagcagaagtagaaaagaaaggatgcattttttttaagataggagtagaagtaacaagatttagtaattctgatgaccaaaacccagatatgatattctaataataactatgtagctgataaagagatttcacctactgagtggacattctataccaggtactgaaacaagcactctgttttactgaatgcttgtggaaactctgcaaaaattatttgtcaattttatcagagactgaggatgtgatagatttcaaaaatgattttaacactttgcacaatctcccatcaaaagacagagcctatttcctcacaaggcttggtcttgtggcttactttgatcaataggacacaatgggaatgacattctaccagcttagtccagccctgtctcgtgggcccttcttctgttgtatccccattacacagagcaagtataagtgataataagaccaataaataaaacatggaatgaacctcatgcataaagatttcctaaattttgtaaaacttttcaggttccccagaaaagaccttactattacataagttttaaatcacatattctctgtttcttggtccacatcactccctaccttgccatcatgacaccttaattcctcaggaaaactgattgcccatttggatcaggagaaaatgctaatgtacatgaacaaatcaagaaatatcggcaccttttaggatcctctgttaagttcttggggcacaagcagtgaacctctgatgatgtttcatagaaatctatgaatgtaattctatggacttgtaatagtttaccataataaccatgagccaagaattctgctctttggagccattcatggaataatacatcagagctagaagaggaattaaagaaaatatattctaactctgttcttttaaagatgagaaaactgaagttcagaaatattgtcaccagcccaaggtcatacaattcattagttagaaagatggaatcaaatacaggtcttctaaaaactctgactaatgctactgcaatttaaaaatagtgctgcctccaatgaataattggttaatagcagggaaaatcaaaatggacgctttcatctccctaggaaatttcaaatcctacaacattaaagtaaaactaaatgaaaggaatctaaacaacgaaagtacaagagaacatatttttaaaaatgaaacagtatttccttaacaagctacatttcaacacttttcttgaaaagcaaaaatcaatttttagatagttcactagtgaggtaaaattcagttgagactatttttaagtaaaattaaacattcaataatagggtttaaacactttgaagaagttctttttaaaaatgttgtagaggtataattaaagcctaaaaaagaaacattagaagtaaagtgattgtgatcattctctttccccaggtaagataatctccaataatcattttatccttaactaatagtaacaacttctgaagtttaaacaataactcttatttaacctgcagtttgagaaatacatttgaactacctaaaaatatcataaattcaactttttctaaagttctctaaattgtgcatctaattgtctcattctcacaatggcagttttggtagtttttacaattaagggataaaagttttcaagaactttttgaaagttacataggagacttggaataaatataaaaacagaacagagctggtgattcagtagctatattgtgggatacccttccagccaacacctttctgggaagcatcctcagacccagactgatgaaggagtgggcagccttctgtgcaacttgtgactttccagctagcacagttgatgagaagagaaatgagcatatatttcaagataagataatcttattttctctcttggaaatttatattttgagattcagggacacgacttgctggcattggttcttggaattataaggtattgttcaactgctgttagaactagtgtcatagaaacctagattcaccatgagtcatcaagggacttaaagacagacgtatctggagaaaaagagaataaagctgaacatgcagcctccagccccagagaaagactgagagagaacaggagaatagaaccttattagacaccagatgtatttccagcaactgggttccttgaaatttctctggttcataagtgcttcacagacat

SEQ ID NO: 10126 - DNA, 2300 bp, Homo sapien
ttaggaacacctgagtttatgtgagtaatccattctggagctgtgcaacatggcagctctgaagtatatattcattacagtattatctttcccaatttaaagaggacatagtgttatttttcccattttaaagaagaggtcactggggcactaacatgttgagtctggctctagaacccatactgttaatgactaaaattataacacctctcagaagttatttttcaaaaatatagtcataacatatggtccaatcaagttaccacctgtacttgagaggaagaaacccaaattccagagctcttaattcccattacgttactttgtcaattaggctaaaccagcctaattcagttattgaagctaaaaatagagcctccatgaaaatgtttccctaattaaaccgtgacttctaaaatgtgttaaataagaaaaaatacaattcctatataaattatcctatagtacttttaaataataaaacaacacttaaaggatttcaaatgaagaaaatacatactttactgttttaatacattgttcttctggctgaggctggtcaaagctacactgatcttcaaataaaggctcgtcaatgctacactgttcttcaagcaacggctggtgaacttgttctgacaaaggatggtcgacttttcttgcttgcttcctatgtctttcctcttcagctaaatagagatgtttcagattatctgggtatcgatctgtgaattgagattccagtgacgtttgagccttcttttccttccgtagcaatttcttgtaactttgctgtattttcagttttcttcgaaaagcaaagccttgtcctacattgaggaatatcatccaaaattactttcagagaaaagaagttgaacgaagaatggagctgttaattacaaatgaaaactttttttacgtcatcacattcagattctagtattatattttgctttaaaaaattatttcaagcaacaaatttaagctgatggattgcatagtaagttggccctttgcaaaaagaccaggctaacagtcatgcggaaatccaagtaagaatctcaaagaaaaactgaccagttcagactgttgcacaacttgagtttacagctgtattcacaaatcaaaacaaattccttagttcatctaaaacacttaatctgagccttcaataaatgcttaaaaaataggaaagaaaatgccacatctagtatcttggacaaactacatgttttcgaaaatgtttcaacacgaaagaaaaagacagtgtatggttgtctgaaaagctagcaattatcggaagactgaatttaacatttatatattccaagtgggatctaagagaccttacagacagcaatacaaaatgacaaacacaaattaaagcgaaggctggagggcctcgggtatttgtaataaggaagaattcggagcagtgtttctggccctgtcctcctctctatcctttaccttaccacatgcgcaagagttcacagggtcatagactctctctgctcagtttctcaggaaaaatataggaaaaaagttctgatgaaatacagggttacgtcagaaaagacgtttaaataatagcaacactgctccgtcttcctatctagagctctgcgaagctcacagctttagcgggctcaggaatgaattcccttgccccaagtaggaccgggtctggttcctaaatccttcttccaagcttcagcgaatcttatatcctaaaacttagcaagcctgaggatttgcaaatggttgccttcttacataccctcgcgaacgctccccacgaaggcttgcgggtggttaggccgccatgtcttctgtctcacattcttattcctgtacccgacagtggaaaccccttcaccacgcgcctcaataccaccaggccgccacttcgcggaccgcctcaccggcgccattgcagccgactaactgcgtcatcagaagaccacgacggacgcccacaaaatacgtcaccaagccgaagcaatcaatcgctcagaaggaatccggctcggagctctactgagcctgcctgtgctaatttgggccgagctggcgcctcacggccatgtttgcgccacctacagcctcggagggtgagcgtcatggcggcttcttgccctctcccggtgaccccggacctgcccacgctgcgtgccaagttgcagggactgctgcagttcctgagggatgccctgtccatttccaatgcacataccgtggatttctacacagaatccgtgtgggaggagctggtcgacttgccaccggagacagtg

SEQ ID NO: 10127 - DNA, 2300 bp, Homo sapien
ctcccttatctagtatactttttttcttacagcactaaaaaagtttcaaatcagatgacccaggtttgagaatcttccattatcagctatatcccttgcaaattaactcctcaagttataattccacaaatcgacaataacagaacctatcttgcaaggctgatgtaaagattaaaagagaaaatacacatgaagacacttagcacactacagggtatatagtaaatatcaaataatccaattattattagaatatgtaagacaatctgactctaccattgtctggagaccaggctaaacacgtattaaagtcttacactctaaacttgagagtagtttcattttatttatttaaaactaacatgagtaactcattaattcctccattcaacaaatattcatccagtatctaatgtatgccaagtattttaccaagtgctgggaatacatcagttgacaagtcagacaaagactctgctcttttggagtttaagtaaaattgtcatatcataagtgccatatatttattatgagagcaaactgaagaagtgcctaacttttcaataacaattacttaaaaaaacaacaacagtatttaccaagtgctattataagaggtccctctagtgatgctttgcattcagagaatgctcaatgaataaagttcactagtaagggtaactttgggaagtctagaaggaaagtaaaaatcccagaagcctgttggtgtccatcattctacttccaaaatatgcttgcctgagaagaatctacatttcttgagggtaggaaaagcttgagcctacaaaaattcaagacacatattaggtactttaaaatagtttttaaatgaaatagtgactatccgaataccatcctagtccaagatacaatcatctgttgtactactgaggtagtctcctaactggcctctcagcttcagcttttgccctagtctattcttcaaataattcacagttatcttttcaaatgtgaattaggtcactatgttgcctaaataatcccaagggtttccgtcacacttaaaatccaaaatccttccaaggcctagaaaggcctgtgccatctggcctctgcttgcctcccgtcctgcacctgcagcccctcacctggctagagccaagcctagcctgcggttcccaccgcctgcaacccctccctgtggctctgcagctagtgccttctcatgttcctgacctcctaaattgaggcagcctccttacacaatccctaccacattacactgtttttattttctacttcattaccaccacttgaaattatctttattaactgttgagtaatcttccaccacatgctggcatttataaaacctgtgagagcactgctcccctagtttccctagcgtcaattattatggaattactagatgaaggaactcccctgccctgtttcctgctttctttaaattgtggacatacacaagcacccaaagaaagagtgatcctgattccaaagaacatccccaccccacccctcaactaatccgacccctcctcggtttcccagcgggccgccccgcctccgccgccacgcacctggttctgctggcttccaccagggggctcgcttcgtctgccgggaccttctcctccgcctcccttcccgccccgcctaccccaccacccacctgcttcccactctgcttccactagggggcgcgtctctgagggcagggcctccgtctccgacgctgacttcctcagcgcagccagcactgtctccggtggcaagtcgaccagctcctcccacacggattctgtgtagaaatccacggtatgtgcattggaaatggacagggcatccctcaggaactgcagcagtccctgcaacttggcacgcagcgtgggcaggtccggggtcaccgggagagggcaagaagccgccatgacgctcaccctccgaggctgtaggtggcgcaaacatggccgtgaggcgccagctcggcccaaattagcacaggcaggctcagtagagctccgagccggattccttctgagcgattgattgcttcggcttggtgacgtattttgtgggcgtccgtcgtggtcttctgatgacgcagttagtcggctgcaatggcgccggtgaggcggtccgcgaagtggcggcctggtggtattgaggcgcgtggtgaaggggtttccactgtcgggtacaggaataagaatgtgagacagaagacatggcggcctaaccacccgcaagccttcgtggggagcgttcgcgagggtatgtaagaaggcaaccatttgcaa

SEQ ID NO: 10128 - DNA, 2300 bp, Homo sapien
aattagttttattagctgtaaaacaggaagttgttggacatttaaaaatacaacaggaagttgtggaacatttaaaaattgggaatgtataggttttcaaaggaaacttctgcctaaagttaaaattggggaagggaggcattgcaggggtagaagtacggggaccacttagagggctactgcatttgtctatgcaggagatgagggcagctgggctgtggactcaagtagtaaagatgtgataggatgtgttttggaggtaactgtccaggtttttgttaacaagtaaaatgaaacgaggaagctagaaagcatagtaataatgatatactagctaatacttctgtagcactttcctggtcccttttagatattttacataggttaactactttaatactcataataacagtactcataagataagtactattattatcactgtttcatagattagaaaacagagtcacaaagaggttgaacgactggccaaagatcgcccaaatagtaatagcagagtatgcactcaaacttaaacatctgatcccacagtatgtgttcttccttcagtgttctaggacaccatatacatattttatatatactatatatatctcagcatgtaagtgcattggagagacacagagcatcaggatggactaactgatatgattttcaaaattttcaagtgagcaaaggttatggaggaaaagggtaaaagatcagtccctacctgtaaagacataattccttttatttttgtttacatatatttgtccagggcacaaaaaatgtgctactgtggatggcataacaggtataatattaataaatattcatcattttatctgtgtgtatccaatacagatttctcagatttccttgtgaaatcagggaaatatgtagctttgttctacagaagcccagaccacggtattttctttccaggccactgctagacacccagggggctcaatttcttgccacagtttcggagagcttgctggttaggtgctgctcttggttggaaccagtcggcccgcatgcaaaacagacctgtcttccacaccttgtggttactatgcagcagggggcgctgcagtagtgtacatcgcggtgcaccggagctactctcctggccagaaagccaacaagccgggaggaggcgtgtcaggcagccctgggtcctctttggtcttgcaactttagtacccagagcttgttctacacagaccattctacaccatatttcaccatgttggatgctttccatccagtcctgcctccgagcggaaaggaaagggcattagcttactgccttactaggtttaagtataatgctgtaccggcttgcactagaggtttctctcctgtgttctcagggtcaacccgacagtccctctgaaaccacgaaggggtccccgggcagttgctgcggggtgtgtgtgtgtctttctttccctttttggggtcctttctttttaaccttactgaaggaggaaacgtttctctccctacacgtctttccactgacattgtggccaaccgtaggctaagagctgaaatctctccttcctaagttgcctccaagctctccaatactacctcctcccccccatttagtctcacacacagtgtgcgtgagagatcgccagtgagtttgtgacaaccgaagctgcagcagtcgccaaacctgttcttcctctcccggtctcagaagtctctccagctgaccggacttacgcctggcagctcttggcacacacagcgctgtggctgagattcagccgtgccaggcgctgccaggcagcagcggggcgaccgaccacctcctcctcgacctcctttctcccagcttcccctcccagggtgcactgtatctactcctttgggctgtcttccagccgtcgcccttgggtcccgggggctttccagagtgaaatcgaaggtgaaagaaacaagaggacgggaggctggtaggaggagcctccaggccggggagggtgggaggagcctccagcccgaggggcagggtaggaggagccttccgggaggatctgggtggagaaaggggctgggccaagccgggatggagggttggtcacgcaggcgcggggggccgcgtcgagaaccccacgcgggagcttctggagtctccagccaccgcttctcacttcactggagaagggagctggggctggggctggggctggggctgggagggagctaataaacattgaatgtgcagcagctgccttggcggccggagtccgcccgagcgacaccggagcagtgcgccc

SEQ ID NO: 10129 - DNA, 2300 bp, Homo sapien
gcatgtaagtgcattggagagacacagagcatcaggatggactaactgatatgattttcaaaattttcaagtgagcaaaggttatggaggaaaagggtaaaagatcagtccctacctgtaaagacataattccttttatttttgtttacatatatttgtccagggcacaaaaaatgtgctactgtggatggcataacaggtataatattaataaatattcatcattttatctgtgtgtatccaatacagatttctcagatttccttgtgaaatcagggaaatatgtagctttgttctacagaagcccagaccacggtattttctttccaggccactgctagacacccagggggctcaatttcttgccacagtttcggagagcttgctggttaggtgctgctcttggttggaaccagtcggcccgcatgcaaaacagacctgtcttccacaccttgtggttactatgcagcagggggcgctgcagtagtgtacatcgcggtgcaccggagctactctcctggccagaaagccaacaagccgggaggaggcgtgtcaggcagccctgggtcctctttggtcttgcaactttagtacccagagcttgttctacacagaccattctacaccatatttcaccatgttggatgctttccatccagtcctgcctccgagcggaaaggaaagggcattagcttactgccttactaggtttaagtataatgctgtaccggcttgcactagaggtttctctcctgtgttctcagggtcaacccgacagtccctctgaaaccacgaaggggtccccgggcagttgctgcggggtgtgtgtgtgtctttctttccctttttggggtcctttctttttaaccttactgaaggaggaaacgtttctctccctacacgtctttccactgacattgtggccaaccgtaggctaagagctgaaatctctccttcctaagttgcctccaagctctccaatactacctcctcccccccatttagtctcacacacagtgtgcgtgagagatcgccagtgagtttgtgacaaccgaagctgcagcagtcgccaaacctgttcttcctctcccggtctcagaagtctctccagctgaccggacttacgcctggcagctcttggcacacacagcgctgtggctgagattcagccgtgccaggcgctgccaggcagcagcggggcgaccgaccacctcctcctcgacctcctttctcccagcttcccctcccagggtgcactgtatctactcctttgggctgtcttccagccgtcgcccttgggtcccgggggctttccagagtgaaatcgaaggtgaaagaaacaagaggacgggaggctggtaggaggagcctccaggccggggagggtgggaggagcctccagcccgaggggcagggtaggaggagccttccgggaggatctgggtggagaaaggggctgggccaagccgggatggagggttggtcacgcaggcgcggggggccgcgtcgagaaccccacgcgggagcttctggagtctccagccaccgcttctcacttcactggagaagggagctggggctggggctggggctggggctgggagggagctaataaacattgaatgtgcagcagctgccttggcggccggagtccgcccgagcgacaccggagcagtgcgcccgggaggcggcgaggggaggcggttcgccttgtccctcccacccgcgcctctttctctctcttcctccagctggtcccagagcccggcttggtccggtccctctgcccccatcccgcacccttccacctcctccgagtcccactcctcacctaggacgccccaaactgccatgggttagggtggggatcgcgacccgcgcgaaagaccagccctgcgcttccgccgggggacgcggagcccaaacgccgctcaccgcttgcgggcgccgggcatggggagtgtggtgtgagcccgcacccggggaggacgcaggagctgcggagacgggcgcgaggaggaggagaggagtcgtggattggaaggacccgagggagggagggtggggaagcgagggaaaagtgaagctgggaggagaaggcggcggaaggtggagattgatgcttctgttttttgttgccgctgctgccctcgcgctgggagccgagccggagggaaggcggtggagagatgattgcagagttggtgagcagcgctctggggctcgccttgtatctcaacaccctgagtgcggatttctgctatgatgacaggtaaggggccgagaggagggggcgacgg

SEQ ID NO: 10130 - DNA, 2300 bp, Homo sapien
ttaaaccagccacgcccattcatttatgtgttgtctgtgtctgctttctctctacaatgtcagggtttagtagttgtgacagagaccttggggcttgcaaagcctaaaatatttactatctggcccttaaccgaaaaagtttgccaacccctgatctaaatggaaacacataattttaaaactcttctggcaaacttactgatccctgagagcacatctggacattctcaggggttctccgaccacagttgagaaacacaggtctacgatgtaattgttaggagtgaaagctcaaggtcagacttagagatgtaaaattttacagacttccctttccctgagaccacactacagtgagcactatctgtgacttttgcagaacttggcaagcatgctgcctaggagactatactagcagtaagtgactagatggcatggaccccatgctactataatcgttacaggttttgtcccaactaatcctatctgagtgtgctggcgagcagcgattttcatgcaactgtaagtctttgtgtgctggtcccatcagcccctgtcacgtggtcctggcagtcctgtttggcctgcaggaagtgcctgctgtttcatctcagaatggctgcttctacgatgctcgagttgctgtttgttaacttgggccccctctgcctccttagctgcaagcctgtgtttccaagcagttgtttcccagctgtctgttgctttgttacattgtttcaggctgtgcttcaatgtgctctccaagtgttttgcttgacctccccatgggtatctgccttgctttagctcagtgctaagcagcagtttggtattcttctggtatccatttttctcatgtggtcagcctactggtcctgattttctgtgattgaggttttgacacttgcaaagtgactctgcatcattgcttggttgttgacagactcgtcttcatgcttttttgttctttgggctacccaggagtcacctttgataaaatgtcagtaacatactgctgtgataggattttttttttttttcttattggcaagaaaaagccatgtttttgccgtgatctggattgctatcttctgtactttttgagactccccatttgtcaaatggttgcagtttgaatgtggttgtcctcaggtaggaaagtcagtgtcaggacccaggattgcctactgcagagttatatctgattcttatgtttttcaggaatgttgttaatttatgtggctagaaatgtgaattttacaaaatagtaacaattggcttttcaaaatctgtagctgaaatgttggtttgtagatttaaaataatacatgggttaattgagtggaaaatgctgccttggatatgatttttaatagtgaatttgaaaaatgactaattttatatgcatgtgaaatgaaattgtaagtcctgacaagtaaatggaatatgttttagccaacagctacctgtacttaaaaacaaaaccccaaaaacctgctcatttgattttcagtaagagtctattaaaaattcttaaatcagaaaccaggtagtaaacaatttctgtaaaagccgattttcaagtggagacattttgacctggagctagtgaattcaatgaaaaaaacaaaaaacaaaaaacaaaaaaagctaagagagacacattatatccaatgtatgttataatacttatttaaagggtatcataatattttgagtttggggaaagttcaatcctaatgttaatgtttatgaggaaatgtgtaatattcatgcatttctatgcaattctctacttgccacaagccaaagaagaaacaatcaatttacaaataacacagaggcagtaaatttgttggtggtgatgctagctaggcctattgtaattccataattctgtagttttttttcaacctgcaagtggtgaattgctaatgttgctgggagccaaagatatggtgatatgtgaaagtgtccaggcagcgcttacattatgtaaggcttggaggtattttgatgtcagtaaaatactttatgggagtaataggaaaatgtgtactgttgaaatcatatccagaaaattcagagtttatgttgaattttatttcccaactcacatttgaggtttacaagttttgcttagtgtgcttggtgctactcgatcaattgagacacagttcctctctggtgggggttcatgtctgtgtccagacatcttgttggctgtgctctaatcacagtgatcattttgagctgttgttaagaaaaacatggcttccaacatagatgccttgttttct

SEQ ID NO: 10131 - DNA, 2300 bp, Homo sapien
agggttttaccttactgatgtggcctccctgcgttggcaggtattactgcttccagatttggtcacagcatgggacaaaggaatatacagacctccttcctgcctttgaataattagcatcagcagagtatcctgaatagtgattagatataaacaaagcaaacagatagagaacctggagagagttagcttttaggaatgctttagaaatgatcaccaactctgtcaaatgtggaggcatttgtggattttgatagtatttatttatttattttggcctagcagcatttactttttttggaagacatccaccctgtactgcaagtgatggccctactggctgtatatacagatgggcaactacgattccaaatatcacacagctatagtagggttcacccaaatggagccctttgcctccagggtctttttcttcctgtgaagagaatttgaatcagtgctctagtggtaataatacaaatattgctatcttagaagtacttaaacctctatattttcttattccaggtggttttcctgaaatcaaactctgatttccagggataaaaagacaacacgtgaaaaacccctggtattctcagatttgacatgactttcactgtatacatggctttaactctatttaatagaatgttcctgtgaagctgaaaagtaagtggatcctgtttttgacttagtggtagagcttgcagtttaaataattccactgggaatctattaggaagcaaatgagagcctcctccagagatctttgagagaggcttaaggaagcattcctctgttatttgttgtgctatgttcatctggttctaagtcaagataaatattgcttcatttgtatagttgttttcttttgcaatttgctcatgagtgaaatctctttaaaacgttaacatttgattaaatatacttgaatgcttacaaagagtttttcatataatttatcttgtttatctttatagcaacattaagggactggtagatatttatgttcctcttggtgagttcattgaagagcaatctgaggctttatataggttaggaaatacactttttatattttgggaatccagcctgtacagtgcttattatcaccatttctgcagttatgaggttactcttgaagacaagaaaatatttattaatgaattttcaaattgctccttatttgtatatttctctctgcttaatgctaccaacatttccactctttggcatcaagtgttgataattcttttactgtcttctgtgaatatctcaaaaccacatgcaaatgcattgcaaaatgcacagtcagattttacatcttgcaaaggatgcaggattccatgaagtcagggaaagtggctcagtaagatctgcattaacatataaacccctaggcaaattggtatggcaggattggatcaggcaattatcaccatagataatgacaagagaagcccttcaagagtctgattgaaatatcaaaggattacgtgagactcttgggaaatcaaaacccttgactatttttggcagaaacagtgtttttgttcagattttactgtaagttgtatgaagtaagatttgtgtggtcctgttatcacttaagaaatataaattttaccttattttatatttataaaagaatatgaataacctgaatatctgtatacttctcccagatatcatatttctgtctctactatgaaaatctggaattctgtgtttattctccagttttttaaaaagtagttttaccctgtatgtgtatattcctttatttagatatgcatggttttgagctttataaaaatgttattgatctctatgaagcctcctgtcatttgctttttaaaactcaatataatgttttaaaaagttatctttgttgtagtatgtagctctgttttattcatttgtactgctgtataacattctacaatatgactcacaatatcaaaaaatggtgtggattcatggagtttcttatgtattgctggtatgaggataagttggtataaaactttgaagaacaacttggcattcacttctaaagccatttctgcagttccattcctaggcatagatcctgtatctagagttatcaatctgaattataaattttgtaaaattattcacaaaagcacttattttgtaagtgtagtgtagaatgttagatgtatgacctataattaattccattaatcctcaaataaaactgtggaatcattttcctttcaaacagcagtttaaattcaaactgtattaccattagcataagaatagcttttaac

SEQ ID NO: 10132 - DNA, 2300 bp, Homo sapien
gttggggaagtatgaagtcaggagttctattttgggtatttagaatttgaggtatctaagtgaatatgcccagtaggcaactgaataattgcctatggaggtgagggagggtgaaggtacagtcattagtgtacattaaggacgtttaaaatcatgaaccttgttgaggatcattaggttgaaggtagagtggaaaagagcattcataattagttctgtggcttccagcaatcagagttggtgtggaggagaagtctgaggagcagagtccagtgtggcagttgtatacaatacatagacattgttttcatagaagttgtatatgcttaaggtatattgctctttgtgggttgtttttaaaattaaatatttggtgtatcctttgtaagattctaaacccccttctgaatgtcattgagtaagacaattctatacaacgccaggatgtttgctgtaaagaatggctttaccattgaaccattaaggttgggatatggtgcccattttaacccttcctggtctgcctctttacgacttagatttttagatgtcacctaagtttcttgctgggggagaaggactttgccagaaaattagccttaacatgatgtcctttgaccctcctcacaattttttgtcattctcttgaaataagttagttcattattaaagaagtcattttattttattttttatttgagtcggagtctcactctgttgcccaggctggagtgcagtggtgcaatctcagctcactgcaacatgtttctcctaggttcaagctatggtcctgcctcagcctcctgagtagctgggactacaggtgcacaccaccatgcctggcaatttttttttttttttttttttttagtagagatggggagatggggtttcaccacgtttgccagactggtttcaaactcctggtctcaaatgatccacccacctcagcctcccaaagttctgggattacaggggtgagccactgtgcccggcctaaagtaattttatttttaaaagctgtcatcaacatgaaaaatttgggattcatgaggagtgtttttgagtgttggatgccactgatatcagtgacaatatggggcagcagataaaagcctggtttataaattctgcaaggacggaactctttaagacaatgaaatggggactggcttagacatagctgcgtgcctttactccattagagacaagcacaagagtcctgccataccacatattttttgacatgactactttttgtttttcttcaaaatctaaactacgataaaatgaaagacaacagttattaggtgcctttatcttatgcagagtgctaagtactgtacattgtggtccccttgtgacccaacatgaattctgaaagggaaataaatatattgaacctactttgtagaggtcacaaaattgaagctatgattattggtattttagagagaaaaaaataagaaaagataatcaaaaaatatatacaaactacgatttcagattcaggtttttttggagattaaaatttctctaggcgtgcttgaaaggtgatggacatgaagtcatgttttggagacatcatgctgtgtttttaacggtccatttaaaaatgtattttatctctaagtgttaagtgttcccatgctgtactgataataatcttaatttttcccttctctcttttggtttcagaggaagaacttgtcgcttttcctaagcattagtttgttaattttctggggttcctcccttttgggtgcccggttatactggatgggaaacaaaccaccaagcttttccaactcggacaaccccgctgctgattcggacagcctcctcacccgcactctcaccttcttctacttgccaaccaagaacctctggctgttgctatgtccagataccctcagttttgattggtcaatggatgctgtgcctctgctcaaaacagtttgtgactggagaaacctacacactgtggccttctatactggactccttctccttgcctactatggtttgaagagcccgagcgtagacagagaatgcaatgggaaaactgtaacaaatggcaagcagaatgcaaatggacatagctgcctttcagatgtggagtaccagaactcagagactaagtccagctttgcatccaaagtagaaaatggcattaaaaacgatgtatcacagagaacccagcttccttctacggagaacattgttgttctgtctttatctttgttaatcataccctttgttcctgccacgaacctgtttttctatgtcggctttgtaat

SEQ ID NO: 10133 - DNA, 2300 bp, Homo sapien
ccttaaagtatgtagacttatttaagtaactctttaagcacattaagcagctaccttattattattaaagtagcctcagtgaaattacaagtatggtcttattaaaatactttaattttaaatataaaatttatttttcttgtttctgtgaaaaggctttactaattaccaagagacatctgtggaaacactgtaagcttggtgatcagctgtaagaatttggtgataagaaccaatcattatataattaaagatttaaagttattatttgtataaaattagctactaaacactttttattatttcagaatatgactagcaacatttacattataactgttttgattttactaagttttacattatcttattaaatcatatccagaggtgagtgatttataaaatttataggaaacaatctgaggattacagatgatgaatgctgtgtatctgaacatgggcgttcccatacatggttctttaactaaattcaactatatgtgatcacttgcatatataaatatatatatgtacatacacatatatacatatatataaaactcttagaatttgaaatgtattctggtaaatatgacagatttatatgttatttatttatatagatgtaattcaacagattaagaacatatacaggcaatttacaaaattataaaaggagattttgactatatgtgtcatacatattcattttagaacttggctcaaataaaatgaggtacctctgcacatgttttcaacatttgtgcaaacaacataattttaattaacattttactcagtgtgctatacagcaaaaaaattattaaatgtatcagtgatataagaaaaataaatcattatgtttttagttacgtgattattttctgctatttattttactcaactttatagaggtataattgacaaataattatatatatttaaagtgtacgaggtgatgttttgataaacatatgaattgattaccactataacactaattaatatagccatcccctcacatcgttactgtcttgcatacgctgagaacatttaagctctcttagcaaatttcaagtgtacaatacagcttactgactctagccaccatgctgtacattagatctgcttcctttaaattgaaactttgtactctttgatcaacatgtttgagcaacaaaggccaaccctggtaaccaccttcctattatctgcttctattatttagactttattagattccacatttaatgagatcatatagtatttgtctttctgtgcttggcttatttcacttagcataatgtcctccacattcattcatgttgtcacaaatgacataattttctgccttttttttggagttggggggacagggtctcactctgtctcccagactggagtgcagtggctaaatctcagctcaccgcaaccttcgcctcccaggctcaagcgattctcctgcctcagcctcctgagtagctgggattataggcacatgctaccaccatccagctaatttttgtatttttagtagagatggggtttcaccatgttggttaggctggtctcaaactcctgacctcaaatgatccacctgtctgggcttcccaaagtactgggattacaggcatgaggaaccaggccctgccaattttctgcttcttcagaagaaaatattttagaagcatatttcattgtatatttacatcaccatattttttaatccattgatccatcaattagcttgattctgtatcttggctattgtgaataatactgcagtgaatattgggatgtagatatctcttcaagatactaatgtcatttcctttgggtgtatacctggaagtaagattgttgggtcatatggttgttctatttttaaatttttgaagaacttccatactatttttaacaatggctgtatcaatttgcatccctaccaataatatacagatttcccttttccgcacattctcaccaacactactctctttttattttttcttttctttttatttttttttttgttttttgtatgtacatagtagttacatatattcatggggtacatgagatattatggtagagacacaaaatgtgtaataatcacatcatggagaatggggtatccagcccccgatgcatttattctttgtgttacaaacaatccaattacattcctttagttattttttaatgtacaaataaattattattaattatagccaccctgctgtaccagcaaatattgtcctgttcatttcttctaaatttttctgtactcattaaccatc

SEQ ID NO: 10134 - DNA, 2300 bp, Homo sapien
acttttaaatttttctctaaactttgactcatttattattgtacttggtaaatgagtttccacgggctcagggagatgaattactgtcttagaataaatttgtatgaatgttgaggctacacccaggtaacctaattcctaataggttatatgccatgtatcaggaaaggtattgcctgtttatatgatggacatgttataaaagttttaaaagtttgaatataataatttataataaagtttaaaggccttgtctctgaatagagtctcattttttcatttatttcttttgtctagttatctgttgtcttctggcattttgtattggcctgatatttgtgcaacgctctggaaattactttgttacaatgtttgatgattattctgctacactgcctctgctaattgtagtcattttggagaatattgctgtatgctttgtttatggcatagataagtaagtatatttgcttttatgtattcacttttaatctctagtttgaaaacatcaattatcaatgttcatttcatttagaagaggaaataaatgaatagagggaacaattctttaaaaaatcaaaccttttgcaggctctcactgattcaacagttttggtaaattacatttccctgttgggcaaatagaattatataggatgtaatagtatgtagaattttagatctttgatttggtcctggttatcaaatagctaactttcaggatttagtaagtattggcagagttccaagaaccttagtttcttttgagttctttattgttatctacatttcacagataaggaaaatcaagcttagagagacaccctgtgacttgcctgtcacccacctggacagcagcagacctgggactcatgtccatttctgtttaactctaaagcttatctcctaattatattgctaaattgatttataagaggagtgcatgtgtcataatgccttatatagcaggacaatattgggaaatgatattttcccaggtctgagatgtatatgtcatttgctgcacagaaacattatttttatatagagtcattacttaaattcactatacgcataaataatgaataaattcactatttattcataaattcatatcaaatacacatacttttcacaccattcaggtacactgatgtgaaaagtgtatgtatttgaaatgatgtgaagcaccagagttctctcaagggaaaaagacctttggaggatttgtccaatactttttatagtcactgtctctaatcacatacatggactgagaggtagtaagatcaccaagctcattacagccctatgtaaagtagtaatgcatgcaccttaagtgaaggccagagtccttttaagcagcataaagaatattgtgggtattgaatgagctttataacaaagcttagagaatgttttttgtggttgccaaaagctccaggtcaggaagcttaggagaacttacatttaataatcatgtactgtataataatagtagtaatagctcttagtgtataatccagcaatcatgctacttggtatttacccaaaggagttgaaaacttatgcccacttaaaattctgcacgtgggtgtttatagcaactatattcataattgcccaaacttggaggcaaacaagatatcctttagtaggtaaatggataaattgtcatacatccagacaatgaaatattattcaatccatgaaaagacacagaggaaattttaatgcacattacttagtgaaaaaagtcacatatgaaaaggttacatattgtaagattcccctatattataatatggaaaaggtaaaactatggaaacagtaaaaacatcagcagttaacaggggttgggccagatccagggatgtatacgctgagcacagaatgtttagggcagtgaaactactctgtatgacactgtaatggtggacacacgtcattatacatttgtccaaatccagagaatgtactacacaaacagtgaattccagtgtaaactgtgggctctaggtaataatgatgtgttaacttatgtaggttcatcaattgtaaccaacattccactctcgtgggggttgctgataatggaggaggttatgcacatatattggtaggagctatatgggaaatctctctactttcagctcaattttgctgtgaacctaaaattgctcttaaaaaataaagtgtgtaatcaaaaaatactccttgttaactaacatgatccatatcttacagatgggaaactgccccttcttttacaggaggatacaatatgttagctgtagagc

SEQ ID NO: 10135 - DNA, 2300 bp, Homo sapien
aaattaaaaagcatattttattagataaaatcataatcagtctatctagactttataatgtataatcttcattttcacttttatataagcagaattaatggaagtcaattatattatttataaagcagtacatttgagttttgtttaaaaacataaaaagaagctattgttcaaaagtgaatccatgcttctggctagccacaacatttctgaagaagaatcataaaggggattactttaattcaagtgagatcaaggcaactgccaaatttaatgaatgccaaaagtacgcagggagaatgaaaaaatccatccgaaagcattctgattttttaaaaaatcaaaaaatttgagtgaaggattaatcaaaggattaaaccaatttgaaattattaaaaaattatgttcattacaaccaattaagttaaaatataatttatttttaaaatattgtgttctaaagtatgctggcattttatccatattttttccttaaggtgtgccatgtgtttatatatgattcttaagtgggtaaaactagagagtgccccttattgtgttgccttatattaatgttgtttgtagttattattgaattcagtatcttttacctgcccggaagcatcatctgctatggcactttttcctccattgttccaattctccttccattccttccttccacagatacatatgatagagttactatgtcagcaactgtgttaggtgtgtgagatatggtagtaaacagaaaatatctttacccttactagcttataccctgttagaggatacaaaaaataaacacagaaacacataaataaaatttgaaaagtgctaagtgctctaaacaacaacaacaacaaacctagggtaatatcactgagggttggcagggggcagatgggagagaaaggatagaaaaaggcatcaccttattttgggtggtcagggaagacctcagggagaagatgaagatgagactaaaatagtaaggaggagcaagtcatctgcaaataaggaagaggtgcttctgaaggaaggtgccgccctgcatcttaaggctggctgagcttggtagactcacaggatagcaagggcctgagtggccagagctccatgggaagagtggtggccaggcaagcaggcactctagggtaagactttgcaggccagagggtggaatcagcacttcactccaacgacattagaaattcctggagtgttttaagcagggtatgacataaaccaaggggcagccagcaattcagttaggagaatattatggatagtccagaaccatttctagatgtttggctttactaatgggatggagggtggggccattttctgaaatagagatgggtgggaatagctttgagggaaattcagaagtttccctctggacctgaaatattttagagacctattaggcctccagaggaagatgtcaaggaggcagtgaatgtctgagtagcacacttccttttctattataaatatttgctgaactgtttaacagtgaaaattgctgaagcggaaagtaaaatctttacacgtttgattgtttgggttctggaagatacagcataggaacaatactgcattgaaagctttacagaatcacaatgaaaatttggttaaaagaaaaagaaataggactttattttgctacttagaacaacaacaaaaaagtaggaattcattaggtagttagtgcctgttcatttctgtcttaaatatttcttgttttatgaactataaggaatcaacactattgaagctacaccatagctgatggattttttcaaaggagatagtgtgttttaaatgtaaattgtatctcaaataaaatcttaaggctgaatcacgactcataaaccattcttaaaaaatggctttagaagttattaatagttttattaatcctgtcatgaaacagtgactgtcaaagtacagaaactaacatataaaatcttatctataaaaaaatggtcattgtatctcacttatttttatttttatttctttgcagatcatatattttagttctctgtttccatatgtggtacttatttgcttcctcatcagagcattccttttaaatggttcaattgatggcattcgccacatgtttacccctaaggtatgtaccatatttctatttaaggcttatgatcatgaaagcattatgtttattgttaaaatattctaagttatatttaaggaataattgttctaatgtatgtacattaaacttttaaattatagttgttaaccagtctaggaaaaaccagcat

SEQ ID NO: 10136 - DNA, 2300 bp, Homo sapien
tgttgttaaattttaaaaatgaatacattttacctttggctagggttcccagactctccttttgaggtctctccattcttcatctatttattgttttcaaagttgcctaccacttgtgttgagattccaccctttcctcctgttaaaatagataatttgttaaagggttacaggatagtataaaagcacatgaagtttgaggccagcatatctgaatttatttctccattctgtcattgaacaagttttctgactttttgcaattttttttgagtatcacctctctctaatctctaaattaggaaaaatcacctcattaattagttgagaggattaaataagatattattaagccccaggtacttagtgggaagcttaaaacaatagttgctttctcctacttctcttcattggcattgagacataaattagtatcagtcattatggagggcatcgctctacaaatattttgtgacctatgcatatgtattggaattaggtatcagacactagtgaaaaagcgtgggagagaaataattttcgtacttcttggtactaccgtaaacgatttctgccagcatatggataactttgtttcccacagataatcctaatcctgatcatggtggacacagctctccttattttcctaaaattttctcagttgttattgataatgttggtactgtatttcagtttctttatatatcaacattaaatatttgcctgtcaccaaaatgtgaagtaaaaagcaaaaaaagtcctataaaaggtttattttgactgtttttattttttcacgtggcgcatctatcaaagagcatttatttactcatggcaggggaggcgtatcagggaatcaaatctaatttaatttcttaacttttaatttttcaaagttgggattggaagagaggctgagaaaaaactctcttggctgttttaaaagctaaggattagtagcaatgttctgacctgaaatttaggtcttgtgatttctttccaagagatttttcactgcatgaaaaacctgtttgcaatggcctttttaatttaattcaatcttaattggatacgaaccgtaaaaatctaagggattgttaaaaggcctaaaagtgcacaaaagtagtttttaagagtaatattaataatctggaagtgaaaaattaactttgctaaattactgaacctttctacctagcttctaggttcattttgtatttctttcaaattttgaacgtttcaaggacggaaaatttcatccttagagcatacgcactgtttaggggacggttcagccattttcaaaaggaggctaagctttgtgttcagaggtgtatattttaggaattctccacgtggcttaattacgagcatgccttgattgttagcagaggtaagtcaggcttcatcttgtaatgagaccccttggaaaaaagtctgctgctgaggcaccaacacagggtgggtgagggccagctttctaaaacggcctttcataacctggcgagaatcactgagcgctatgaggccaccgcctgacggagaagccaatgcccagaggctttttctttcgcaagagatgtaaatggccggcttgggggaataggtagggaaaagggttctttgggtcacccattttttctagtcccattactgactcttggagaatattcagatggtgccaggtagcaccatgcctattattattctcactgagacaaaagtcagcggctggtaactggtgtccattctttcgcttgagtgggttggagaaagacggcatggctggaggaatttgttttgttttgctttggagcgggcttcctcagttgcatcctgcatcgggcgggcacagccccgggctctgggaagacgccgctcggcagccgcagtggccgctgcatcaatgggttttggggcagggaggtgcggagcccagcctgcgctcctggctacccctccgcgccccgccgccgcccacagcctacccttctcctctgcagccggtaggcggccgtaacacgggcgggccgagcacgtgggcgcctccgtcacaccctcacacatacacacacgcgcgcgcgcacacacacatacgcatgtacacgcgcacccgcacccgcgcgcctgtatcccgtgctgtttccctggcagacacacaggcgctcacgagtctctccttgccagcctgcagggcggcgacccccaaaacccagctccgggtcccaacctaggcaagaagctgcttctctgccaacagctcctcttcggcctccgtcacagccacctggacccta

SEQ ID NO: 10137 - DNA, 2300 bp, Homo sapien
aacaaagaaatacctgctctgcaactattttgaacacaacaatgatattatgggatatttaaattatatcactgccatatgaagaataaagcagttgttgaaaaatgctcttaaactaaaatgatttcactacaacacattttcaaaggaatattagtcttgtcagataacaaagaacaaacagttatctctcattctttcattctctcaataaatatttattatgtactctctaaaggaaatatgcattgttaagccaatatgctataaatcaaccacacctacaaattgtttttaaaatttaaatgaaatgaagttaacatgttcaaaagaaacaaaagtctactcaggttaaagagtcataggcaaaccaacatactcaatctgaagttaccgtttctaggaataatgcaattaaaatggacttctgctaaatactacatggttgataaacaacagtgtcaagttaaatttacttataatctacaaatgtattagataactgctgccttttatttttgattagttatattctagcgaaattatgactaattgataaagttgtcctttcttccaaagtaaaaaatcgcatgacaatataggagatctatcaccatgaattaatttatcttcagaaaatctttcactgtttttcttttttgctgtcaatatttgacaaagtaagctttgagaaggaaaggaactaaggcattatttccaaaattatttgattatgaaaactagttattcaaaattaattttgaaattattaaaggatttataatttttagaagtctggatagtttcacaatcaaaaataaaactaatcttaagattcttatgtgaacttcaacacaatatgaaagtctattttaaatgaacagtttgaggttcgaacacagtagctcatacctataatcccagtgctttgggaggccaaggcgggaggattacttgagtacaagagttggaggctacagtgagcaataattgtaccactgcactccagcctgggcaacagagggagaccctgtctctaaaaaaacaataaaaaatagataatttcaatagtctataaatcagcaataaaaccaaacttaaaaaaaagaacaaattccatttgagcatggactttgataatgaaaatactctgaatttaattagacctgaaaccaagtgtagtttattttttaaaatcatctttcctgaaaaggaaactaacatgtgtgcttttaatatgagaaatctattaacgtctcactttatattattagttcttatgttgatgcaattcaagtttattgttaccaggaaatgtagtctattttttttccagaggctcagtgaaatatttgcttttagcttattttatagcagataccttttacaattatggctacttccttttagaatttaatgccttatttgcaaactttaaaagaaaattaaagtaaaaaatatgttattaattaaaatattattttgtaccctatgtatttgctccacaaaaaactttaataaattaagttaaaattaaatagcatgacataaacttagaaattaaggttttatattgaaatactgtgtgacaatatttttacagtaaaataactccagaaaataatttttcaaatttctcacccacatcccttcagttagaggtttttgatgggcattgattgatgatttttttcttttttcctttttcttttcttttcttttttaaaaaactgttgtcatggaaggcaaacaacttattgacttctcttccatacttctatgtcccacaaatcactgttcaggattaagggtttgtggaatgaacaccttatacatgggcaaatcaccagatggaaatataaatatatgtagctcagaaacaatttaaaaaatttaaaagtgagattacatctacttgggtaattataacaaaatttcattttattaagtattttccaaagttacttaaatattaaaatctacctgtaaaaaaccgtaagctcctcatccagtccctgaaatgctgcgttcgtttcaatttagaatcgagattgtttgtccttctagagcacctgtagggaaaaaccggtgtctcttccttgtgattggctgttgccatggatacgctttgtgtagcggctatgggcgctgtcttacaacaaagccaaggaatctcgctgctgaggggtgagccggggtcttaagactgggattcccgttgagggaggtgaacagctgtgggagctcaggccgagccgggactctctctgcctggccagacttccagcaaagggagagac

SEQ ID NO: 10138 - DNA, 2300 bp, Homo sapien
tcctgagaaaagtaatatttctcctgaaaagcctactcctgttaaaaggctcaaaagtgcaatactcactgtatcactatcatcactctgggtttctgattttgcatcactctcaatgtcttctttttccaaggaggaaatgctgagtttatccaattcagcttctatttctgctttgagctttgcatcatcatcgtccattattcttcataataaagcacagaactgctttaaaaaatgaagaggctaatatgtcactaaaaattatgtgttctctaatttgtcataccaatccaacatatttatttaaatatgttttaatttaacaaacttttatcacaccttattatggttacaccaaacattgttttatctcttcaatcattctttttaaactttgactacaaaatgatcaactgtaattgtacgctaatactcttattgatttatatgtttatataattttactatatataataaagatcagaattgtttataaaatttttgtttcagttattaatacatataaatgtaggtatgtatgcatgagttgcaatgtaatatgtgttgttgttaatgttctgttttttatttttcactgttggtcttagtcccaaaaaaggtttgaaaacgtactagtcagctatcattttatttttcatgacactagtttaaacctttctttctttactcaagggcctgacctttccacctgtcttcttgttcttttcttcattccttctttccatcctctttccctttcgttaattcctcctttcactctactcaatcatctcaaaatcagttctacccataacttccaccctcactcactcactcaaaaataaaaaataaaataaaaaaaggaaaagaaagaaaagaaaagaaaaacaaagtgaaatggaactccagacagaaccagggcaaaatattatcctgcaatggaactcaaagtgcatttaaaaagctttattagaaggaaagctagattttttttttatgcctacaaagcaaaatgcacgggtatactaaactttatatagaaagagaggcaggagagtatggtggaggtaagagtcatttcctttacatgactttctctgttcatctactggctcattagatcacccctgtccaattacatatttgagcacttacgcaagtttaaattttctattagcaactttttaaaaacaaaagagaagtgcaattaatttttataatatattttatttaacccaatatatccaaaatatttcaacgtgtaataacaaaattaattattaatatcattgcaaagagtttatattctttctttggacagtaattcttagaaatctgttgtgtgttttacacctgcagcacatctcagttaggattagctgcatttcaagtcctcagtagccacctgcagttagtggttactgtatatgacgtgcagtcatggatgggtctcactgtaaatgggctacattaaagtgctctaagttgataacgaatcacttggagttcactaaagctgtcaaaagtagaaaagcttaaggaactcccccttcaacccctgtaaagaaaggggagagaaatctactttataaggttcatataaattatatattaccaaaaaaaaaagaaagaaagagagacagaaaaagaaagggtggaaaggagggcgacaagaagggaaggaaggaaggaaaataacgtcaattggtttgtggggagcggtgagtgagtaaccatcgaatgatccctacatagccaagacatctctttaagttttgaatgagttctcgaaatctccagggtggaagggagcctcgagcttcgcagagtcgcacagccatcccctgacccgcggtctctccctttgctggaagtctggccaggcagagagagtcccggctcggcctgagctcccacagctgttcacctccctcaacgggaatcccagtcttaagaccccggctcacccctcagcagcgagattccttggctttgttgtaagacagcgcccatagccgctacacaaagcgtatccatggcaacagccaatcacaaggaagagacaccggtttttccctacaggtgctctagaaggacaaacaatctcgattctaaattgaaacgaacgcagcatttcagggactggatgaggagcttacggttttttacaggtagattttaatatttaagtaactttggaaaatacttaataaaatgaaattttgttataattacccaagtagatgtaatctcacttttaaattttttaaattgtttctgagctacatatatttata

SEQ ID NO: 10139 - DNA, 2300 bp, Homo sapien
cgtttccacaaggctgcccgggggcccgctggaaagtgtccaaagaacgcagagctgaggctactgctcacgcaaggtcgggatgctacaggacactttaagaagagcgtttcaatggcttcttccgacacctcactctctccccctgggcctgacctcagaatgccaggttgtctggtttggagttcctgcggcccgacgcagcctggcttcctgctgaagctcagtccctagtgcttttctttgaccttgctcccctgaaatttaacaatctgcagttggttcttgcagcactgctctggagagagtaataataatacagcagaagctagttagtcccaggaatagtgtccacttgcctgaatctgagtgcgcgctcaaggccacactgagcgctgcgccatgtgaactaagcttgtgcgcctccttgggagaacagtctgggttggactttggccgggcgagcaaggctgctgctgccagctgatctgctcgggatccgccggtcggatctgggtgcttaaggccgaccctgcctttcgcgcaacgctaaggagcagctccggggtgcacagccctccctgattgttactctctggctgaggcctggtcaggtctcgaagaaggtctcaccaaagaggcgtgggtcagctaagacccccgcagaaggtggaaactctcaaacccatcagcatgcccaccacagctgggcttggcctcaccatcctcagagtccgggctgctcggcctgcccgaggcctcaccataattgccagacttgtctggggaaacgcgacggccgctgtgagtgccagtgttgacaaaggctgtgtcaggacgtctaagcagaggcctacctggaccaaaacctgtctggcttattttcaccaaatttgctagcttagggtgcctgacgcaaatgcgattttgtgcccagggcaccgaacgcatttcccccaagcgccgcgggctcctaggaagccaagagtcgtgccaaaagtcacacagaagggctttcaacctagcagtgctgtcctgcctgccctaccatcccctctggtggaaatggaggccttggacctgtccgcgcccaggacgccgcgccgcgagtgcccgcagctccgcgcgctcaccactcactcccagagcgcttttcggagtaactccacagcaactctttaaaattaaaagtaatttctgtaaaaatatgcagacattcctcttcttcataaacccctatttgtaacaatcctcactttggcattagagtaaaagcctttcaaaggcactgatcctaacgggttttcttaaaataatttgggtctaatgataaaatcgtggaccaaagggaagggtggcgaagagggtgtagggaattggttggcattagtataatggcttcattgcctcttgctcggcttctctctcccacccatcgccaccgcgtccacactccgccgcattccagagaaaaagaaaaggccacggcctcgtaaagctcccagctggcccggaccccgagctcctcccggttagaagccgaagcggcccctctactacggcggctgcgattaacagttgccaatgcatctggttccttgggcttcggattaatgtgaatcttccacgtaaacgatttacggatgaaataaaagccttttagagcaatatttcctttcaagttcttaagacgcctctaaatctttctggtagtgagtggccggcatgggggcggggtggggacgggtggctcaggaaggcgcaggcagtagggagtggaggtttaactgctttgcgatctcaccaagatcttccgaaatgccagtccactgtcacggcggcaatgaatctgggtgtcaggggctcgtctctcctggcatttgtctgaaatggagctgtctgtctgtctatcctaggcctggacgccctctgcccgggtaagtggggaaaatgggggtggggtaggggcggagggggacctggggtggagttagtcgcccgcctattttcatattcattagaactgggaggctgcccgaggaggccagctgagtttcaagatataaaagcaacttcgggtgctccttttccagccgggacgtattaaagggaccggagcggggcagttcccgacgccgcagcgctcgctttcccttccctcctctctggccctccctcctcccacccactggctccctcccccagcgctctccagtttctgtgccccaggagctacgcgacagtcttccaggattatggagtttctgagcgagaagtttgccctcaagagccctccgagt

SEQ ID NO: 10140 - DNA, 2300 bp, Homo sapien
tgtgataacctgaaactcaacacaagattatgctagtaaagacatagtattgtttcctcattccccattaaaactcttttattgaaaaatatagtacacatatgtatataaataatgttactaagcatggagaaccgaaactaaaggaaacagggatatttgcaaatgtgaaattatttgcaaattgactgcaacaattatattaataagtaaacagtatagctttaagggattacattttgaagaacttagaataactaggtaaacttccataatagtttaaatcatttcttgtgaggtgctagtaaaacaaaatcaagaacggaaacagaaatacacccaagattatgtagcttatgttgcatgtgaagtgcatatatacatagcatgtaatacatatatatatatacacacacatatatatacttatgtttacaaagatgaagatgtttatacagatgtttatacatgtatatatgtgtacatatatacatatatatacacagaacatgtcattactatttttggtgtcttgattttctctggaatcactgaccatatcaaattaagatgggtatgtattttttagttatcctaactcccagggatataaaaaggtaactaaactttaacattggctattgtaatgtttttcacttcataatgatttgggtgcatatatggatataatatatgatttattatataaaattataaagaaaatattataaataatgaaatagtataggacacatgtgtatatgcacatacagaaacatgaaatatagatgaatagagaaagattatgataataaataatgaaaaacatgatttatctgagcactgcataaatcagtgtgtatcagaatcatggaagaccttgagattatttttttgtttggtgttgttgggggtaggggataaactcccaaagtaagtaggagcgattcatattctttgccaaggctcagaaagaactcacaagtttgttggctttcctttccctccctccctcatcgtctgcctgggaagcccatgattagaagcctggcggggtggagggtggtggggtggttttaggaggggcaaaatcccagtaaaacacgtccatgagaaagctctcctggcccttgcccctaaatagtgctttcccatgagtgccaggtacctggtgggagctgcgctgggcctcccacaggcacccgaactctcccatctccattcctctgccctgcttctggattcgagctctcctgggaccagatgaagccctccctcccttagacttccacttcacatttcgagctccagcagatcccctcggtgtgtcttctttactccttgaggggcaggagcagtttgcttttcctctgaaattcccagggctctaaaggcccagtgaatgtcaaagatggggtaggggtcaacataaacgccttgggagtcaaacactaaactccagctggttcctagaccaaactgtgatgcatcagccctggagccctgtggtccttcaggtccttcgacttttgcaagatgaacttgagagtgtggagcaggggcctggaagaaactcttaagaccgtgaactcagggacttaacaattctaagtggtctgtgagtccaccttgatccggtttccagcttccctctccctaatatattttaaagtcctgacaccctggcaggggatctggggtcgaatgagttggcaaagagagttctcagcaatccctcatgcttgccatgatcagatgacttttcacagactggagctgaccaggagttgggggatatttacttttaatccttttatgtgtgttcagtacaccttgtgtggttgggtgtggaaagcgggggaggggggatttccagatcgagtgaaactcccgttccattggtattaccatgcttgtggggttggcagttctttaagtctgcaaataactacagaacacaatagagtcctcctcccttcctctctctctctttcttttttttttttcttttcctgcttccaaacgccttcttcgaggctgaagctgggcaggtctccagaggtgcagcagccacaacaatcccgcagttcaaagttaagcagcagttgcacaacttccagcaactttctcagccggctactaatgagctgaaagccaggaacatccgaggagaagagaaagcttccagccctcctcccttcaccctggaaatccagacacccccacccccaccctcagatcactttaagataatttctttattcgtttgcccgacagaccatggctccctttggaagaaa

SEQ ID NO: 10141 - DNA, 2300 bp, Homo sapien
atacatcttttttccccaaaagaaaagtagcatatagcatctatttgaatttgaattatttgacataacttaatgtttcccctattcttgaatatttatcacatatctcaattttcacattaacaactaatatccatgttatatatttaaaatgaatttccattaattcttctcccccttttttctaattaattagggatcaattttgtcaacatattgaagaaatcatctgaggaaaataagaatcacatttcctttttactattagactgctatcacacattttaaaagatcattctttgtatttgcaattcaaaagcagagaaaacaactaatttaattatcatgcaaagtatatataattttcccgatttgttaatcaaagtggctttaagaggattctgtcacaaagatgctctgatagtaacaggaaagtaagcacaaatcctcactgagactctgttaagtgaaaaccaagtgtttcaagcttccattgctccccctaatggtaggaaagcagaaaacatctagacgtatgtatttcacatttgtcaactaaatactttacagaaaccttcctccatgtgagtatgttcaatattgtgttttatgtaagttcagaaaacaaactaaaagtaataaatatatcagttattattaaatttctggtattatatgaaagactccttgctattctaagtaattattaaatgtttggatttaatcgctttgcttaagttttgggtaaaggtgaaaaagttaaactcatagattgtataatataaatcaattatctataggaaccaatcctattttttctcaactgttactacatgattgatttatttaaaaattaaacaagactcagacaactttacattcaaatattcacatctctaacagcactgacttgtcaaattaccccatgtatcttgaaatgcttactacaagaagaaagttttactctaaaaggcattttgaacaattttcttttgagaactcagacaaagaatgggtatcagtgtaactcatgaaatacatgaagactatcatagaaaagtgactttggtgaatggtggttatttaggattgtctcctttccaaaagtacaatctctttttttatggtgaaaagagtattataacagggaaagaaagccgatgcaatagtaaaaactgttgagaagggaattatacaaagagtgagacatggcatcaagaatgaattcaaaaagagcagaaaaatataggcataaaaagagataatgtacagaaaaaaagtcagtgatacaacaacacaaatttttacctgctagaatgtaagtaatttagagctggattttataaacatgaaattgtttttctaatacattcaaccaaaagtcagcacacatagttcagtcatctctcattacttacaataaaatattttctatttgttaggaaataatatcttattccctggatctattatttctttttattgattttctttctattctctaaacttaattgcttaatttttataactgattctctgtctctattccatcttattccagcatggattatttaaaacctgtattagttttggaaccactaaacatttgctcagaagtttgaattaccagagaagcaccctaactcttcaagaacttccaagcctaaggaatcactgatttcatgcattcatcctggagattttccttaaaaattagaaataacagatctcatgtttcacaaaatcaaaatgacaacttttggagtgggggaatgagaagtgggaaaaggatgatactgggggttctttgtcagtatgctgtatgtatgctgtatgtcagtgcagttgaatgactccttctgtgcgtcagaaatccaaagcagcagcagcagcaattagggaagatcgtcactttcactcaaggttcagaaatgggggaggagagcaggggggacaaaggaaaaggggaggagaaagcagggcaaagaggggagggatggaggtgaagatagggcacatcctgcaaagataatgtctgtacaatcaatgacatcatcctcctgcttatatatataggggaatggccagagcacctctcatagttcactcactttcaaagccagctgaaggaaagaggaagtgctagagagagcccccttcagtgtgcttctgacttttacggacttggcttgttagaaggctgaaagatgatggcaggaatgaaaatccagcttgtatgcatgctactcctggctttcagctcctggagtctgtgctcaggtaagcaaaacagaatttca

SEQ ID NO: 10142 - DNA, 2300 bp, Homo sapien
gcagtgctgacatgccagctgcttgtcatctcagcaccctccaggctttaagcgcccacgagtgcgggaaggataaccaaggagggggctgagggtgtcttgtcactggcctgcaggtgcccattggtgcaagcagcctggacactatggacagtagtgggaggcagacagacttctggggggaagggggtgggtccccagtgaagccccaccttcaggctggtgaaggcctgaagcctgggggccaggctgccagtcctgcagaccagactgggaacttgtggtgccttttctgggcccgcccatggctgtccatggatcagttggcatgcgcttcctcctctctgaggcccataaaagccccgtgttcagccagagcagaggagaggatggagagatgatggagtggccacctgcagagaggagctaccctgtctgctgagaagagggtggatcaaccagcagcagagaggagctaacctctctgctaagtgctgaacacttgacaggttgacctgtctacagagaggacctacccactgtgggtcttgtctgagtggttctaacactgaataaagctcctcttcatcttgctcaccctccacttgtctgaatacctcattcttcctcgatgcaggacaaggactctggcaagatgccaccagtcacagaggtttctgatcagaaaagcaacactctgaagatcccataacagaactacaatattgcctccaaagcattatttttaccacttctcatactatttgaaatgtcatatatcacccaaatcctcaggatatacatttatgtgcatctatgtgtgcatatttatacacatatttacaatttctacaaatttataagaaaaataacccttaagaaaaatatgatcaaagaaaatggacagtaatatgtatagcactttcataattcttttttagaaattatttttagacttataattattaagtcatatattaagtcttatatattaagactttcttctaattcctaatatttttactataatttataaggacccacaaattctcccttgcattaattcattgaagagataagatttgccagctatgttctaggcatagttctaagattataggggacggacatttttcactttctaaagtctcccttacacataaatacttcatcataaagataaacccaaggagatccattacacaactctaagtagctctgttttcaggttatcaatgtgttgattttacacaaaatgtgatttttctagtttgttaagtgcttcagatatgtttatacttttttataaaataatgaataatgtaaaggaatctttggttggaaaatatcagaaaatagaagagtaaaaatttttttaaattaggttttcacgaatctttctgactctcattttgcctttgtgtagtacatgaattatttcaaacagctaaactactaagtagtagatatcaaggaaatgttaatataatactataggattcaccctgatttaacaagaataattggaaaaataagcaaagcaattgtaacccagaagttttcaaacatatgtttggatttaccccacagccttaacttctttatcacttttctttactccacccagattcccagttaaatattttcagttgacacctactctgagattaatattaggcccataattctgctttttctcattttcgttatactacaatatgagaggtaaatgttaccttaaagttatacctcactgatgacagtggacttgactgtttttctattgtgcttttgtactgtttctcatcagaggcctgttttatttacattattatgaccaaagttcatcttttttcgtcagtaactatgagacttgctttttatttttatttactctacattaatataaaccactgcattgatcttatgttaacatattaattaatgatctgtgccaaccttatgtttgaaattgggaacagaattttaattcaaacatttgaaagatgaaattttacaaggacctgacttttatatatgcgataaagaaatatttgcatccaaaaccaactgctagtaattctgtgtctcttttccacagaagagaatgtttaaatttcatcaaatgaaacatatttttgaaatacttgataaaatgagatgcctgagaaaacgttctacagtgtcattcttgggagttcttgtcatttttctcctttttatgaacttgtacattgaagatagctatgttctggtaagtttgggaggttgattgtcttttcttcaaaataaggcataag

SEQ ID NO: 10143 - DNA, 2300 bp, Homo sapien
caaataagagaggttatgatttctgtgcactaaaatcaccagaaaatacatttgtctttaaaaattaactgaatgtagatagatagatagatagatagatagatagatagatagatagatagatagattatatcctgttgcatgtagaaaacatgctgaaattattctgggagggttaaaactccaaaacaaacaaacaaaaaaaaaattgagtgagtcagtgttataaatcaagttaatttgcaacattatttttgagttgaaatattaagggtttaacatatttatatcattattttgagggcaccaaagtaactctaaattttaaatcttccatgtgtctttaaaattaacgcatttgattgttttcataacaacgataatattaattatcttatatttatgtaatactttttattttatataacaagcttctatgcattgtctcatctgatccccatatctttattattattattttgctgtatgtagcattaccactctcagtctatacataaaagatgctaagttaccagagtttttacagatagtaagtggtggagcaagaactggaggatgaatcatttcaaccctagtctagaactcttgctcccatgtcacatgctaactcgcttctcagagtaatcaaataaactgactatcataaaagtcagaacttgggaggaaatgtgaacatatgaaagtgtattttcatatattatcaactttttgaactcttattgaggccattgagtaaaaataattttctgtcactgtaaatgcagagggaatgtaacaagtatttgccctgaatccattattcagaaataaatgaaacagcataaagtcatgcaagtgcactgttggtgactttcctttccctaaagttggggtggttgaagtgaatttccttgctctttctccaggtgcttgtactgttcgcatgctgagctgcacagctttcaaagggcttgccctgggatatggctgggctagatttagaaggaactggtcattgaatagctctggtaattcttgcatctcacagttatgcggttgacagctcctttcagtagggaaagcttgggtatatttcaaggtgattgtagttttgtccctctggcagcaagctgctgcaaccagcttagcccattatcctcctctcccactggatttaagcctggggagaaatctggggcttttgtcaagatagaaggtaagagatggataattattccctgtgtgtgctcaaaaagaacagcactatatcatagagtagctttcaattactgaaatgggattgtctgaagttccagtggcttataaattactctttgtaaaaaccaatatttaacattattgtattagtgatgtgcttttaatatctctttcatgtaatatcatgtaataaactttaaggtttattacatgaaactttgcaaacagtgtttaacactcagagaataaaatgcatttccatttttgtggttttattagaagatttaaaaacaaatggctgctctgaaaaaattgattaaaaacttcactgtacaattgactacattataatttttctcaatttgagtttcttaaatctcaggggctagtactgtaaaatcaatgcaaagtaattacaaaatttaaaattccagatgttatgattacatacatcttgtcctttaatatccattctgtcaaataccttttataaacactgctacttaacaaaacacatttggaaaataaaattttcactaattctgattaattaattaggtaaatcagtcttagcataattagagggcagtattttcagtttgtgatcccccaggagctcaacattactttcactctccttttaaaggcagaaattatagtcagaaatgtgcatttcaatttgtagctgacagtttagggttaagatatgattccaggtaacagaagccaatgagagtacacccagttgatgtttgtgacatcatcttccagtcagagtacatagaacagctgaggtagcgttcagtttcagcacagtgccattatgatggatgtttacatctcttcattgagagccaattatctcgcttttgtgtgaggcccaaggatcactcatgcttccaggctgcacagagcactgttggatctagctgaacgaattgttttctctgtctctggtaagggcttcttctgttttaccttctcttttaaaataaaggtagatgtgtcttacagagaaaatattataagggtcaaaaaggattactatctggtaagcttttattcaggaatgtttatcatta

SEQ ID NO: 10144 - DNA, 2300 bp, Homo sapien
cactctaatgtaattgcatgtggtcctgaattcaccaatgggtaatcatcattgcaatatagtgttagtaaaattggtagattctaggtggagatagacatctgagacatcaaaaaaaaaaaaaaaaactcattactgctgtagttacttattatgttaattgaggtactcaatgcacattagtgcaatgcagttagatattcagtcaactgtcaattattaaatagacttttatctttttacatttttgtttttaatatcataggcgctgaacaccatggacattttagaaatagcatttgaggccaataaatagttttgcttgcttgcttcctttctttctttaatggtcttttaaaatatgctggataattttagtttccaactgaaatactgaagctgcttctttccaatctccttgtgtttattcagaaatagctacagtgatgctacttctcaagaggtagaaggattggaggcatcttgctgtggcgtttcgttttgtttctccattttcttttcctctgtacctccttgagtgaagtggtcagctacagttatagggtgggtagagaaaaaagggaaattcttgtttacttttttgttgactgtcaggtgattatattgtttttgtttctctcacagtgtggaaaccccatttttgtcatggaagcaacaatttgcttaaatgtcaaatagacatagagcattacagatcatcatgttgaaagctatggcaagcatgagattgtttttatagccagcagggattttttaatgtacatattctcatggactatgatgcttttaagtgtgctttttgattatgtgaaaatcgttttgtgtaacaaatacaagtgaagaagtagaataaaacattttgataaactttcagtgtttgtgtattgccaatacatctattacagtgtatttgtgttatatctcaaatccagaatattatgaaaatgctaaaagaattttctaacttagagaaaaaactgtcatatcggccgggcgcggtggctcacgcctgtaatcccagcactttgggaggctgaggcgggcggatcacgaggtcaggagatcgagaccatcctggctaacacggtgaaaccccgtctctactaaaatacaaaaaattagccgggcgtggtagcgggcgcctgtagtcccagctactcgggaggctgaggcaggagaatggcgtgtacccgggaggcggagcttgcagtgagccgagatcgcgccactgcactccagcctgggcgacagagcgagactccgtctcaaaaaaaaaaaaaaaaaaaaaaaagaaaagaaaaaactgtcatatcacaacatgtcactgaaatgaaatcaacagaactcaaaatggctcatttttatttagaagagaaatgatttatgaaccttagttttatttggaacatcatattttcttgaagaggatattcaaagagttaatattcacttctgtggtcacatattatgattagaaattcctcttttctatttctatataacttctgcattttgactgacatctaaaaatgataactcttctctgtgaatctgcattaaaataagtgattggtaataaaaatgcaagaattcatattgaggtactgcaacttaaaatcttctgcataatataaaatacaataaactgtcttttggacccaaagagaaaatttcctatacatagatgattaataaactgaaaaaaaagagatatgatttaatttgtaaagagaaaacttcaaatatttctgtcagatagaactgtatatagcctgatagtgtggattctagactagtttgaaagaaagcaatagtgaaaatgaatttcatgccagcagacactttaaaaactagatttagtagcagtcacattagcttagataatgggagaatttttcttcattgaaaatgctctctgtcgcttaagaagaacttactgaggcagcctgccatctagctttttcacagaaaaacaggcttgcagactgcagatgagagagtctggagcagagacaattttaacttagccattcctaatttatctcaagcgttttcaattcatcttcactgctctatgcacacaggaacaccagattgccatccctggggaacagaatgcaacccgggatctagagagctgtcacattccaagaaatatttaaattgtgctgattttcttctggagaactgagcccagggaatgaaactctccatcaagtcatggctttgcgggcaatagatcagaggatattgccagttttctaatggattattgttat

SEQ ID NO: 10145 - DNA, 2300 bp, Homo sapien
tatatttttcaaaaaaaaaaaaccattggattagcagcaagagagttgaaaatggcagaagttgggaatgactgctatttcttttttaattccacatgcataaaggtaaatattgtacaattgacagtacttcacatgcttaatctttttagtagaatgaagggagatatggcaataacttgtattgctgaacaaaaatttactattttcttgcaagatatcttatatttgtaaaatctggagtaacagcttatcatgtatttttgacatactgaatttctctgaagaaatctgagataatttaaaattattatttgtttgaaactacccttatatataccagttatatgtctatagcttttgaatcttcatgtggcacttttgcctatattatgacaccttgagacattaaattcctaatattaaaacatcataggttacaagatattgttttagttaatatgattccagtcattataattcaaatagttgaattcaggtaagtgtcaatcttagtgtaataaatctgttttcctatttgaaatttattaacccaattactgaattttcctctgtcaaaagtctaagtaataacaaatatttaaatatcattaaaaaagaaaattaatataaacaaattggccacatataaattaaactttataaagttaaatgggaaaaactgagaattcctccaatgtattaggatgtatagatcttagtaaaaccagataaaggtagaaactcaatatttggagctttgtgctcatgcaagaaataatccagtgaaaaagatgatatgtctggtttcaagtgtttcctctctgttaggaaacctgaatggagtcaacctctctgaccacagaaattggattcacttctattacctgttagattaaatgctaggataataaagaataataacagatttcatgtcccaggtgggcagagtgttttgtctatttcactgctgtatccccaagtacttagcagagtggctaatgagtaagttaccagtaaataattaaatgaataaataataataatagctcacaataccttatatcacatcatttttacagctaacctgtaaggaaagtagtttttatttcctgtatacagatgagaaaactgaagcacagagagtatgagttaagtattaactttgtgacaatgggcaagtggtggcgcccagggtttcaaataccagtttattgacttgaaaacccctgcctactaacccgtgctatgagagtatatggatctactttaacaagggggagagagtgaagatggaagtaggagagagataaaagataaagaacaaccatggaacatgtgtcaaaagagggaagaatgttatccacctctcttcccacacaacaggggcttgtagtttttaccaaatgtgcatttacatttaaaagaacatagaatttttaagaagtaatagcggcccattaaaacaatccacatctacttttgttggcatattaacaagtcagtgagtatatgtataggcaattgtttatctttctaagccaaaggcacaaagcacatatatttaatgtagtatatcataatacaataattaaaattccacaataacataaattttaagctccataaaaacttaacagtatctccatagactgagaaaatagattatctaataaaaggattgattaatagaaatcattttcacaattagaatgtaggtagagattcttaaaaatttcatctggctttcttccaaaagagaaattaagttgttctgtcattgaattgtgatcaaagtgtcactggattcttatatctctattcctagtgaaccatatggattaacgaataacaaaaggtagcattttatcagtgatttgtggcatgttgtactatgtaaccattagactatcttgttgctttctcactaaagttagactaatttgctaaaatttagacttatggcctaaaattgatagtgtatatctttgtgattctagtgtaatctactcatatttcgtttaactaattagcaacctattgttgttgaacactaatgtcaacatattgagctttctacactgtttactttttcttttagggttcccagtgccgattccgacactgtgaagaggcccttggcagtgacactgtgtgctcattatggagagagaggaaatgtttagatccactttgcagatttagacacatggaaatgcaggtagaattacttggcgtcatcatttttgtcaaaaagtatttcccttcaataatgctgaattatactttttcaaaacaat

SEQ ID NO: 10146 - DNA, 2300 bp, Homo sapien
aatttgtataagtagcaaggagcctaatgttgatccccaagaccatggggaaaatgtctccagggtatgtcagagaccttcacggcagcccctcccatcacaggcccagaggcccaggaggaaaaagtggttttatgggctaggcccagggtccccgtgccatctgtagcctagggacttggtgccctgtgtctcagccaatctagccatgactgaaaggggccaacatagagctcgagctgtggcttcagagggtgcaggccccaagccttggcagcttccacattgctgttgagcctgcaggagcacagaaggcaagaattgaggtttggaaacctccacttagatttcagaagatgtatggaaacacctggatgcttaggtaaaagtttgctgcagaagtaaggacctcatggagaacccctgctagggcagtgtggaagggaaatgtgggctggagcccccacacagagtccctcctggggcactgcctagtggagcttttagaagagagccaccatcctccaaaccccagaatggtagctccactgacagcttgtgccatgcacctggaaaagccacagacacttaatgccagcctgtgaaagcagccaggagggaggctgtaccctgcaaagccacagggtcagagtgcccaagaccatgggaacccaccttttgcatccacatgacctggatgtgagacctggagtcaaaggacatcattttggagctttaaaatttgactgccctgctggaattaggacatgcaggggtcctgtaactcctttgttttggccaacttatcccacttgcagtggctttgcccaataccagtatccccattgtatctaggaagtaactagcttgtttttgattttacagactcataggtggaagggatttgccttgtctcagatgagacactggactgtggacttttggattaatactgaaatgagttaagactttgggggactattggaaaggcatgattggttttgaaatgtgaggacatgaagtttggagggacaagtggtggaatgatatggtttggctctgtctccacccaaatatcaacttgaattgtatctcccagaattcccacatgttgtgggagggattcagggggaggtaattgaatcatgggtacgggtttttcccatgctaatctcatgatagtgaataagtctcataagatctgatcagtttatcaggggattctacctttactttctcctcattttctcttgccaccgcagtgtaagaagtgcctttcacctcctgccatgattctgaggcctccccagccatgtggaactgtaagtccaattaaacctctttttcttcccagttgggtatgcttttatcagcagcatgaaaacggactaatacatttatgaggaatattttttattaatttctgctgggttttaattatttgattaaagatactaagaggaagatataaataactgctgattgaaatgtttcattctggaaatcagagtatttcccttgttttcaacaaattctcaaagccttcaagcactctggaaactttctgctataggaagaagatattcctctttttatgatggatgaaaaataaatggaatatagccacaagatgaataagtagcccaatatattttcaggtacctattaatatatcacaatttgaatatgatttttcccaaatcaatggatagtagagagtacatatttaaataattgtttttattatcttagaatatgagtagctcatttacctatggcaaatttttagtgttattcccaaaacctctatagaaacgaagatttagaaatagctgtttacttgtgaaatacttatcactttctattataaaagtataaactagtttatagtccatattcaacgagaacattgaaagattaaagtatgctattttatttttgctagtcctttgtagttaatatgctaaaactgagtaagggaaatacagtgttcactcaggtaaactgtagtttacctgagtgaacattggcctgcagttacatgtgaggtcatttatgatgagcaaacaatggattaggtaacaatgaggaaaattctagaagtttgagtttgtgtgcttactagcaaccactttcagcgtttctgcaaagctagagaaggtatcttctaatttaaatgtctttaagaattatctattgcgtaatatactgtcaacaggaggtcagttttaaaggaatactactgatagcctgaaagactgtggaaaagaaattatttttcccccttacacactgatagt

SEQ ID NO: 10147 - DNA, 2300 bp, Homo sapien
gatgaaacactgtctctactaaaaaaaatacaaaacctagctgggcgtggtggcacacgcctgtaatcccagctactcaggagactgaggcgggagaatcgcttgaacccaagccgtggagattgcagtgagccaagattgagccactgcactccagcttgggtgatagagcgagactccatctaaaaaaaaaaaaaagctattacagccctatgaggatgattactcctgtaatgaagaatgatgggaaatttgtctccagggctggaagtaggcctgaaaattctgtaagtactttgtgttggccaaagcaggctcacattgtgtgtctttcatctttgatgcttactagagcactaacatattagtcagagaagaaagactttcttctattttgtaatcctgtgacaccactttaagtacagtggctggtagcaactccttggtgacccttcagaattatgagaatcgggcaaagttgatggctgctacccgtcagagcaggagtccagtttataaccgtgagttgatcctgtgcctctcccctgatgaggatttgtgtttctgccagaagctttgctccaggtactgatgaaaccaaagttttggaaatagaaagtgcttcctgagagatgactagctttgcaactactattcaaagaataagtagagtgtgttttagaagatgagtatttcccacaaatgacagaatgttggacttaaaaggttctgtggcagtttgggaggtgacagttgatagttgtgaaagttgttgtctctgagattcgtgaaacacgccgctttttagaatgcctctgaaagaacaaagaagtcactggcactcgactataatatgctaaaaagtttctggttccaacagcacacagccagcatcaggtgttttcttttttgataaatgcaggcggggtgtgatgtgggagaacattttgtgttttcctgtgagaaaaagatagtagaaaagaaagtaaacactttgaaatggcaaatctctttcttcctccctcccctctgaatccagtaatcaaaaaactgtgaactttttttaaattttattttttttcactgtcagtattcaatataactgtgaactttttaaaggaagatgttttattctttgagaacccccttactagttagatacctctaagtgagatatagttgtttaatttttccaagggctaagtcagtaacatgctggacagttgagtacatgcagataagacaaagaaatgagacctgggcctagtccaagcccataaaggatggcagtaaagtcaaaattcccctacaacttcaggctaggaactactacattcaatgagatggaaaggctactattcctaaatatttagtatttattttatttagtcattgtccatcttatcacttaccctcaaaatattcttttgagcagtaagttaaggctgtttttagctcgcagttgattgactaccattactcaagccatttgggctgttggagctcacctttaattaaacaagattcttatgaaaaacttgagaatgaaatctggttgtaggtattcctgtacttttggattagtctaaggctgaaatttcgcactcactccgaaaagaacatcagaatcatttcgaccatgctatgctgcacaataaggagtagttcaaacgacaactttttttgatcccaggtgttttattatagggttttctgatagtcttaccggaaaggaagttttcattctgcttgggaatctggggatgtctctagccatttctaaacttctacagtgcttcccccacgaactaaagataacaggcaagcagtttccattggaactgtgttaaatcgacatctgaaatgttcattgcttataatttgatcttatttaatttcccaaaaaatcattagttactaggtattgctaagtacccacgttcgggaaacgcatcttttttttttttttttcacggttattaaaaccgagggtggggggcggaggacgcacgtgggaacccaccaggcgcctcagcttctgcactacaactcccagaaggcgccgcggccaggaagccgcttctggacgggcgttcccgcccctcgctgggcttggtagttggggcgcagccgcggtggctgggcgcggagtgtgcgtggcctgagccgtgcgggtgactgcttcagggcttctccgcgactggaccgggcgccgctcgaaagcacgccctccattcgcactgcttgttgggctcatcatgaagcgcttgggctccgtgcagcggaaaatgccgtgtgtg

SEQ ID NO: 10148 - DNA, 2300 bp, Homo sapien
gggctggaagtaggcctgaaaattctgtaagtactttgtgttggccaaagcaggctcacattgtgtgtctttcatctttgatgcttactagagcactaacatattagtcagagaagaaagactttcttctattttgtaatcctgtgacaccactttaagtacagtggctggtagcaactccttggtgacccttcagaattatgagaatcgggcaaagttgatggctgctacccgtcagagcaggagtccagtttataaccgtgagttgatcctgtgcctctcccctgatgaggatttgtgtttctgccagaagctttgctccaggtactgatgaaaccaaagttttggaaatagaaagtgcttcctgagagatgactagctttgcaactactattcaaagaataagtagagtgtgttttagaagatgagtatttcccacaaatgacagaatgttggacttaaaaggttctgtggcagtttgggaggtgacagttgatagttgtgaaagttgttgtctctgagattcgtgaaacacgccgctttttagaatgcctctgaaagaacaaagaagtcactggcactcgactataatatgctaaaaagtttctggttccaacagcacacagccagcatcaggtgttttcttttttgataaatgcaggcggggtgtgatgtgggagaacattttgtgttttcctgtgagaaaaagatagtagaaaagaaagtaaacactttgaaatggcaaatctctttcttcctccctcccctctgaatccagtaatcaaaaaactgtgaactttttttaaattttattttttttcactgtcagtattcaatataactgtgaactttttaaaggaagatgttttattctttgagaacccccttactagttagatacctctaagtgagatatagttgtttaatttttccaagggctaagtcagtaacatgctggacagttgagtacatgcagataagacaaagaaatgagacctgggcctagtccaagcccataaaggatggcagtaaagtcaaaattcccctacaacttcaggctaggaactactacattcaatgagatggaaaggctactattcctaaatatttagtatttattttatttagtcattgtccatcttatcacttaccctcaaaatattcttttgagcagtaagttaaggctgtttttagctcgcagttgattgactaccattactcaagccatttgggctgttggagctcacctttaattaaacaagattcttatgaaaaacttgagaatgaaatctggttgtaggtattcctgtacttttggattagtctaaggctgaaatttcgcactcactccgaaaagaacatcagaatcatttcgaccatgctatgctgcacaataaggagtagttcaaacgacaactttttttgatcccaggtgttttattatagggttttctgatagtcttaccggaaaggaagttttcattctgcttgggaatctggggatgtctctagccatttctaaacttctacagtgcttcccccacgaactaaagataacaggcaagcagtttccattggaactgtgttaaatcgacatctgaaatgttcattgcttataatttgatcttatttaatttcccaaaaaatcattagttactaggtattgctaagtacccacgttcgggaaacgcatcttttttttttttttttcacggttattaaaaccgagggtggggggcggaggacgcacgtgggaacccaccaggcgcctcagcttctgcactacaactcccagaaggcgccgcggccaggaagccgcttctggacgggcgttcccgcccctcgctgggcttggtagttggggcgcagccgcggtggctgggcgcggagtgtgcgtggcctgagccgtgcgggtgactgcttcagggcttctccgcgactggaccgggcgccgctcgaaagcacgccctccattcgcactgcttgttgggctcatcatgaagcgcttgggctccgtgcagcggaaaatgccgtgtgtgtttgtgacggaggtgaaagaggagccttcctccaaaagggagcatcaggtacggaggagcgccgggcaggcttggcggcccgcgtgggctcctccccgcggcgctggctcagtgcgaacccggcgagggcggctgggcgctttagaactgccctgcaggccaggaacctctgtaggtttccctggggaggtctggggtgggagttccgtacgccctgagctccaggttcttgtacttttcttagttgtgagggagggaatt

SEQ ID NO: 10149 - DNA, 2300 bp, Homo sapien
atgaggatatgtacattgtacatatgaacatacaaacacatgtatgcatatgtgtgatatatatgtatacaaaatatgtgtgtatgtatatgcaggaatgaggaatgattagtaatcacttttgaatgggaatggaagggagcagaaagattttctttttactttgtaaacggaaaaaaatataggcagtatttacttatttgcagtttttaaaaatgttcagaggacttgaaagagcctatacttagaaactggaagcaacagatttagtattcattgcttagcactgtattgtgattaaatctgtaacacccagatggagaacaaagagaagaacacttgggtacttgctactctatagtataaacaacacaaagagaaaaatgggaatatttttatattaatagcacagagagacaaaagacccaaagcttatcaggaattcgattttacagggagacaatgatcagaaatctgagccaaaaaaaaaaaaaaaaggcaaacccaaattcaaaaacttgggggtagctaacatgttttttaaaatacattaccaggtatggtgctttcagctccactttggtccttgttagcttctatctgatggattaattctgctttctctttatccagctgatgattagctaatctagaacacaatgataatgtgttaaaaaaataaagcagatattgcttcataaaatatatgggcatttcttatgaactagtgatgtacagtaatcagaacaagctagcctttatcgaagtaaacatttactctcaatgctacaatgtcaccattctcaaacaaaaagcctggaatacaaaagccttcacgtttttcttaatatctgacctgatggcatttgcaagtgtggtttcgttataagaggagcttaatgaaagcaggctacagagacccctgaaagtaaaaaaattacttgttctctttcattagtattttcctctgggaagctaaggtttaactcattctatgctcttagaaaagtttaaactaaattacaaactggaaacttagagttgggtttatcctttttttctagtgtgtattatgaaaaagagtgattagcattagagggaagaaataaggacctaataagcctgttaggcagtaaagtcgaaaaatgcttgtctctagttgtagcaattcggagtatataaaaactaataattttttttttaaagaaaaaaacaaagtagtcatatgaatacatgatgtacctaagaacttgaagctcccgtttaaggccttgctctgtctcagcaccttcaggaacatgtttaagaatcttaatctttgaggacaatgaaaagttagaagataaggtttgccatggaaatatgaggatttataaagatacacatttttaacaaagcgtaatattaaaatatggttttcaaaagcacgcataggcaaatttctatgttctattcaccattcattcaacaagtattgagtaactactgcataactggcattgtcctaggcacagaggctaacagcagtgaacaaaatggcaatgttccatcttgcatggtccttgtttagtggggaagcacaaagaatgtgtgtttaatatgatatgatgtaatatagtgccagatggtaggaagagctatcaagaaaaaataatccagggtaagaggataaagagtgatggcaagtagtatagggttagggttagggttagggaaggtctctctaaggagcctctatttcagcagagacatgaagtctgggagcaagctatgagaatatttgggtgaacagtattctaaacaaaggaaacaagtataaggacttgacgcttaaacgagtttggattgtttaaagtactgaaagaaggttactgtggttaaaacattgtgaatgaaatgaagggaaaagtagtagaagatgagattgggaagaaaactgggtgccagacctcatatgttgttttgggatatgaaaagaacttttaagttttattttagggtgatggagaaccactggaagattctgaggataggactttgtgctttgtgatgtgctttatgttttaaaagggttacctggcaactgtgtggagacagcccagaaatagaaatagggtgaaataatccaagagtggaagctgagataccagcttggaaattattgcagttattcaggtataaaacaatagcttggacaagactggtagtgatgtctcaagataccaagaagtggtcatatttaggatatagtttgaaaatagagctgacatgatttaatgatagaaaatgtggagaatgaa

SEQ ID NO: 10150 - DNA, 2300 bp, Homo sapien
gccaaaaaaaaaaaaaaaaggcaaacccaaattcaaaaacttgggggtagctaacatgttttttaaaatacattaccaggtatggtgctttcagctccactttggtccttgttagcttctatctgatggattaattctgctttctctttatccagctgatgattagctaatctagaacacaatgataatgtgttaaaaaaataaagcagatattgcttcataaaatatatgggcatttcttatgaactagtgatgtacagtaatcagaacaagctagcctttatcgaagtaaacatttactctcaatgctacaatgtcaccattctcaaacaaaaagcctggaatacaaaagccttcacgtttttcttaatatctgacctgatggcatttgcaagtgtggtttcgttataagaggagcttaatgaaagcaggctacagagacccctgaaagtaaaaaaattacttgttctctttcattagtattttcctctgggaagctaaggtttaactcattctatgctcttagaaaagtttaaactaaattacaaactggaaacttagagttgggtttatcctttttttctagtgtgtattatgaaaaagagtgattagcattagagggaagaaataaggacctaataagcctgttaggcagtaaagtcgaaaaatgcttgtctctagttgtagcaattcggagtatataaaaactaataattttttttttaaagaaaaaaacaaagtagtcatatgaatacatgatgtacctaagaacttgaagctcccgtttaaggccttgctctgtctcagcaccttcaggaacatgtttaagaatcttaatctttgaggacaatgaaaagttagaagataaggtttgccatggaaatatgaggatttataaagatacacatttttaacaaagcgtaatattaaaatatggttttcaaaagcacgcataggcaaatttctatgttctattcaccattcattcaacaagtattgagtaactactgcataactggcattgtcctaggcacagaggctaacagcagtgaacaaaatggcaatgttccatcttgcatggtccttgtttagtggggaagcacaaagaatgtgtgtttaatatgatatgatgtaatatagtgccagatggtaggaagagctatcaagaaaaaataatccagggtaagaggataaagagtgatggcaagtagtatagggttagggttagggttagggaaggtctctctaaggagcctctatttcagcagagacatgaagtctgggagcaagctatgagaatatttgggtgaacagtattctaaacaaaggaaacaagtataaggacttgacgcttaaacgagtttggattgtttaaagtactgaaagaaggttactgtggttaaaacattgtgaatgaaatgaagggaaaagtagtagaagatgagattgggaagaaaactgggtgccagacctcatatgttgttttgggatatgaaaagaacttttaagttttattttagggtgatggagaaccactggaagattctgaggataggactttgtgctttgtgatgtgctttatgttttaaaagggttacctggcaactgtgtggagacagcccagaaatagaaatagggtgaaataatccaagagtggaagctgagataccagcttggaaattattgcagttattcaggtataaaacaatagcttggacaagactggtagtgatgtctcaagataccaagaagtggtcatatttaggatatagtttgaaaatagagctgacatgatttaatgatagaaaatgtggagaatgaaaagaatgaagtcgttgatgatccaaagtttctggcttaagcaaatgggtgaatggggtgcccttcagttagatgggtcttcttaatagagtccatttttatctatataagacaatgcaaggaacatcttgcgatattatgcattattttatcatgtaaagaaaaattacgttacttacctgttgttcaaggtcttcattgtatttgttaactttttgttctctctctgttgcttcttttacaagctgtttaaggtcagtaatgctttgattttttttggcaatatcagtttccaattcttttaacttggtttcatacattctaaaagtataaggaaaaaaagtatagacatggcaaataatttatgtcactgatttaaaagtcagttcaaataactgtactaaaaataagcaagaatatcttattttactgtttcttctagtcaaagttttagctacatatttatttagcattaaaaa

SEQ ID NO: 10151 - DNA, 2300 bp, Homo sapien
gttttgttcttcccttcttcttcttcctttgcaattgtatttttttttactctggtaactactgttaggaacttatttatggagacagtgtagcttaatgattacattaagcctgggattatcctgcctgggtttgagtcatttaacgtttgctttttgtaagagcttgagcaagtcatcttacctatctgtgtctcagtttccttatctgtaagttactttgtaagtaatacccttttcataggattattgtaaaacgtaaatgaattattagatgaaaatgctcggactagtgtgtggcacatatgaacagtttgtaaatgttagctgttgttagcatcattcatcatcatcacaatcatcattgttcatatatgtttatagggaactaacatatttctccttatttctgtcatctcatctaaatcaatagaatgatttccttaataggaattagaatacctaatcaaaggtgatttaaacactaagaataattattatctgacctaaccagaaccacaaagctagttgtagggcaggtcatatttgaaggttgttgttatcgcctatgatggttgtaaaatagctgcatgaattcaagaaagatgatgtgcccattgaagaagaggagcatttttttctacatagcttttatttttaaataaacatttttttctggtgatacctggcagacattgactccgatctcatttgctagaattggatcacatgtccaagtctgaaccattcagttgcaaagagaatgataccgctatactgggtttatgccaagaacattacacatgtttgtggaatgctcatgtgtagacaacagtgtcttacacaacttcaaaaaaataatttatatataaatatgttttaaattactttttaaattcacaagaatttatggtatacaacatggtgttctatatatgtatatactatgctatacaacatggtgttctatatatgtatatactatgctatacaacatggtgttctatatatgtatatactgtggaatggctaaatcaagctacttaacatatgtattacctcgcatacttttttttttttttccttgagacagagtcttgctctgtcacccaggctggagtgcagtggcgctatcttggctcactgcaacctctgcctcctgggtccaagttattttcttgcctcagcctcccaagtagctgagattacaggcatgtgccaccacgcctggctaatttttgtatttttggtaaagacggagttttgccatattgtccacgctagtctcaaaattcctagcctcaagcaatctgcccaccttggcctcccaaagtgctgggattacagcatacttcttcttatttttttttttttttgcactaagaacacttaaaatttactctcttagcaattttaaagtatataatatactgttattaactttggtcactattttaattagacttaagatgtgtttgtattcaaattattttgtaagcatttaacacccaaatttgagagtggggtcagaatgttggaatttgatttctagaattagtatagggtattattttcctactttttttctgtgttcaataaaatgtttataagattcagcttcaattatattataacccatttagtggtgaatcagggaagaatgaaaataatttgataactttgttgccttgcatttatttaaaaaatttttaattctaggctaaaccctttttaaatgaaagtttaacttcttgtgttttcagatactgaatagctatgatacctcttgtgttgagaaaactttaaatttgcataatctgaagttatcttttcttataaacattttattaggtttacagtattgtctttttgttttgttttgtttttagtgaaaaggagacctggaaaacagaatctaaaacaataaaagaggaaaagagaaaacttgaggatcaagtccaacaagatgctataaaagtaaaagaatataatgtaagtaaaacatttttaacattagtatgcaatattgtacaaagtaggatagctagattcaacaagtaatatggatgtgtctttgtgcagaatttgctcaatgctcttcagatggattcggatgaaatgaaaaaaatacttgcagaaaatagtaggaaaattactgttttgcaagtgaatgaaaaatcacttataaggcaatatacaaccttagtagaattggagcgacaacttagaaaagaaaatgagaagcaaaagaatgaattgttgtcaatggaggctgaagtttgtgaaaaaattgggtgttt

SEQ ID NO: 10152 - DNA, 2300 bp, Homo sapien
ttatgatggttgtatacttgaaaaacatcagagattattctgaatgaataattctaattttaaaaactatcacttctagagtcattgctttctagtatggttcacataaatcttgtgggcagtttggaactggttagcatctagggagctcagataacctatattttaaacaaaagcattagcaatggaaataaggcctatagaatcagtcatgtctccataaactttatataaagggccagacagtgaatattttagaccacctggtctctgctataactaaactctgcttatagcatgaaagcagccattgacaatacgtaaatgagtgagcaaggtggttttccggtaaaattttatttacaaaagcagatgggaggccagatttgacctttgggccatagtctaccaacccctggaaaaaacagttgtctttaccagattgaatgttggcagggtaaatggtgacatgttatatgtattctgtactttgttttgacttaataccatttcataattattttatatcagtacgtatagtattgctgttctttttaaaggctatgtaatttttctttttatacaggtgttaatttgataatttgtgaagtttatgaagtttccaattttggggttgtaaactgttttaatgaatatccttatatatgttattttgcaaatgtacaagtatatctgtggaataaattgctgcaagtgttgtaattgtcatgtatgttgcaaatacattctaacagtttgtcactttttttgctttatggcattttttgctgtgaaatatttctttttatgcttagttaaatttattattttttaatgacttttgacatttgttataatgagaaaggcttctgagtataaacttgttttctcatcttttctcctaatatcttgttttgtttttgtttttgtttttgtttttgagacagagtctcactcagttgcttaggctggagtgcaatggtacaatctcagctcactgcaaatgccacctcctgggttcaggtggttcttgtgcctcagcctcctgagtagctgggattacaggcatgtgccgccatgcgcagctaatttttgtagttttagtagacatggggtcacactgtgttggccaggctggtcttgaacccctggcctcaagtgatcctcctgcctgggcctcccaaagtgctggaattacaggtgtgactctgcctggcctttttttacatttaaatcttcgaaacatataattcattttgatgtaaggagtatcatgtggattcaacagagctactctgttgtccaaacatcttttattgattatttcatcttttattgaattgattgatctattttctagcagtgtatacttgttttaatttgtgtatgttttaatatctaaaaacgttattatttttctgcttttagacttctttatgaatatttttaatgtgaattatagaactggcttgtccagttcttaaaaaatatcttgtggatttttattgggtatgtgttaaagttataaattgttttatagattgatttaggataaacctttttatgttatttggtccttctagctaaagaacacaagataccttttctttcattcattcaagatattttatgcctcttggttgcattttaatgcatacttcataaagatcaattgtataaaacttttcacagttgtatggaagtacttcttgtttataaatgagttttgaaaggttgaaatatttttaaagattgaattataaaaaaagaaaattcggtatatattttaaaatcattttctatttgaatttcaggttgtatatacaaaaggaacagagattatgccagtagttgctcatactttctcatttcaaataatttttattttctgtatcataaatctactaacggtgtttattatttatgataatgaagaatgttttattaactttccttttgcataacagattctattgtgtttatttctagctaattttgtcttctaaagatgatgaaattattgagtatcagcaaatgttacataacctaagggagaaacttaagaatgctcagcttgatgctgataaaagtaatgttatggctctacagcaggtaaaatcttaacagaattttgtttatcaaccagttttattacagttggaactctgaacgatgtcttttatttattatatcatcagtgcctagtgtagcggctggtactaccaagtgtataataatgtcttttgaaatttcttctaccacctggtcccaataaaaaattagaattaagtttagatcac

SEQ ID NO: 10153 - DNA, 2300 bp, Homo sapien
ttattctaatccataatttcaggtttaaactccgctataatgtgatgtctacaaagctccaatttccttcagtttgtcctacataatatactcagttttgccttcttaaggtgtatttttgtacctatcaattgtgtttcgaaaacctttactgccttctcaattgctgatagcataaaatacacctttaaggccctcaacaacctatctcaaagtacttacccaagatttgttttctctacagtctgctacaaacttgctgcaccttgtttcctcaaatataaagaataaacatatttcctgttctcagtatttatttatggtaaccaacagctctagaattcccttactatcttaccactgcattgccttccacttatctaacactactcctcagtattgatcctttgtgaagtcttctgacatctcttaaatcatttcccctcttaacaaatccctatagcagtcattgtctgcatttgtcatttggacctcaagatatatttccttatgttacttttcaacatactcattctatttcccctacacacccttttagaaactttaagtagaaactagcaatgttttatacactaaaatacttaattcacatttaaatatattgcattttttagtggtgatgtagatattaccaggtattttcacaaagattaccttatataagaacagatttttatagttccactaatagccaaacctatagttaaaacctactacatacaaaccttcattagtgactgagtaattctgaaaaggtgtatcacattttcttgcttttcactttttagctcatttacttccacctaagtaaacagaaaagcaactgttttatattttataaccttcaagcaaaatataagaacacttccagattgtgacaattatagttgtccctgaaaaaaataaattcatattttattaataaattaatcataagttaatgtatatatctattattattgaccaattaagcaccttggataaggaaatcaataaattatctgccagttcttcttgacggggcaggtcatctgggtcaactttcattatttctttccagtttatattaggtggcatcttgaattctttcactgtgctccacctctgtaacaaaacaggtgtatattagcattttcaaggtacacagtattattggttttctagcaccttacattttttgcagattatttcattataactttctgatgttagcaaaacagacaattgggccacaaaatagacaagtgggcaaaatagccttgatcaaaaatagcagtcggcacaaactgtcagagtgtcccggctaaataaaatgtgacggcttccttgctaacactaatctaagttaatacttaagatttctggatcccttcctccacacccctacccacaatgcgcgcgaacaccctaatcctggcaagcgcgagggtctgtggaaggccgacaatcatccctgatttggagaaacagaattggggctgaaaaaaaacgcagaaattaacatttggaatgagtgaagttgtgcggcggaaactggaaccgaagcaaggcagtattagggacccgaggctggaagggcggggtagctatgctgtggcacacgggccctcaggctaaagaacctgagcgtggagtgactcgctaatcctgcttacaaggatccacccacctagaccaagcctggcaaccagcggaggcctctcactaccgcaaccaccaagctggacccggccgcgggccctgacagatccctatcgcggttccacgcggactctgggtccagccaaatggtcccgagcaagccaaagcggcagcggctgctaggcgacaccatccccaactccgccaaggccagaataagatcccggatgccaggagagcctacagttcacgaccgtgggtgatgctttacgtttagattctccgccggagtcccagagctcggtgttcaggatgatgagaaggcgtggaacgaggacttcaaatcccagagtgcagttctgcctgaggcttctgcatgctgggaactgaagtccctgagaagaggaggtaaggcgctcccggcatgcaacgcgtaagactgcgacggtaccggggcggcggggaaggaccgagaggcgggaggagcagcggctcaggcgcctgcaaactggtggcctgaacgaggtagaccatgactgtggtttcagtggcgtcactcgctgggctgctcttcctgaggttttcctaagccatcccctggcggaaccgcccccaggtgaggtcgagctgtcggtcag

SEQ ID NO: 10154 - DNA, 2300 bp, Homo sapien
ctattaaatttcattcctaccattgtcagaggtatttgaatcacaacaactccatcttgaataggggctgggtaaaataagggtgagacctactgggctgcattctcaggatgtctgtcagtcattctaagtcacaggatgagataggaggtgggcacaagatactgatcataaagactttgctgataaaacagcatgcagtaaagaagccagccaaatcccaccaaatccaagatggcgagaaaggtgggacgtctgctcgttctcactgctcattatacactaattataatgcattagcatcctaaaagacactcccaccagtgctatgacagtttacagatgccatggcaatgtgaagaagttactctatatagtctaaaaaggggaggaacactcagatctaggaatggcctaccctcttcccagaaaactcatgaataacccaccccttgtttagcatataatcaagaaataactataacaatccttagtctaccacctccaatgggggtgtatgcacctccaattctttcttggcgagatccaggagccctctcctggggtccagatcagaacacctttccagaaacaccatcccatgttaaattatgaattaagaacactgaacatgaagaatgtttaattcaaattattgagtaaacacttacaaaattaaaatataacatttaataaaaatagcaagattgaggaacaagcacttcacaaatattggtttcccagaatgtctgaggaggtgtatagaagttaagaatatgtcctccagccagagagatctgtgttcaatcacactatttaagttacttagcttctccaagcctcagtttcttaactcagatggaaaatgaggacaatgtaagcacctatttcactggattgtaaggaagaataaacaagataatgaatagtatttggcatataatctttcagaaaagtagtaaaattgtcattcctataaatctaactaatgtctttaaaattcatctcacaaaatcagtatctttttattttgtactgagctacttattttacccaaattgggggtttaaaaagaaactcattacttattttcgaaaggaaaatttactgtcaagtacagtaattttttttttaaagcagcgtttaaaaaaaaaaaaagacaaagcactggtccagatagttggaaatgtcatttagatttaagtctacagcttcttaggaaagttaggtagagatgtatcatactccagcatgattgtgagcagacgagcaggatgagcaaaacttgcacgagtaagagtggtaaacaccagagaaggcgctttcatggaagggcaccctaggtaaccaagcaagtggcaacaatagtacaggtgagtccttggatcccttctctctccacccccggcagtggtccggacaagtactaacctctcctctctagagccttgactttatactagctccacaaccatcaagccccacgatccgcgaaaggaatggtgctacaggtaaggcgggcggggtcgggatgccgagacctcttgtcaattcttcgctcgcccccaaacgaggatcacggctgcgcggctctcactctaactatcaagacagattctgatactaaacaaggctaaaactttttgttttttccttcttacagaaggcactaccctggacgccgcttgcaaacgcctgaagagaaggcagggtgttcccactttttcagaatgggaccaggccctacggccccaatagcagaagcttctctaacccaggactgctcccctcaattcctcccaatatgctgaccgacagctcgacctcacctgggggcggttccgccaggggatggcttaggaaaacctcaggaagagcagcccagcgagtgacgccactgaaaccacagtcatggtctacctcgttcaggccaccagtttgcaggcgcctgagccgctgctcctcccgcctctcggtccttccccgccgccccggtaccgtcgcagtcttacgcgttgcatgccgggagcgccttacctcctcttctcagggacttcagttcccagcatgcagaagcctcaggcagaactgcactctgggatttgaagtcctcgttccacgccttctcatcatcctgaacaccgagctctgggactccggcggagaatctaaacgtaaagcatcacccacggtcgtgaactgtaggctctcctggcatccgggatcttattctggccttggcggagttggggatggtgtcgcctagcagccgctgccgctttggcttgctcgggaccatt

SEQ ID NO: 10155 - DNA, 2300 bp, Homo sapien
ttgtgcattgaaccttgccctcctgttgtcctgagatcatcatttaagaagcctaagataacctattagaggatgtgttaataagtagcagagactagttttcaaagctgagaaatctaccctttaaaagccatccagccctaatcaagccactggataactataagcacatgagtgaccccaggcacaactaacagaagaaccatatacatacctatatatttgtgtgtgtgtgtgtgtgtgtatatatatatatacatatatatgtatatatatgtaaaataaagatatattgaagaattgaattattttgaatgtattcatttttaagtacttcagatgcctaacttaacaaagaaaactttctcagtacttaaataactgattaaatttaggaaataaaacttgaaactatagcaaatcccaagttcttataaaaattccaatactatttgtgtatttagctaattattatacttttcaactatagttgtgaatccagaaactacatagtcagtagtttaatatgtttattatgtttaatatgtttattatacgtattattgtatattttaaaattatagttatgcagctaatatatcaaagtctccaggatgtcagattctcttaaaggttgcagttactctaaaaaatcagatgcataatttaatattgtttattatgcatattattgtatatttttatatatttttaaattatttaatttattttaaattatttaatttaacaataatttaacagctaatgtatcaagtctccaggatgttagattctcttaaacattgcaagtactctaaaaattagatacataagttgttcccaagtataactttaaagcactgaaaccacaggtttaatttacttttttcttctattaattttaaactttcctgtggttagaacatttaaccaaacaacagtttgtcaccccaagtgaattgatgttaccaagccagtggcctgaggttatttatgggaagagaggtttctgacctgtacacaaaacttgatttttacctacccaaaggtagatatcctgagttgtttcattcggtttttctaaattacaacatgtatatatagctgtcctatattggatcccatttcctgatttctgtatctttgtttcttaatatactgtttcattttactagtgtaccttttctcctagtttcttgaaaaggaacatcagaggtaaattttttgagacctttaatgacttaggtttttattctactttcccacctggaaaacttaggtttattaatatagaattttagtttagaaatcaatatgcctcagaagtttgaagcattactccttttttattttggaagggaattttttgttttgttttgtttctaacagcattttgggtgaaaaaaaaaagatttttgattcctgatccttactctggaaccttttttatttccagaagcttttagaatcctatttgttttcagtgttgtaaagttttacagaattttgtgcccagtagaaaagggatggagggtctcaacctaaaatatatggacagacttttttttacttagcctttattttcaatatgctgccttttccctgttatcagagaccctatgttttaaataatccacagaggaaacctccagtcttctgccttggaataggagaggttacttggctttatcccgtaagagagggggctgacataatgtccccgttatcagggacattatccagtaagagatggggctgagtttcaacaatgtgactagcttatgcttcttagaagtggatggcattttagctgcgcttttctctggagaattaatatgcaattacttacccacctactaaaattgaacttacttggaataaatatgttccttattttatcttcatgattttttttccagtttttgtccagaagtgcttatagaaaagatggctaatattaacctaaaagaaataaccttaatagtaggtgtggttactgcctgctattggaacagcctcttttgtggttttgtttttgatgatgtttcagcaatactggataacaaagacttgcatccatctacacctttaaaaactttatttcaaaatgacttctggggaacccctatgtctgaggtaagtaattacttacatattacttgtacatgtctcagattttgaaatattctggtattttattacttctaattctttatcaacattatcatcacaacagttacagatttttaaccctaaaatgtttatatgaaacgtaacatgtttgtaataaattgaacagg

SEQ ID NO: 10156 - DNA, 2300 bp, Homo sapien
ctgagaccacgccattgcactccagcgtgggcgagaagagcaagactgtctcaaaaaaaaaaaaaaaaaaaagactgtgcatctaataccaatgtggaataatgtgtcaaattatttcacctaataaaccagcacagtttcttgaatgaggcaggagatagagaggagaaagcatgccagaattagcaagtctccaggatgattttaaaacacatggtttatttcagccggtttctcaaatttactggttctggaactacagagattctgtgtcacatattctgtggaattaatatattaccttttaaaaatttatgcttagtcttagaatgtgcatatatttctgttgttggtctttggaaacagtcatattcctagttatgtttagaatacttttaattttattcattttaaattatatattttatttaatcatttagcgagatcatgatttggtgttcatggtactttaaaattcctaaggaagttcacagtttttgactgaattgtcagtggtagtgagatgctagcagtccaatatcattgagtcaatatcattgagtcagtttggattctagaataataacatgttataagtacatagggatagaaagcacatgtttttagtagtcctagctagagctgctataattaaccaagaaaacataagacagaagctatcaagaaagaaggtaagaaattgagagcatggagtcaagaaaaaagtttttacactcaaagcagaatctatatgtttcttcttttggaaacaatacatacaggcgaataaagcatcaaattacatgcacatcaggaatttaaaagcaatcatttgtgtcacctttgacatcctgtatgactgtcaattttcttaatcctttatattttctagtgaaagagagaacattatatcttactttcttctaatgaatatcattgagtaaatatttatataaaactatttaagtttaaaatatctctgaaaaataagaaacagtgataatatcatttattaaggcaaacaaaaagtacgtttgtaaatttgacaatctttaatcatttatttcataatcataatcgtggaggaattgaaaaacagaaagacctgctatcacctcacaaatgaaatacttagttcattgtgttttattctccttgcaaatcattgacgatatttaattaaaaattacaaaactgctagacattccagtcaaaactagtttcctctcttacaagcaggcagatcaaaactgactgacatttaatattatttgtttaccttcattttatctttaataaactcaagaatcttaaaaagccaatatatacatggttaaacaaattactgaaaaatagaactttgaatttatgattcagccttttccaaagaaacaatagcacaagcaaaaataaaaaatgagtgaaacatgattacaagtgttttagaaatacacgatttttcagctgtgtaggcacgtagtttatatcaactatcaacaaattgttcatgactttagaagggcaaacattagagtaggattagattgtggaatttccatggtttaactctaagaaagcacaggattggggttggaaattttactggaaagagttgattgtttagactgttgatttagttatgtgaaaatgggaggaggtagggtaatagctaaataggaactagaatataaaatgtaaacatagagttcggttgaaaatagtgatcaacagaagtggcagtaagtaccccagaattcctcagcttaaaaataagaaacaaatcaacaaaacattttctactttaaccacaaaaaaaaagcaaaatgaacaaagtacccattcatataagacaactaccacagaaactaaaggaatgtcttaattcaaaacaaggaatttgattttggttcttacttgccagagatcctaggcaagcatactcataaagtgaggaaatagagtcctaagagattaatacctggaatttcattgttagaaaaatttgcacaatttcaacggaatgaattggtgaaagctactctatcacataaatactattcaaatagcaatttacagtgtatgctgtgttccatatcctaggaaatctgttcattgttgatagggctgacggtctataaggaattatcactccctaaaaggaaagaaacttgcagagcaattcagcatccaaggaaagactgacagctttgaaagagacctgataatgatgcaagtaggaacttgcatgtgcttgaagtaagcactgatttaacaaaacaaagactctgttctgcacatac

SEQ ID NO: 10157 - DNA, 2300 bp, Homo sapien
tgctatccttcgcctagccccccaatacccaacaggccctggtgtgtgatgtttccctccctgtgtccatgtgttctcattgttcaactcccacttatgagtgagaacatgtggtgtttggttttctgttgttgtgttagtttactgagaatgattgtttccagcttcatccatgtctctgcaaaggacatgaactcatcctttttatggctgcatattattccatgctgtatatgtgccacattttctttatccagtctatcactgatggacatttgggttggttccaagtctttgctattgtgaatagtgccgcaataaacatacgtgtgaatgtgtctttatagtagaatgatttataatcctttgtgtatatacccagtaatgggatcgctgggtcaaatggtatttctggttctagatccttgaggaatcgctacactatcttccacaatggttgaactaatttacactcccaccaacatgacagccattctaacccctatgagatggtgtcttattgtggttttgatttgcatttctctgttgattagtgaggttaagcaatttttcatatgtttcttggccccttgcatatcttcttttgagaaatgtctgtgtcttttgcttacttgttgtttatggggttattttttgcttgttgaattgtttaagttccttatagattctggatattagatctttgttggatgcatagtttacaaatattttcccccattctgtaggttgtctatttactctgttagtagtttcttttgctgtgtagtagctctttagtttaattagctcccaattgtcattttttgtttctgttggaattgcttttgaggacttagtcataaattattccccaaggccaatgtccagaatggtgtttactaagttttcttccagcatttttacagtgtggggccttacattttaatctttaattccttttgagttaatttttgtatgtgttgaatagtaggggtctagttccattcttctgcatatagctagccagttatcccagcaccatttattgaatagggagtcctttccctattgtgtatgtttgttgactctgtcaaagatgacatggcttgtatgcatgtagctttattttagatttcagattagagatgttcaatctgtataaatgcttagaaagtaatattaacacaataatttattaagcgaccacaaatatctacaacttgactttctaagttctcttccaaatgtaattagaaggaaaccaatgaaaaccaaggacgtaataatgggatactgcgctataggtagatgtgctgagccccagcacacaaagccagggtttgcatcctacctgcaccagttactcctaatgcgtgtaccttggggataccggttaacctctctgagtttccatgacctcatttgtaaaataagcttaatataatctctcatggggttgtggtagagactgtatatgaaaacttgttttaaattataaagcacgtttcaaaaacagtattatttttcagtctcaccagaaattgaatatcagtaaatcagcttaacgaataaattactttattattatacactgccctaccaccagtggtagaatgtagatttcagtgtttttatcagggaacttcctataagccttctttgaaccaatatttgtatataaattattcatgaaatggaattggtcaccatactctttacattttctttgctttttagacatatactcagatcccacactttctaaatactaatctagttgattgtatttttgtatttttaaaataatataaattatgcttaagaaagggctggattgttaagcagcttgtgttcagaatacctgccacttcttgctgcgtttttctatctggaatgcctttaatttacctggtttattcaaaatgagatagaatattgctgcttacttatcgctttcacatctgcaacaggtctgctctgtctttgtcactagggtttacataaaatgactagacgctttttcctttcaaagatgaggatgaagattaagaagagaaaagaaattatggaagcttggtggaaagtttgagaggaagaaagttaagtgtaaagaataagggagttaacgccaaaaataaatgaacaaaaatgccgtcatgtctggcagctcaggtgtgttttcaataagcagcaatggaatggacacggtggctcatgactgtaatcccagcattttgggaggccaaggcaggcagatcacttgaggccaggagtttgagaccagactggccaacatagca

SEQ ID NO: 10158 - DNA, 2300 bp, Homo sapien
ttttggtatacctgaaaggtctaggaatcaatcccctgaatatactgaggtactccaaaactacaaagagtagatgttaaatactctcagctcccaaaaatgatgagtatgtgaggtgatggatatactatttagcctgatttaataatttcacaatgtatacataagcagaacatcacattgtacgtggtaaatagatactatttttgtcaaatataacttaataaagctggagaaaaaaaataaaattctccacttcaaaaaagccttaaaggggccgggtgcagtggctcacgcctgtaatcccagcactttggaaggctgaggcaggcggatcacctgaggtcaggagttcgagaccagcctggccaaaatggtgaaaccccgtctctactaaaacaacaacaacaacaacaaaaatacctgggcgtggtggtgggcacctgtaatcccagctacttgtgagactgaggcgggataatcgcttaaacctgggaggcggaggctgcattgagccgagattgcgtcattgcacttcagcctgggagacagagcgagattccatctaaaaaataaaaaataaaaataaatcttgaagaaaaaaaaaacaatcatttgctatgcctccagtatccaaattaagctcattttgatatttgatgttcgatatatttgtactaagagtacctaatgtataaaaatctttctaagcaactatcaacttggaatcatgattgatgtgctgtctatacatattttttctaacatgagaaagtgagaacgcagtcccccactaaattatgcagtcgagtttcccacatttggggaaatcacagaagtcagcacatctggagtgaaataaacaagcttcgccctgattacaggtttggcatattcatgtttaacaaacgcaccggaactaattaaagcaaatttggactcctactctattattaaaataactaattcctaaactcatacattattctttcttttaaagatcactgatgttaatgttcagctaatattttcttttaaaaaattaatgaaatgctttggaatgttctccagttatacaaacaaaaacagacacattctggagaatcaataaaatatttgaagtattttttaagactgtacagctggagctccaggtttaaattagagctctgccatttactagatatggttggtcaagaaaattaaccttgtatttcatcgtccataaaatgggaataaaataataagatctacactaatagatttgatgaaagaatttaatgagataatctatgcgaagttcttagtctggcacctggcacatgaataagtgcatcacataatgatgttagctattattattgtggttgcattatctttccgttcaaaaaagtacaactttcaaagccttgctgtgttggcgacctgtagtttaataatctatcgcttctctttcaatcttaatttctaaagacacagtaacaaaccattccaaatgaagcgtctccccttgcaatacttaaccttgagtcaacaattcttgtaattattaaatattcattcactaaagtaattgttttttttaaaaaatagaggtgataggacaatggcctaactacagatcgcaattaaactttatttctctaaggcaggcagggtgaattctttgctccgaacctcccggactcctctccctctccgactttgtataacagagggagctccgagccctctctggcgcgcgaggtatttcgtctgtccccgggggtgccaggtgagccccagcggatccgggagggtaagctgggactcctcgcgagcagtagctgcagggtaccaagcttcgccctctgcgtccccgcgccttcgcggtctcccgccagtgcaggtccggggcccccaggcgagcggacaaggttggcctaatctgccaaacttctggggcatttaccgtgctctggccgccctcccgattcttccctccgcgcccttgcctgcttctcgcctaccccgggctccggaagggaaggaggcgtgtccggagcaggcgggcgggaactgtataaaagcgccggcggctcagcagccgggcttcgctcgccgcctcgcgccgagactagaagcgctgcgggaagcagggacagtggagagggcgctgcgctcgggctacccaatgcgtggactatctgccgccgctgttcgtgcaatatgctggagctccagaacagctaaacggagtcgccacaccactgtttgtgctggatcgcagcgctgcctttccttatgaagaagacacaagt

SEQ ID NO: 10159 - DNA, 2300 bp, Homo sapien
gaatgttattgctatgtttgttaaatggccaaatacggttcagcatgaagacacaattaagtttaggaattgggaaataaagtaagcttcttgatttaatttcaaagttttctgctataatcattctaaattttcagagaagagagttattgaattctaaactctattaagatgtgtgccaattcaacttccatgtgtctcaatggtgtgtgaccatcactgcatgatatttatatacatggggttgcccctgtcctttcttcatcagtctacaggaagttccttcaaaaaataacctcaaactcatcttctgagtcagtggtcatccttaaaacagaatatccaggggatttcatattccttggccattctcaggggccattatattcataagtaggtcatcaaaagcaaacaggtggttaggaaacattatagtgaacgtaagagcaggcaattagcaggggagacaactatcccctaaatcaaagtgtttggctattaaagaatttgcttgtgtgtctttaactttataggcatgtatttgaatgtacagaatctgactaaaggaagggtctctgggcatatctatagtagcaatgacactgattctctgtacatgtgtttccacagtacccagttggcaaattgaagccaaattttcataattatttggttcaaagccaaaatctgattctgccaataaatacattcagcaaatatatacttggcatcatattggtgcttttagggaatattcccttgtttgaccacagattcttggctcaaaaaaaattttatgtgtgctgttattgaaaattcactgtaatccattgctttcctaaaaattcatgaccctgttacacaaaacagctcattgaaattgaaccagtttcactaaagaatctatgctttctcgtttttattaatatctacccaaacatgtatcatttcctgctttttcttatgcatttgccctgcttcagacatcttgaagcattgatcaactgttttctgaaaaacaacaatcattagagtttgattatttcataagtgatgagaaaaacctagtttctacataaactatttgaacctaaagtagttccaaatgatataactccaaaattctagagttctggtcaatgtcttcccaattccatgaaaaggaatcggggaggcgggggacatatgtatatatttaatccagttttgcaacactccacatcaattcccagttcagcaaaatgttcagcattcttgactctattaaaattcttgcagttaagttccatatgcctcaatggggtgtgaccatcactgtttgacatttattgggttggaatgcttaggtataaagattcagtattatttgtgttgccaaacctgaaattattttaaaaataaggcataattataatttctttataatctatagggtgttagaagttattcaaatttgactccttgttttgctgatgtataagcacagattcacaattttccgaggataccacataaaactaataacgcattcagccatccagccattgctcaatacaaattaagcatttacaacaaatgaggaacagtgctagacttttagaatatcatggtgaatgagacatagtctctgccttcattgagattagaaggaaggtggccagtaaactgacacatcccatacagtagaacaagctattatgatatgatagagaagtgttatgtacatagaaattactatgaactacggtcatatatagaagggtacctaactctgtcctagccaatccagaaaggattcctgtgggaaatgacatgtaagctggaactttaggatgtgtaggaattacaaggaacaagggtctctgtgggtatgtgcatgaatgtgtaagtgtatgtgtagaaggaagctttcccgaaactgaaaataattcagtatgttgcagcataaactggcttgtggtagtgtgtatgtgatagggtgaaggtcagaaattggaagcctgaaccaggagttgagtaataaagttctttctgttctatgccaagaagttggaacgttattatgggggcaataagaaaatgaaagtttttgtttgtttgttttgagatggagtttccctcttgttgcccaggctggagtgggatggcgctatctcggctcactcgcctcctgggttcaagagattctccggcctcagcctccaagaagctgggattacaggcacgcaccaccatgcccagctaattttgtattttttagtagagacagggttttgccatgttggccaggctgttctcaa

SEQ ID NO: 10160 - DNA, 2300 bp, Homo sapien
tgtttccccaacaataacattgtatacttttgcttgattttgaacattctatttgtatcatgctatatgtcatcttctgtgacttatttcatttcacattatgtttctaaaatgtctttctatgcttgtgagtagctttagttcattcatttttaggttgtgtaatattccactgcataattattctataatataattcatttagtcactctcttgttgttggaaattggaaggtttttctttttttcttttcaatttttactgatacgaaggatactgtgatacatgttttattcatttctcttggtatacatgcccaacaattcttctagtttctagggtacctaagagtggaattgcttggtctttgcatgtaaactatttaacttgatatgaaggtgtcaaactgttttccaaagcgattaatttgatgtgtgttcccatcagaagtgtattaatatccattcattcaaatctttaccaatgtctggcaatgtcagacttctgtatttttgtgcatttagtttttcacaggtgtactctcttcctgatgtctattctgttctggtcaataaatttgactctgtgtctataccacacagtattaattattctacttttgcctttttttctctttttgacagagtcttgatctgtggcccaggatagagtgcagtggtgtgatctcggctcactgcaacctccgtctcccgggttcaagtgattctcatgcctcagcctcccaagtaactgggactgcaggcccgcaccaccatgccaggctaattttttagcattttagtagagatagggttacaccatgttgtctatgctggtcttgagctcctgagctcaggcaatccacccattcagcctcccaaagtgctaagattacaggcattagccaccgtgccgggccggctttttatgcaacttgtcttgacaacaaattatcaatgttctcaaaatacactttgggattttgcttttcaaaagaggccaatgccacctcaatcacagctttcaaacctcctagctcaaggttcaatgtccttttcctagagtcagacagttggccctgccagattgctgtgcactgtctcagagtatgataggacaatattggaggtcccagatgtctgctccttctgtctccaagagccatcctggtcaacaccgtgttggcaggtcaaaatatgtgctgcttggccatttgcccttttatgcatgatcctgtaaatatctgtaagccaccacttacttatctactctcccaattatgagcacccaggttacctccagttgctggacactacaaaccacactgtcatctttgtgcatatatgcttgcaagcctgtgtgaggatttatttgagatatatgcccaggaatgaaatggctggatcataggttatgtagatactttatctgcttaaataagaacagcagcaccaatgtacactttcacattactcaacatctttacctatgtgtctctgcatgcacaggtataaagtctggaaaattacagttttggccttactcacacaacttcctgaaaataatttctcaaccctagtccccatacatcatgaaaagagcctttccttatgacaatgtggacttgtgcttctttgtcccaccaggtccctatctatctttctgcctcctccctatgcatgaagcacctcatcctcaaatttggggagatcctgtccaatttaaaaattctgctactcaatcatactaaaatagaaagctatgattgattttgatgagtatgactatctatttggggtgggaagaagagatgaacatggtttgttttttagatggtaaaaacaactaaatagaacactaagagatgtgagcaagcactagagtggtgccaaaattgttcttcgctctgatccctccgttcaacagatctataaagcccttcccagtctctcttcagatgccagggctacgggattccactggctgtagcacctcatcgcctgctgtaggctccatgactcgtttccagtctgccatcttgtggtccttcctgttgctgcattcatactggtttaccgagagggcaacagtggatttagtagacttcacgtagcttgcgtcgctgctcctgtctccgtgtaactcacaataaagagattttggcatcaaccgtgagcttaggggtagaagggtatatgttaggaggtgggagcagaatcaattcttcaaatcttaatgatgtaagtcataaagatgtttcctcgagccactgttgattcattgttaatgattcattgtta

SEQ ID NO: 10161 - DNA, 2300 bp, Homo sapien
ctgaaactagaagatacccagtgaaatatacgagttttgttccaaggactgcccaaaaatggtgcggagaggagctcggcaatccccacctttgtcgaacacgctcctccaggggcggcctgcctgaagcagagctccaaaattggcaacctaggcctcgcagccgcctttttttagcctacatttcccaaaccagggaagaggcgggtgactaaaaatgcaaattgcagcgggggtgttagcaggcatgcccgtgggtgcggggcgtcgggcgaagggagaccccgcgaccttaggcgccctcgcggtgttcacggtaggcgcaaagcgcagcaagggacactccccaaagccgcaccccgccggacggctgcccccgcttccgcctctcaggcagcggtgggacaaagcgcggcctcttttccgccggggtttagggagggaaggccggattagggcccgcgccttccggctgcatccctctcgcgccgcgccggccgcacacaggtggttttccgctcgggaggggcaggcttcggcacttttatataacaatagagctctgcgcgccgggaacgcgcctccccgccgccgcggcccccacccggccacgcctccatccggcttccaatccgtccgccccgcggcgcctgggccgagtgctgctcgctggcctggcccgcacctccccaaagttacctgctggctttgcagcgcggtagagacgttcccctcgactccttgggagcgaggagccaggggggtcccggcaggcactcgtccttgctccccccaccctccccagatctctatggacccgggagtccctcgctgagccccgcacccgtccactgcgtcgcgcacagccccgtgcccaagcggggagacggggacggcggggcggtggcagggagcgcagcgcgcaggcgcggctggtgctccccggagtgcccggcgctggacaaagggaggaggcggcggcaggagagggctggggaggccccctctgacatgcctccctgccaactgtaaccaatcgtcgagcccccctgccgagcccccgcagcctgcaggtcttgcgggaggacttcctcacgcctcgcccatggcggggactgctggcccggcccggcgcgtcccagcacacctcgctcaggcagccccgccagaccggctcccccgtcagaagccgagctccttgcccagaaatcattaaccagcgcgacctcccagcaggcgatggtggtggtggggcggggggagagatatagattcccccgaacaatggcttgtaactccccacgccgccggagcggaatacagtaaaagcactggactgacctaagagtttgtttctgcactctacattgttttaatgaaaataaaatgttattttaagaaaaaaggttttcttctgattttctgcacaaccagacgtttgtttgtttgctttaaaatgtttcaacaaaatcctggtttgtttcgaaatatgttggattagcatttaacacctcatcggtcactaaagcccagtcagttcaccagccccaacacagcctcggctaaaagaacatcagagcaaacagagctgggcctttaaaagtggcaaacaaatgccacacaccgcctaaagaaggggggttgggggaggggagggttaaggcgaacttgggtccaaatgagtttgaagggaatacaaagaacgaaaagtcagcacaagttttcctaaagctagctcgcgaacgcaagcgtcgcgaacaagggcttttgtgcatgctaattgcgccattggtgcgcaaaagttccgacgcgaagtgtgaactctcaacagaaggaaacatgagacaactgaagtgccctggtttatgtgccctgctcctcctccgctgccgcctccccttctttctccttcctcccgccgagcccgctgttgcagcttgtttgcactggggcttatccggagcggaaattcctttccgtttttgtgaatgacaaactcattaacaattcatcaacacaacctgttccagccggcccgtccccacggcaacagccccttccgcagcacgctcattggctggcccggagaatgtatccattgagacgctcgctgtttgtatccattgaggagctgcctcgcgcagggggtgtgcgaggctgagtccaagagatagcaaatcgagtcttaaataatccggggagaaagacgcccgggtagatttgaggtgcagccttggagggagggattagaagccgctagactttttttcctcccctctcagtagcacggagtccgaatt

SEQ ID NO: 10162 - DNA, 2300 bp, Homo sapien
aataaataaataagaaaagaataggtaggagcaagcctgaaagcaagtctggctcagagttggtcacagtgggcagtcaagagaatttagctgaaagggcaagtaaatatgtaggaaggagagagcctatattaagttaagatgaggaactagaaaccagttaggcaccagcacaataaacataaggcactcctatcttggtttcttctgtgtttcctgttgagactggatccagtgcttggtttagcctacggctgagaggacagccttttagaaaggaggcaaacagaacagcctgctggagtgtggagtgcagaactaaaaatcagggcagattttgatgatactgatggtctgtctcttagcttcctggtcattgcagatgccttttcttttctttgttttctctaggcattgtacttgaattcaggccaaactatactcctgatttccactcatgaaatttacccttgaaacttcactgagctagtccctggatgctccctcctaatttttgtttaatatgtatttcagtttttcctgagtaatatcatatgtcaggtgatggaaatttatgataaagttacctttcctccctacagaccactggaagggtaagccaggttggatctacgagcctttattgactgttccaagtggaattcaacgtgtattgagttctttttatgtgcttgacatattgctagatgctagtcttatagagatgaataaatcatcattcctgtgcttcaaaaatgtgctgcttaagaggagacaaatcgttctttagaaagtcactgtataatgtagtaagcaaaatcgttgtagcaaatagggagccattaagcctgtctggcttggccaagggggtctggggatggggaaaatagtccagcctgagaaagcagtaagtgcaaaggcaggggtgtgtttgaagggctgtgactgttccgagtacaaagttcagtgtgagtggcaggatacctcaccaaagtacttgggcattgtgctttcttttggagaagagccagtgacacatttacgctgggatttacatgcttggagttacgctcttagcaaggtaataagcacaatatgtaggtgactggcaggggacaaaagattagagcagagagaccagttaagaggcttttgcagtaacctaggtgaaggatgttgaggatatatttaccttaaggcaagcagagccaacatagaagaggaggattcagaagatatttaggaagtgaggatgatatggtttgctaacttactggatgtgggagaggaagcaggagttgagtgtgacttccaggcttctggcttggacacaggcggatgtcacgctgaccagccaaggtagcaaaatacaggatgaggtgcaggtgtatgggagatcagtgtgaacatttgaacatctgagacacatatattgtggccaactaaattctgttgcctgatgtttttcaagcatttatgacaattttccccataggttatcttgagtatcaatatgattttctaaatgggaaaattgctgagtcctagatacaatgtaaggtgaaaatgccttggcaacttgggaacactgacacaaagtagcgtttatcacatatcaccttgtaactccaacactatctagccttctcccattttaaggttttctacttctcaaatgcctcacattattttccccatcttttgtttttctattctcttcttttctaccctttagttctcaacacctgaaatttcatggaaatttcagtgttgacgaagagtacagtacaacatagccctttcatacttttgttaggttttacaagagttaaaccattttatttaaactattttatatgtttcaaagtctgtattgtgattaagtattaactataattaaatcaaatgagttataaatattaaactgtttatttccaggagaggaaaattctcagaatttaaagctcatacagctccagttcgaagtgtagacttttcagctgatggccagtttctagctacagcttctgaagacaaatccataaaagtatggagcatgtatcgccagcgcttcctgtattccttgtatcgacatacacactgggtacgctgtgccaagtaagtgcaaaaaatttcatattaagatgtccacatattttttctgcttcatgtttgcccccaacttccagaaaaagggtttgaggacatattcattcattcattcaacagatatttgttgtgtgactgctttgtgcgggaacggtagtaaacaaaatagtgaaaatccttgttcttacatt

SEQ ID NO: 10163 - DNA, 2300 bp, Homo sapien
tccctcttctagtagtccccagtggctattgttgccatctttatgtctattgtacctactgttcagctctcacttgtaaatgagaacatacggtatttggttttctgttcctgcattaattcgcttaggataatggcacattgcactttagaagaagaagacacacctcccaccatggcttctcctcctccatctgcccccttttcagcttccctcccaccggtctcttctctcctgtctactatggaaacgctgacctccttgtcattcctcattcttccaggtgcttttgcacagggattcctgtgctcagagtactctttatccatgtctcagccaggatcgctccctatttcactcacctctctgctcaaatgtcctttcctcagagtggaccacccaatcaccccacctaacattgatgagtaaataatatataaaagttttctgtatctgtttattattaatgctgtcttccctactatgtggttctttgaaagaaaggattgtatcttatttgcttttgtttatctcgtttgcagcatgatacacagaactcaaatagtgtcctgagtttattacatatgataactcatcagtttccttgctttgtctgcattagccttgggtaattctgactctgctataaatctttagtaatttggataagctctggtggaatattaactttttgtatttttttaaaaagggggtgctaagcagtattgtagctgaactcacttttaactgttttacatggaaataatgcatgggctgagcccaaatgaactttgtatgttggcaaaagaacataggtttcagtgactttatatagccaggccctatgtttctctaacagtgatactaattgtgttcgaatttataacattacatttttttctaagcactctacaatccagatttagtgattctcattgacctacttcctattattggagccattctagggctacatgcatataataaaatttgttttttaggcaagagttagatctacctttcatttgtttatttgttcattctttgtcaagtcagttatttccaccattgattgcatttttcctttttgtaaatccttaaactattgtctgacacacacgattcttttaattcttttattaatcatcaaatgccattaaattatagagcagaaagagactaataaaatcatcttatccagctataaaagtattattggatcagttgataaaatatagttgctatattaaaatattgcatctttaataatcagcttcatgaagctgctaactgtgctatgggtgtgttaagagactatcttaaatcttaggaaaaacacactgaagtatttaggaataaagatgctgtgagttgcataacttactcctaaatggttcaggaacaaaaaaatacgtatgtgtttgtgtgtgtgggtttacgtgtgttcatgcgcaaggagaaacaagtacagagcaaattacaaaccaaatgaagcaaaacattaacaagtagatttgggtaaaaggcatattagtgttatttgtactattcttgtaacttttctgtaagtgtgaaattatttccacataaacagtttgaaaaattatctcatccatccctctcaggaaaaacattcagtcctcatgacatcatgacacagaggttaactagctttccattacccagagttagaaacaaaactgactcttagtcccgtgtaccctctgttacactgtgctgcggccttctagtaaataaagttactgagcgctaattgaatacgggggccagtcatcctgctgtgtgcttacataggacacagccaagcttgcatattagtgatgtagttttgagtacctttaaaaagtaatttggctattacctgggcagccttacaacctccagccgctctattacctggatgccttgttattagatatgctgctcattgtaatgagacacacctatgtttgcattttaacaaacagtggttttgttcttctatttcttgatagctactgcttcttgggatacctttctcatgctatggaatttcaagccacatgctagagcttacagatatgtgggtcacaaggatgttgtaaccagcgtgcagttttctccacatggaaacttattggcgtctgcctcacgagacagaaccgtgagactctggattcctgataagtaagagaaacaaagaaacacttgatatcctttggatttggaaatgtgaaagaaagctgaccctggctgctgctcatgcactgctgcctgcactgttattctcagtcacataa

SEQ ID NO: 10164 - DNA, 2300 bp, Homo sapien
ttggggtgaaatacctgtaatgaaatttaccattttacccattttttaggtgtacaattcactggcattaagtacattcacaatgttgtgcaaacatcaccactatctatttccagaacttcatcatcccaaacagaaactctgcacccattaaacagtaactccccagtctcccttacccccagccctagtaacctctattctactttctgtccttatgaattcacctattctaggtacctcatatgaatggaatcatacaatatatgctcatttgtgtttggcttattcacttagcaaaatgttttcaaggttcatccatgttatagcttgtatcacaatttcatttctttttatggcaggataatatttccttatatgtatatatcacatacattttgtttatccattcatctgttggatactaggattgtatccactttttggctattgtaaataatgcttgctttgaacactggcatctgttggagtctctgctttcaatacttatgggatatacctagcagtgaaattgctggattataaggtaattgtatgtttaactttttaggaactgacaaactttttcacagagctacatcattttacattcccaccagtatccagcattagttttaaacatggcaggcttttaaaataaatcaagcctaaactggtaatatgtagcaaaactaagagtcctgcaacagtttgctgacaagttgctgatatcaacactcttaacatatcatctcctagactaatgcagtgtttctcaacatagacagctgagactcccatagtaatcatctatggagcttgttacatcagaagggccctggatcccaccttgtatatgttgattcagcatctctggaaatggagcccccaaatcaacattacaaatgctaaagcatgagactcaccaaccctagattgctgagttcttgaaggtaggggaaatatcttagtcatcattgtgtccctcaaggccaaacatacaacagatatttaacaagtgtatacttaaattaactaatactgtaatctaaagcctacctgtttagttgttaagtaccatattcaataaaattaaactcaatcactagacaactagggaatctgtaattaaggtgtgtagcatacctttcatttgcataaaacacatgtcttaccagctgtgttctatcatgccctttgatgttgctaaggatctttacactatatgtaattttcagctcagaacatcacgctttgaggcagggttaaaaaaaaaaaaaggatatggacttggaattagaagaactgtctctgtgtgacctctaagaccaatatctaggaatcaagtttataacttggaaacattgaaaacattttgtaattctaccaacttcattgtttggctgaagcacaaatgatactatgtgtaacaaagcctgctgtagaaacgtggtctcacaaaaaacaaacaaaaaaaaccatgtttccaagtcttcctaaagactttaagtatccagctgtgtaagtttagtgctctaaggtatacgcaaataagcagatgagaatggaaacatatcgcagaaaattattaagtgcatgcacaacatttattcattcattcactcattcattcatcacgcacatccagcaactatatcaatatcctgcagggcactgtgtggaaaacagtggttaaataaattcaaatctgccctcaggggatttagttccttttagtatattaataactagcaagctgcccctcttcatgtcaaagctttacgtcaacaaaataagcggtaggggatcaccttaaacgtcacgggtgctgtctctttaaaacgtaatagaactctgatcgcatcgatcacaggctcacaacgcccttccattcatcgctcttattccagtcctggttactaccccacttcctgacatcaaaccagggagaacgcgagtgttagttaacatggcttggtgtgtggccacagctgacccggcgcatacctcccgtcctctctttacagggctggcggtgtctcggggctcggctggccatgcctggagcgcggggtttgactgggccgccgttgttgtagtgaccgggaggcgctgccgctctgggcagacggttccgggagccgcacggtcccctctccttccccatcctctcccctcccctctccgggttcccccacccacaggagccttgggccgaccactcccccgatggcctcagccacggtaaggacgggttggaggtggggggggtccctccctggagcctgtcccgcgggctg

SEQ ID NO: 10165 - DNA, 2300 bp, Homo sapien
tgatttttttaatataaggctttaactactgactttcattaatgaaggtgaggacttagtgctttcacaagcatatagaccacattcaccgcatataccttcatgctcactacctatcccatcatctgccagcagagttatatcataatttagatttgatcaatattcagtccttactgtgacttactgtgactgtaaatgctgtttcaacctgatctgtgtggtctactgtaattacttttccttccttacacagctttttatgttccctataatttgttgtcttttacttgctttcttttaatttttatttggtttgtttgaatttttttggcttagtttttctatgtacttaactaattcatccccaaattctctgtttcatacatcagagacctttagcactcttaccaattttagtgtctaagagatacgtctctcagcatctttcaacatgctttaatctgcactcgctgtttgctagccttgctgcacagctgtcttcttggtctccatacctgaggattttctttattctcctttgtgttggatcttgtacttcatgaattcagtggcatcatcttctttggtttattcccttatctggtggagtcatcttctccagctgcttcctgagaaagggtttgtctttgtccattttgtattgtgataacagaatatctaagacttaataattcatgaacaataaaagtttatttgacttgaggttctggaagtgagtaaatccaagagccagggtgccagcatctggtgaggaccttcatgctgtgtcatgtcatgggagaagggcaagagaacaccgcaagtgagcacaaaagcaagagggggtcaaactcacctttataatgatgtcactcttgataatgaaaccactcccaaaataatgatattaatccatacatgagggcagagccttcatcatatcacctctgagtttccatgtctgcacttggttgattagagattatgtttccaacacatgaatttggggaacactttcagctcgtggcaaggttcgtgaggttaagctttttgataattttttagtgaatcctactcccttctaattactgccttgtctctctgcaaagataaccagtatcctgaagattattccttttgcctgtttttgaactttgtacagaagagtcatacattatgtgttgagttcatcttctttattcagcattatgtttgtcagatcatttatgttaatatagttgtagttcactcattttattaatccacaatttattaattaccccattctcctgttgatgacattgttattagtttgaagcttctaaatgcgtcttcagtagactttcaagagatcttcctttttttattcctaccttcacccctacttccagtgccacgtaaatctgccaagtctggagctgacaggggggttctgttgttggggggaaagggggctacttctactttctctacacttggattaggattcagctttcttgtgtctgctgagttacttaccatttggctgtctgctttctagcctctaaggttttatgggttttttgtttgtttgtttgttttttggtagaatctccttttcctctaactttgtcttcatagagtttgtttgctttttattaacagatacctttttgtgtggcttttggaaggaacttgggtaatgtctttgttcattcctccatttttaacccaacttgaaccttatttttaatacttcattctttgtttgatttctgctaaaccagaatgtctttcctagtaatatcttagaataactctgttaccttcttttagtgtaaatttaagtaatatttattaggtataatggtaaactttttgtttattaagtgtgtattttttgactatttgaaagttatacttaaaacatttagtctaattcacaaaattttttttaacagggtattgctggaactgatgtagctaaagaagcatccgatattattctcacagatgacaactttacaagcattgttaaagcagttatgtggggacgaaatgtctatgacagcatctcaaaattccttcagttccaacttactgttaatgtagtagcagtgattgttgcttttacgggcgcctgcattactcaagtaggtgatgacttgtctatcaaaacttgtttactttaaatttaaaaagtatattaaatgcctcttaaaaaatacttaatatttaagctgaagcttaatattttaggttagttaatataaaaatataatcctgttctgtttctcaagtttttaaaccctaaaggt

SEQ ID NO: 10166 - DNA, 2300 bp, Homo sapien
taggcctgtcccttcattactttattgcttcagatatgctcatctttctgtgttttccaaatataagctgatttggagagctgccttacctggtagtcttactggcttattctatacattcgtattctagttttactaagttacctctcctatcttttgtacatattttgtcctcactctcatcaacactctcctgtgtgccagttgtctttttttttttttttttttttttttttttttttgagacggagtctcactctatcccccaggctggagtgcaatggcgtgatcttggctcactgcaacctccgccttccgggttcaagcaactctcccgcctcaacctcctgactagctgggactacaggtgcatgccaccacacccggctaattttttatttttagtagagacagggtttcaccatgttggccaggctggtcttgaactcccgacctcagatgatccacccaccttggcctcccaaaatgctgggattacaggcatgagccaccacacccgactgcccgttgtcgttttataacatcccttcctcctccctctctacccctgctcttcctcctccctctccacctctgcccttttctgctttcttggggttatatttgtatttagttttaaaactttttgtatcatatttaggtttattacagcttataaaataatgaagtcctatggaaaaataaaacaaatatagacaccctaaattattttgcggtattctcccgtaggtaagacttagggagtgattgacccagcaggtcatcacaagtcaaatgttttctaatctgtagacacacacaccattgtgtaacaactgttatagaaatgtgaactacttctgcataatttagcatggctgtattcatttcttttggaaagctttaattcccattttgttcctacagataagaaacaagatggagctattgagaatcgcaacaaaggtaaatttaggaggacaaaagtacagtgagcttgttttcattatatccaaaaatctactgtataccatatttattcaaaagtaagatacatgtggcagggaaaatcaacaatatacgttagcttgggttaacctttcttcctgccggtgtcttagtcatgtcgtcactgcaatgttaataagattttaagtatgatttgtggtacaggttgagtatcccttatccgaaatgcttgggaccagaagtgtttcagatttcagattttttttttttttttttttggattttggaatatttgcatgtacataatgagatatcttggggaagagacccaactccaaacacgaaatttatttatacattgccatatacaccttctacacattgcctgatggtaattttgtacaatatttttaataattttgtgcatgaaacagttttgactattccgcatcacaggagatcaggtgtggaattttccacttgtgtcatgtcagtgctcaaaaagtttcagattttgaggtattttagattttcggattagggtaaatttatgtagattgactcaacttaagtatttcaagtatttgaacgctggttattatatagttagtagcaaaaatgcataagaaacaaaatatatagcataaatgttactgcatttatttaagagtcatatatgcatatttctatatgcatatggttatacataatctctacattatggtcataaattataggggagggattatgttgtttagatgttacctaacataacacacaggaaaagaaatttagtattctttagttctcagtttaaggaccctgtatgcctcatcctcattacctagcacaacattttcaaatatggtacaaagtttcacaacctaacgtcactattgtcttattttctctgtgtagacacacacacacactcacaaagctgaatgcttatacctttactggtttctgtaagaaactgatttttaaaatttctttaaaatgttaatagtgatatgtgcctttaaagtatagtgaagttctatttgctcttaaatgtagcaaaagcccaggatggtgcagccatggaaatgcagccattgaagagtgaagaaggtggagatggtgatgaaaaagataaaaagaaagcaaatttgccaaaaaaggaaaaatctgttttacaagggaaacttacaaaactggctgttcagattggcaaagcaggtatgatatagagaagaaaataaagtgttttatttttaagtatgctttctgcttaaaaattgtcttttgacacacttaaggctggaaattgttgctttgtgaatagaagg

SEQ ID NO: 10167 - DNA, 2300 bp, Homo sapien
gaggacggatgaacaaacatgccctcaacacacagacttatcttaattattttatttgttaaataataatctattttaaggttagtgtgatgttcaggccaacaaattctggatatagaaacctaaggagattatcaaataaccaccctctccagtttttcaagttggattattattataattgatgtgtgcgtaggagggaacccactttgcctgggagatgagtaaaattggtaataattagacaagcataaggatttgtgaagtgggaggaaggaggcaatgcaagaaaatgtcttgcagaatctgtaactgtcacatctttgcaagtttaacctaaggcaagcaaacttttctcacccagccatcctcaactcactcatatgaattctaagtttttagcccattctccagttcagtcattctcacaagtgtgctccctagactgatagcatcagcatcaccccaaaaattattagaaatgcagattattgagccccaccttaatctgcctgaatctaaagatgcttgaggtgtggggcccagcaatctaactgattctctgggtgattctgatatatgctgaagtatgaggaccatacaccatgatgtacagacatcttcatagcagtttcatagctgaagatttattgcatttgccattctaatcttttctagttctaatcatcaaacattttaaaaatattttggagtgcaggtagattgcttgaggtgggaagacgttaaatctgtaaaatggagccagacagtcatgagcagcagtgggactgcattttcatcttgtaggtttagatttagtggcatgatgcctatttcaaaaactaaatgtagcagcaaaatgcttagggcattgtatgtgtgagacattagaatgaggaagaaccaaggggttaatgattataatttgcatagaggaacttgaagatcaggaagaaaaggggttatatacagaagagacttttcaaaggtagaattaacttagtaactgactgaagccggaaaggatggaatcaaagatgatttaagattcctagccgaggtggtaaggataatggtggtggcagagctatttaatgagtgaatgagatgagtccattgttgggcatgttaactttgaggtgattgtatggagaggagagcttatctttaggcagattagtataataggaggacttgaaagtatgatgaagaaataaatgtaatgcatgtattcattcctcaaacttttactgagtgtctaccatgtgtctggtacagttctaggttctcaagatgtagtaatgggcaaactctgccctcagaactaatactgtagatggagggaaaaaaataacatataaacaaatgaacaagataaattcaggtaataagaagactgggcaaggacaacaaaagagtagagaatttctttagatagggggtcaaaggaagacctgaggtggtaacatgtgacaaatcatatagagtatagtttttgccggccaaaagattttagagtcacagagtggccaatgagaattacaggaaataatattaaaggatctgttatgctttttgtcctttcaggggctattccatatgaaagacttggagagagagatccaagtataatgttaaaaggaacttgggcttggagacagtccacctcagacatttcagccatttgttagctgggcagaaaactcactttcttgaagtctgctcttatcactagaagaagaaggagtaacacctcatgggattaaattgtaatgattaagtgagagaatgaatttaaaacaactagcatagtgcttggaacaataacagtaatactgagtggatcataaaattcagtcatgtgaagtgcagttttatttaataatgtaatctaatgtcttctgatgtacagttttatttaaaagttgtactttgatcttttatcatgcaaagcactttaaaagcacaagactggagttcaaaaatatttatattattaaattatctactttagctacctggtgacatttagaaaatatgcttacatgcataatactcttaagatagattttattaacttttaaatattttcttcttacagatgtgtatatctcatgattgatatggagaaactagtcatgggccaaaggtcaagatacttctctgggaaatgttgctgctgatgctgctttacaaagtcatacaatgagtgtttggtttaagaaagattttcatacttaaaagattttcatcttggaaatacatcaagtgaaaattaaattcttttgggaaacattttc

SEQ ID NO: 10168 - DNA, 2300 bp, Homo sapien
gatctttgcagttacacccaagccaaaatcaggacagagatccacccttaattacagcaatttagctgtcttatctaaagcaaggtaaaaactaaaacgtcctcctgaaatcatagctaaataagcccatttcatatactagctatcaaaggttcccaattaaaaaaaaaatgtttctatttacttcaaatttgaactcaccaggaggataaagaaaaagagaggggaggaggaggacccaaatgaaacgcacaagtacaaaaagcagattctcctccaatccctcttaattcccccaatccacccctgccacacacaaggacagggagtctcgggaaggctggcatcggggcaagtggtgaaggccctccattcactcacgtgggccaccatccaaagggttacacaccctctgccagatgagagcctcatacaaaccaggcccttacaagtacttcttattataaaatacacccacgctgaacaaaagccttattttaaaataagactgtcctcaggtgggggaggttaaacacaacaaaggcttccatgttgacaggcagacaagttcagatatatgcatatacctacacacgtatgaaaaaaatctatgtagctaatttatcacgaacagcaatcgataccaacagaagccattagattattaataaaccaagaaaagtagcgggcacagaagcgaaaggtggctgtctgcagcgctctaacccaaagaaaaggtaaatatcagcctgtcgaggagggtcgagccctccaagtacctgcagacccctttaacccacccggacgccctgccctcccctccgagccaagcagcgcacagggtgcgagcactcccagcgctgcgagtcccgcagaaaactggtgaatgaaatgcgcacagagaccaacctggctggtgaccgcggcgcagaaccaggggtcgctaaccagcttagccacaggattctcccgcaggatgggataaagagagcacagcccccaccccacacccctgccactggaacgcggtcctcctacagactccttcctcaaaaagggaggtgggggcgcaggcttttttctcttaaactaagtgaataaacacgaatcggaaacaactgtgaacatcctggggggccagacggaaggcgtgaggagaaagaccaggcggctctccaactcccgaggaatcaccgtcctgacacgccaacaatcaaccaccagggccaggggccgaccaggggcccccgctcccctcccgcagtgcgtctggggggccgaggccaaggattagaggggtgaccctcccggggcgcggggagagggagtgccgggcacggtgccctcaaggtcaccacgcgccgtggcgggggcgaccggtggcgggatgggctgtggcgcggccgaggcggcttcgtgaagccgaagacctgcgggtgtagaccagaagccccaacaagccccatccctcgggcccggagcagcgactcccagactgacccggcgctgaggtgcacggcgagaagcccgctcaccttcacaatctcccggcaagaggcaacctgcgaggggccccgaccgcccccgtcagcttctcccgaatccggcgcaacccgctgcgcacccagctatcaggatccccgccgcgacgcccgacctccgtgctccgcctggcctcccccgcaggtgacctgccccgccgcccccggccgcgggcgggcggcggccgccactcacctcgcccggcagtgggaaccattttccgagggggaaggaaaggcaggctgcgggagggtcgcggggcgttaaggggcagcgggaaacgcagaggatgggggctccgtcctcagcgcgtccgcagccggctcgcagggctcggggcgccacgcggaggtgcagctgcacctcggggatggggcggccaaggagccgagaggctcggcgtccaccagccggggctccctactcacgctgcactgcgaggaggcggcggcggcagcgaaggaggaggaggcggcgcccggccgtccccgcccagagcccggcagccaccgagtggccgcccgcgtccccgcaggacccgcctcctcggctccgcagagcggcacacagggcgcgccgcgctcgctcggcacgggcagctcagccggcctcacgccgccgtccgcaacagcagccgcgggcggggtgcagccacctccgtgagcgccgcagcccgccccactcggggcggggcccgcgggcaccggagagcggacggccgagcacgagggggctgcgcgcagctccgggcagggacc

SEQ ID NO: 10169 - DNA, 2300 bp, Homo sapien
ctgtggttgaacagacaagatgctgagctggagatctcagagaagacacaacacctcgattggctacttctagtgtcatgtgacatgagaacgaagtcctgtgagggttaagcaggcttatcaaaattggaggctagaatatataaaactgatgcaatgaacaggctgaggagaaacacatgaggaggtagtgccaatagtggttctaaaagaatgatccaaaagaaaacataggctttatcatatatagataaacatatatctatatatggcatttctaatgtcctgaaaaacagtaataggaattgaagagaaatttgagaatagattttagaggttttttttttttttcaacctgcaatggaagagagacagtagaaataaggtgaggtgaatcaatgcagatgctatttaagtagcaaagttataattggggttgcttattttcataatagaaatgacaaaagaattgaggtggacacacaatgtgagacaaaagcaatagttattttggggcttactggaaatgcttttatacagagccaaggggcggggggtgtttgaatattggaagaacaaaagatagagtagattctattaatgtctgaagttgtgacctttttctaatgcagaacttgtgcttataaaaatttcttcagtgttcaccaatgttttaattaattgtttctggaaagtatatttccccaaatcatcacatctatttaattttgcccagttctgtaacaacaacaacaacaatctacttcatcttttgttcttgcctaacttggaaaaattcctagaaagtgcaacatacaaattgtcttcagtagtttaactatttttatacatgtttgcattagaatctgtctacatcataaaattattgctttgtaggagagcctggaaagtcatttttactctggttgagatagtatatgctggatctcatataaatattttaaaaagacaaaaattaaatgcaattgaacagctggtaactctaacaatttctgtggcatgtattgtgttttcattaatatagaattcttttcatcaatttagataattcaattggtaggcagttaaccaacttgctcagggttcatacctattgagtaataataaaaagttcaaacaatgaaactgaaattgcatattaagccttgtcacaaaagaatcaaacaacactactattattctaaaacataatattgatacagttgcttcaattaagaaataactttatggactgtattggtaatctgactgtgagtaagcaacaaagaggatctaattaaaggaccatactttacaatcttttccataatacattgagattaaagcagacttttgtttgcaggaaatttgtgctgatgctaacattcttcatgattttcttcatgtctgaacaggtttatgttgtgcagaatgcaaaaatagtggttgcattttgataggtttcatatatatccgagcaattttcaataaaatctactctgatggtattaacatagacacgacttcaaatttctaatatcctaatgttagtgggaagtgcagaaatcctgggtcctttgtctttcttgggagaaagaatttggccaagagacaatttagccataaaagagaatttattgaaggaaaatagagagcagagtttatttaaagatacagtaccctttgaaggatgaggcacagctggctgctgaaagagagtgagccagcagccctccagagagctctgcattggggtttttatgatgtcagaatctttttttaagttcctacctcggtctgggcttcttttgtctagttttttccatttctgcctttctccacatagttcccatcccaggtttgtgggactctcccttactattgattaatgagcatgcttcagcttgtgttgactacaaattttaggtgatggttgccttgctaattactgctacccaaggaaggttatatagctgttaaatctatacttgttgcacatgtgcatttcttaggaaattctcctttgccctttctcctccatatcagtatgtagctagctacagtttgacggtttgactgcagagtgagccgttactgggcatcttaagaggcgttcctttttgcataggtattttctcttttccttgcttacacttgactaattgcccgcccacttcatcattagagatactattaacatgcagattttgggtggtccctgggagtgagtgaggcttcccagaccttcttttctcagggcttcctctcctgctcacgtatatctatctgcctactctaac

SEQ ID NO: 10170 - DNA, 2300 bp, Homo sapien
cagtagggagaataaatattctcaccatgcaaaaagtatataatgccaagattaactgtataaaggtcacatcaactgatcaaaaaatgatgtccttaattacctgtaaaatgagttaaccatctcttttaaaacaaaaagaaactgattggaatttcaacacagcaacatggtccatctgtaatgctctcaattaaaacccatttttgcataacacacgtccttagaaaaaaataaaactgggctctcaccattccattttgagtacacagagcagggtcagaataactgccaaaggtgagtccatatctagaaagggatactgcaggctaaacatgtcagcattctgtactttgagtcaagcaggggtgtcctcagcaaaccacagagcaaatgaaattaaatgaagcctgtggattctacaggtctcagggcaaatgttggagtcctgatccaagaccccctataatgttctcaattttcagccaggaatgcataaatgacctttgccagcttcagggctttcacacattttgcttttctggcatttaatggagccttatatagactgaagttcccagcaggcagttttccattttgtgcaattccactcagcacagaaaagtaagaaagggatataaactgagacggttttctctaggaccaagtatggtagcactttccttgacgttttacaaagaaggacaagaaaaggacacaagccagggtggggatgcctatttttgcatcaagaacaagtgcctttacatatactatatcatctcttttagaagtcatgaagtatttacaaataaggatgatagttaacagttactgagtacttacagggtacctgcactaagtacttgaaggaattacagtaagtcctcacttagcatcataggttcttggaaactgctacttttaaatgagaagacatataatgaaacgtggttttgttattgttgttgttttgcctcagcaacgttataaggaaatgacattgagcaaaacattaatattagaggacctgttatatgcatttaattctttacacaaccgtatggaaaaggtagtataatcatggtatgggtaaggaaactgaggcttacagagattaataattggtgagttgaagttgaatcccatttatttaaattaaaacccatatgcttaaccacaatgctttaaaggcttcccgtgtatatgctgtatggtcagtgaagggacaaaaggaaagacaatcagaatattcctcttcccaaggacaaacctgtggtattcattatggtaataataatatttgtttaattgaggtacacatgtacggtatattaccaatagcaaagtaccttcccaaatgttatgtcatttagttatcacaagggtcctactgggggtttggtagaacacatagcaatgtcattaggaacctaacttttgggtcaaacaggtttaggcttaaatcgtagcctggaaatttattagccccacaaccatggggaaattaagctctcagttccctcatctgtgacaggtgataagatacgcctacctctcagggtagatgacaggattatttgtcagtgagcacatgcaataataaatgttcgtggtcttgttttatgtattatgaatcccaattctcaggagtaagaagagttggcaccggccagaaggtaagaggttgggcaaagtttcctttctccagtaattttccatgatcccttaggccctccaaaggtgtagaatgtggggttttcaaaactcaagttctcccgcccccaccgggttcagatgaaggcccatcttctaaacccccgcctcaaggtgatacaaagctttcggataaactgcctccagacttgcttgaattgagcagcagaaacccagcctggacccctcttcacctcccccaaacgctgcgtcacaagccccctgcgaatgttcacctggagcctggttccggacagaacccggccttgcacacagggaggacgatttcgaccccaattggctgttgccctgggtgaccaagaacgcagtgggcacgcgggagaccacagccagtatttaaaggctgccgctgccctcgccaccacagtcctgccaggacggcgacagtgaagcacctgggttgagagggagcagcaggtaactgcgcaacccctgcctcccccggccccagcccgtgcctcagcagagccgggtgtggtggggacccgggagtgggtctcactgcgtgtcgcctgccaacaccttcctcccccaccatccttacccagccccagtcccaccca

SEQ ID NO: 10171 - DNA, 2300 bp, Homo sapien
ttaggtcctcgagtgattgtaaccaatttgagggctcacacttcaaaatagattttgaaatattggagagggtcccaataagatagagaaatgatttaagaaatcaactgttacaaggaaatgtaaaaatcgtatttatttggaggaagaaaaggttcaagaatgatcatttctgcttgcaatgctacacaaaggcaagtagtttggcctttaaattgtcatgaaaatcggacttcaactgcacagtgttctgaagcctaaggaagacacaatttaaacaccaacagttcaacaaaggatagtgtcgaaacaatatttctggaaatagtcttgtaagtttaaccagagccctccagaaagcaagaagctaggtagctctcacctctctgtcacctaacaaggtgcacagagtactagatcaaatattgagggaaaaggaagaaagttggtattttcatagatactcaaggaatctgttgtttcttctaaaacattcagcagagcctgaagctagtgacagataaataggctttgaatcagaaatgcgtggaactgagagctaacactgcctttttgtgtatacacgtatccctcagacagactcaatcatgtctagggacctgacacagagaaaagccaagttgatttcctctttttttgtgtcacacatggtgctgtatcatttatcatctgagtctcagtagtcccatctgtgaatagtggtaagcactctgcttaagaatgtgttgaggtgattaacaatcatatatgaaatcacctgacaccccacgtggaccttgcttctaaagaggacaagcctagaaacttggattcaggcatctttccagcactgcttctaaaagtggcctttatatggtggggtgagacttcacagatgccagaaataagttcctgtctccaagatggcctctctattttttgagaggtcttggtagacttcatacattacccattatcactgtttctgctccaaataaaattgtttttgagaaaaacaatgcatactaagaacaaatcatttggaaacagggttggatgatggggatgacaaataagaatgccctgaatagatgggcaaagacattttgagggcagggaagatgggagcagaggcaggaaggggagtgagagaaccttaaagacaaaccttcttctctcccatcacttggcccaggagtaataccgctttcaaaattcaatacatctattcacttgcagacatgaaggaaaagattcctgaagcataagtgagaaccaaattcctagatttatctaaagcataccagaatacaagatgcaactttcacctttctctaggacttatacaatgtaaaattgaggtatggaaatttaaagcatattttttctcttcatatttgtattaaagttcaattttacaaaccatggaagttaacaagagcttaaaataaagctcctattctaaggaaaaaatgtgtaatttgatttatttgtctatgatagatacaataactttttttaaaaaaagccccttttctccccaaaacacgcagatcatatttatgcatcacttctggatgtaatttttttaaagttatgcaaaaggttcatttttccctgttttgctatcaaagcattccatgcaatcaaaataattgggatatctttttttacttacccaatattaaacaggtaaggtttctgcaacatttaccaaatttcacttaacattaatgaaaagtgaagaaagcaattcaagacttcaagttttgggaaaattatttcttattagaactaaaatatccatctatagtatcactgtatacatgaacttcatttcttaattggtgagtttgttacagatgaggtatgttaaatccaactttttccatttaaaaattttaaggtgatactttggcaattataactccattaacataatttcaagaactttgtatactatgtgatttggatcctactgcttagtttgggtgactataaaataatttgaggttttttaaagactgagaagtatttctcaatattaggttttgcaaacagaaagttgagtgttataaattccacctcccacagaccagaattcacagccattggtcaggggcaaataccactagctctgcatcctcagtcactttgtgccatttcatcaggtcagagccaaaggtaagtttttatacttgctttcttcttgggtcagagttctttccctactataacaacctttaaaaaataatttaacttgccttaatgtcatctggtgaattttgattcaatggatt

SEQ ID NO: 10172 - DNA, 2300 bp, Homo sapien
ataaacagaagacattggcttttaattatttgtattcaatttttaagaaatgatcatctagggaaaatgttttaaaatcttttaaaatatctttttgttatactttaaaactgccttcagctgcctattggtaaataaggtctggatatcagtacatgacaacatatactaatgaattgaactgtgaattaggaatgaaaattgcctagaaatttttttatgagttattaggattaaagtaagaatttcctttgctgggctgtgtaggcactaagattccgtggttgttggaggggttaaatttggatctactagtgcatatattttaccgaggattcataaaaacacgacagtggagcctgggtcaatccattaccatgtacaagcagtgaccaatagaaaaggaagaagaagatccaagaaggctgaggtaagcagtcttctgaagccctgtcaaagtggaaacaatagatcaaaggtgttcatggtgactgggacgagtaggtttcactgtttctcatagacgacttgacagcttaaagtaaaaacaaattattttcgtcaaagtttttttttttctcttaactgatttttagcaaacctcagactgagacacaggactcaacggtgtattcctggaaggcaaggtaaactattttgcacttttaaaaactcttaaagttaagcatgcaaagtacttattcaacagacgcagggttacaacttcaataactaaaccaaaaccctattctgaaaaagaaaaaaaaaaatgatgtttctttgttggaacatggccagagcagcgttctgcaatcctagaaaatttgacagcttgcagaagcagttctgcacttgttttctgcaatttaatggcaaaattgaatgatcagcatttcataaatgaagttgactttatcttttcctaaggaatcagtaaaatttatttcatcctattatcaatcagttcaataaatgtacattggtcagaatgttactgatatatatatatatatataaatatatatgtaacatatgtatgctataaattattaaaatatatatgtatatttcctgttaaaataattatttgtaccaataatctttgatgatcagtggggagggtttatgtgttttaaatgtatcaaatattagtaaacgctaacctactttccattatccacactgataatatgaatataaagaaattctccacccgtatcctaaatatgtttttggttgtttttgtttcttatcaaccataataatggcatagttgaatacaatactcatgtacttgtgctatacatcacaatgtattcaactctatataataaactctatctctatatatacatatatatacatatatagagacagaatatacatattctctgagagagagagagagagagaaagggagagagagagagaattgataattcaatagcttggctgaacaacttaattgtgtgcttaaaattatagacatcttcccccaccctcaaaaaacttacttgagaggttgagctagagaataacagattaattacatttttattcagatcctagaaccttccttcaccataaagtgctaaaatgttctttgatcccttcattcctttggttcaagggccaaaaggcctaggaaatctcatccagatgttctgctcatttaagagtaaaagtaaaagcatatgctttcctctcaggaacaacacagattcccagtttgagtttttaaaagatcacttttttgtactctcatattcaactactggtttcagttcagttctttaaattaaatagcttgaaatggaaaaacacttagagctgctaaaattttctttccatttctcggcttttattgtgtttgggttacaaccagaaagctacaagtcggtgaattattctcaatgtttgcaaaatgctttgcatatggtgcctactaactaatgtatattaattaagatctgtgtatgaaatgttgacatattttcacctcttccctgaagaagcaatgtttactgatcattttgatgtataaaattatctaaaggtcaagatcttcaaatatctaacagttgtgttcctttttctgtaggtgctataatggcaggcacaatctgtttcatcatgtgggtgttattcataacagacactgtgtggtctagaagtgtgaggcaggtctatgaagtacatgattcagatgattggactattcatgacttcgagtgtcccatggaatgtttctgcccacccagttttcctactgctttatattgtgaaaatagaggtctcaa

SEQ ID NO: 10173 - DNA, 2300 bp, Homo sapien
gactagtcagagtcttttattaatttttatatcagttcatatgactcagacattcttactaacttctgaaatttattcaacttaaacagttccagagaagagttaaagtacccactcttcaagaatcaataatcgaagaaaagtagattagaatgttacaggaaaaatcgagacacagatagtgattaccctgacagtggaaacaattctatgtttttagtctggaaacaatgatattaaaactcggcaagcattgtagatgatcatttttatttgtgtcatgtctcccaaagtccttaaaatgtgattattatcatatgcgcacagaatgagagagaagagttaagaatgatttccagatttgtggtttgggagactgaatgtgacaaaagtctcaaaagtataaaatgacaggagcagttagaagtaaaaggagacagagaatttcgttttacatatatgcccttgagacatgcaacaggagatgtctagaaagcagatatacacacacattggaaagcaggtcttctagaagctgggttgcagatacagactcaggagttaccatgatggaggagatggttggaaccatagaatcatgcaggaaatgtgtatagagcaagaagagcacaaagcagaggacagaatctcaaagggttccaaatgctagaaatgctcttaaataatgttataaagaggaaatagagctttgggatatagacagagagaagtcaccagaaaatgggaggaaaaactaggaaagagtaatgtcagaacaactaagacgaacatttaataaaagggggtgggtcagtattgtcaaaggccaagtatgcttaacactaaaagacttcaacagattagtaaatgtgaggatcattgctgattttctgtcagaaccattttagggaagcagaattagaagtcatattttggttggcagatcatgagtggaatggtgaagaggaaatagattggaggcagccagtatactactctaattttcctacaatgaacatgtagcaacatttgtataagaaaattataaaaagactaaaatcagtttggctaaaaaaatcaacagtaagacaatagctggaagagggccatgcagatttgaagatcatctgttgtttaaatcctgagggtttaggaaaaggagagggagaaatgcaacagagagaggagacaattgttgtgagaaagcaagtaacacttggttgtcttcttaaaatgtgatgtgagtacacctacatacctataggactagtaaaaaatcatgtcaaaataggatctcaatctataaaaaccctttaatataaatgcattttccagttgagagtgtagggctaattccaaataaggctattatttctgtaattgtttataacaaactagacctaactctgtgaagcaatccattactattttgtagatgacaaaactgaactttaatttaccctcctatggttaggagagaggaaagaggtggttcacaaaaggtcctctgaatccaatgcttaatcctcttcacggtgctctttgacaatactcatgtgagctgttaaatgagtcatataacattcactgaagctagaataagagagattttgaaaaacaaaacaacaatcaatccacataataacacctaaatgaaatattttttgtttgcatcttttctcaagaagcataattttttttcatcaagtatcagaagtggaggacacactactttagatatgtgttaaagaaaaaagtagcagtgtaacagaatgtctcataagggactatatgcaaaacatgtgttatattataatgaataaaaaattatcccaccttagcaggtacttggaataaattgttaaaagaaatataataggaaatagggatacaaaaattatttctctgaaaaaaagcataataccaagattagcaccaaaatcaggtagtgctttccagatatcacatttacattttttcaaatacatatatttatttatttttcccttagtcaaacacattacagcatctattttatatcaggaacagataaaatatgtccatataaacagaagacattggcttttaattatttgtattcaatttttaagaaatgatcatctagggaaaatgttttaaaatcttttaaaatatctttttgttatactttaaaactgccttcagctgcctattggtaaataaggtctggatatcagtacatgacaacatatactaatgaattgaactgtgaattaggaatgaaaattgcctagaaatttttttatgagttattaggatta

SEQ ID NO: 10174 - DNA, 2300 bp, Homo sapien
catggtggtttgctgccgctattgacccgtcatctgggttttaagccctgcatgcattaggtatctttcctaatgctgtccttccccgtgcccaccaacccctgacaggcccgggtgtgtattgttccccatgttctcactcataagtgggaggtgaacaatgagaactcccatcattttaacctgtattgtgatgaaatgcatttagcctccaatgctcattatcaccaatgatgtgaatcaccattggccaggatggaatgtttatacgttacccaaaagttctgagatgtggatgtggctatgcatgttatatgttagtgtgtaatgtaaaaggaaagaaactattgcttaattaacatttgactttttaaataactattgcctatttaatatttctgctttttctcaactgatagtaacattgtctataaagtattttaagctgattgagtgaactacattgtctcagctccatcctgttcaccctcttcccagtgagtgaagatgttcatggttttattcttacatttacttgttaggtgacttttagcaaatgaatgagactttctgactctccatttatactcctgaaaatagagtagtaaaacataccataggaattttaatgtatgaaatttaaaggaagaaatgtgaaaactctgagtataaatcatggaatatattagatccactataaatgttaatttcatttctttctattggaccctgaaaatatgctctgaaacgcacaaaattattcaattattggtttcacagaactgattttattaaaaagtatatgttgacaagactttacaatgagctaaatccaatataatgcatttgaggtctgttataaataccacaacacatgtattgctttataaagaaaaatcttaaggaatggataggtggagtttttctaacaagagctcagattatagaatttgatacactcaaaattaatacatagcattgttttaagaatcctcttataacaagatcacttaattatattcgattgatttgtctttttttcttaattccttataaatttattcagttactttgttgaaactgaggcctatcaataattttcttaaaataatattaggaaaaatgttatgtttatgaatcatcttacaattccattagttactttcaagaagattactttttgtttttgaacactgctattacaaaaataagccatttattctaatagtctttttttcggacaaatgcagtattagtcatggagttaattttccacaagtctcactgctaaaatgtgatatagttatttttaaagacaaaaatacaatgtgacaacttatattaaaatatattggtgtaaaagttcttataaacatgaggaaatgaacattttagaaaaaaatctcataaatatatctgataaaatcacaaaatgaaatagacaaggatttaagtacatctctcatttgctgaaaccatgcatcaggagctgataatgaaagatatatccagccaggcctttgggagattataactttgaataacttttaactttgaaaaaaaattactagcatgcaatgaaagattcttgccttgtgatacttttagtataaatttatttttttctctgttcttttatgttttttggcattaagctatagaatgctctccccaagtaaggttttgggtgaattcctaaacgaaatccacaaaataaaaaacaggcaagactttgctgattggttccagacctgaataacataaaatgagtctccttagcattagaagtaaacttgaaatgttgatatttatcatgtgtatccaagtgtatatgaagcatattttatatttttaaaactaatgtaagctaccctcatggccaaaaaattaagttagtccaagtaaatcaatattgatttcaaaagtgataggcaaagggattcaattcctctgagtctgttcatttgcgttttcctgaaattatttgccctgcttatgatttctgagatctttagataaacatgatagttggctgagcacattgcacttaattgttgccacagccacagatgtaaagaggcttgtaagaaaaatgttctcacagtgagcttccttatttgaagcaggactcaattcttggttaaaagctatggtatttgagctagttaaacacatatctctctcccattccatagggaatgagctgggctgtcctttctccccacgttcacctgcacttcgttagagagcagtgttcacatgccacaccacaagatccccacaatgacataactccattc

SEQ ID NO: 10175 - DNA, 2300 bp, Homo sapien
cagtaactgaatgagagtgggctgctagaagaagcttaatgttgaacttaaagtggcagtgtgaataataatctttatgatattttgttaaatgaaaagccacaagcctgtattcaacatgtgctgccttagacacatatcagtagtaaatataaactaagaacaaacatgtaagaaactgaaaaacatttgtttcttctctagagaatctaggcaaaaattcccagaagataccttaaggttagatcatacaaagatctttcttttctcttctcttctttctttctctctctctctctctttctttcactttcttcctttctttctttttctctttctttctttccttttctttcttccttctttctttctttcttccttccttctttctttcttcttttttttaatatgctacaattggataatgactcaaaacagctgtaagattctacttacgaacgtacagctttaatatggattcgtctaagtgtacaattcaaggtagagatgatgggactaaatatctgctatgatgggactaaatatctactatgttttggagatatcagaatggtttcaatgcaatttaaaaaatatttcatctcccaaatgactttgctgctatataatcaagtacttttgttattcagatttattacgattttgtcactcagatttatttagtgcacttcagttgatttaacaacatagattcgtgcttgtggaatgaatggataaatatggaatacatttatcaaaacaatacttgtttttttacaaaatgccctgttagcaaaatgagatcatatatacatcacataaaaatcagaattttccatatgtgtttattagcttattaaacataatgtttgagaaactaggaaattgatttattttttaaagccgatcttgcttataccaagttgaggttttcaatctgctttttttatatcagaaattcgatactgaaaaaaagctaattttgtgttttaaaaaatcagactgattgcttggaacaaatggaataaatcgtcttgtcaataaagtgatggtcaattgagtcatttgtgtgcaaaatattgtgcaaggcccgggtacagaacaaggaataataagacacgccctgaaggagtacatcgtctagtgagggacagaccaagcacgcaaaacaaattgcaatataatgtgataagttctttaaaagaggtaagagcaacgtgctttgggagcagagaagagggagaaagcagcatcttgcctggatgagccaggggacacagaagagaagcccactatctcatttaatctttacaactctcttgcaaggtcggtattctacatggcaagtagctttgattgtcagggttcaggtgaggactgggaatggagtgacaatgaaaaggaatgtggctagagctattaattcataccaatttatgagtggtctgacatacagcacagggactgtggacagtattgataagccataggaagttaataaatggtttatagtagaaattaataagacaaaattgaatttttagacgatgactcaggcagcaaaatggaagatggactgaaatagaggaaatatgcaaggcagagatgaattagaagctcttgtagtagtttagggagagatgagaagggcctggatcaaaataattgtggtaggatggagagatgtgactggcttccagagatatttctgaagcagaaattggagatctcctatgtggatagagataattttatctgaccatgtgttaagtgagcattgaaaagcccaacatgatttattaccatgacaattttgcaaatgatttggatatatagtatatcatcttagtttagacccaaaattcaaacaagcagatttaaataatactcagatttctcatcctaagtaaatagctgtgcaaatgatactataatgtacctgattgtctttcaatacatttttaatgctctgcttcctgataacaaatgaaatattattttgcatcttttctctgtgctcactgtattgtggcatattatataagaaacgacacacagattaggcagtgctactcttcttaaatctctcatttgtttcctaggttccctggttgtgaaaatacatgagataaatcatgaaggccactatcatcctccttctgcttgcacaagtttcctgggctggaccgtttcaacagagaggcttatttgactttatgctagaagatgaggcttctgggataggcccagaagttcctgatgaccgcgacttcgagccctccctaggcccagtgtgcccc

SEQ ID NO: 10176 - DNA, 2300 bp, Homo sapien
ataacataatgcaaatgttgatctggatgacatacttcatttaatgggcttaactagttttaggaaccagaaattattatttttggtaaaacatttgtaaactatggcaactagcttcagtggagtagtgatattacattagtaattagcatcttggacattgtcatgcatttttagactacttaaaacagtttcagtataatttaaacagcatatcatctcaataacaatctctttggttactacttggacagctgctctttgctctttatatttctgattaattaaggaaagaaggaaatgacgaaaggaattatcagtattgacagcccacattaaatgttttaagatgctgggtcttgaagtaccatgacactaatttaaaacagatgattttatggaagattttgcacaaagtttctggacatgcaattattttttcacagtacagtcagggttaaatgcacacacacacatacactctctctctgtcacacacacatgaacacacacacatacattctctctctctcacacacacacacacacgagcaaatgaaaatgaaataaaggtcggtgattgaagttataagctgcctgtctatattcagcttcaatcaaaaagaatattgtttggagaatttgtaccattttaacaggagtaaacaaacataaattataatactatttctctcagctaatactcaacattttctttttgtgggttgttagtgaaacaaccaggcatgttctgctctggagaaaagatttcaaagtgacatctgcattaactgtcgttgctatttattaaatctgcaatgactttgcttcatttttcttttaaacttgtaagacattaaatatgcaaggctagcaagcttgtggtaaaccataaacattgcatttttaatgggaaacagatacaaaaccactccctcagatacaatccaaaggaacaggctgccaaaacaaaagtcttctcttaaagggatactcagtaactgaatgagagtgggctgctagaagaagcttaatgttgaacttaaagtggcagtgtgaataataatctttatgatattttgttaaatgaaaagccacaagcctgtattcaacatgtgctgccttagacacatatcagtagtaaatataaactaagaacaaacatgtaagaaactgaaaaacatttgtttcttctctagagaatctaggcaaaaattcccagaagataccttaaggttagatcatacaaagatctttcttttctcttctcttctttctttctctctctctctctctttctttcactttcttcctttctttctttttctctttctttctttccttttctttcttccttctttctttctttcttccttccttctttctttcttcttttttttaatatgctacaattggataatgactcaaaacagctgtaagattctacttacgaacgtacagctttaatatggattcgtctaagtgtacaattcaaggtagagatgatgggactaaatatctgctatgatgggactaaatatctactatgttttggagatatcagaatggtttcaatgcaatttaaaaaatatttcatctcccaaatgactttgctgctatataatcaagtacttttgttattcagatttattacgattttgtcactcagatttatttagtgcacttcagttgatttaacaacatagattcgtgcttgtggaatgaatggataaatatggaatacatttatcaaaacaatacttgtttttttacaaaatgccctgttagcaaaatgagatcatatatacatcacataaaaatcagaattttccatatgtgtttattagcttattaaacataatgtttgagaaactaggaaattgatttattttttaaagccgatcttgcttataccaagttgaggttttcaatctgctttttttatatcagaaattcgatactgaaaaaaagctaattttgtgttttaaaaaatcagactgattgcttggaacaaatggaataaatcgtcttgtcaataaagtgatggtcaattgagtcatttgtgtgcaaaatattgtgcaaggcccgggtacagaacaaggaataataagacacgccctgaaggagtacatcgtctagtgagggacagaccaagcacgcaaaacaaattgcaatataatgtgataagttctttaaaagaggtaagagcaacgtgctttgggagcagagaagagggagaaagcagcatcttgcctggatgagccaggggacacagaagagaagcccactatctcatttaa

SEQ ID NO: 10177 - DNA, 2300 bp, Homo sapien
gaacaaattaaataaagttttaaaagcattgcaacttggtcatggtttgtaaaatagtctgaaaagatgttatctcaaaactttgataattacttttctatatgtaagaatttgcttcctctttcttaagatacattatagtttagtatagtttagtaatgaaaagtggattaggcatgagaagacctggatattagtttctgctttgtttcttgccagctctgtgaacttgggcaagtcactgggcttcaattttctcatttgtaaaacagaaatagtaaatatgacttatcttgtctaactcaaaggattgttttgaaatatgtcaagacataataaaagcttgcatttacagagattttcacttataaggattaagttctgagttaagtgttttatatatattgccttatttaatctccactccaacactatgagttaggtaagaatttgtatccatttttcagatatggaaactgaaattcagagaggttaagcaagttgcctgagttcatatagcttactatcggggggaaggaacaagatctaaatcttaaccataatggttctgcttttataaaagtaaaattatctacataaaaaggcattatgtctttttttctcctcctcctcatttttcttcttctactttttctttaatacttccttttctctctctctgtcttgtaatgatggccataatttgtcatatacactttagtagggttaagttttgataaacagtaagccaggattggggcaaaacaccagtccgggtacggtccatagccaatcatttgattgtctttactaatttagcaaatgtatcttggtaacttagtatataccatggctattctgggtgcagggattctacaaacatgaacacaatgtcattcctcccttggagtaagacacgtacataaataattataatatgaggcaggagtgattatatgtcatcaaaaagagataaatgccatataaggagagttcagaaaggaaattaataaattccaagtaaaggggatcatggacttttgcaccaatgtccagggacaatagtgcttgcctttgtctaaactatcagaataactagatatgtggttattaaatgttaaggagatgcagagtagggtaaattgtttatctgagaggctgggcttaggaaataaggcaaactataacgtggtaacacgcctccccctccttagataccacttgagaatttaatttctctaagtttttttgaggaaaaagaatatttactgtggaagaatatactttgatggctggaggagggaaggaaggaggctggaggatgggagggggatcatctcatgtttcaaactgttgatttccagtttccacctggtaacagcctaggggccagagcataatgatacaagtcaaaacacagagacctacacagagacaactaacagcatccagcaagggaattataaaagctcaaaaaagatttccagtggctaaataaatacctttccttgtagttgcacttgtttttcttttcatttactgaaatttggaaagacacatagactctattgccttttcaaagttctagtttacataaaagtataatctatgaaaatcaaatttttcatatatagaggatgaaactatgttgtgatcaactacaggttatctatgtattttatttaaaaactggtggacagggagaaagattttaaactatgattaatgaaagtgatagatgacatacttttcatataaaaccatgactttctttcaggacactttagaaatatgtccaaaatatacagaaaaactccacagcatagtgcttgaatttacacaaacattccaaggcaagtaggaatccgaatgagtagtttcacataaggctactcatttatttttgcagtccacatttaaaacaactacaagattaatttcattccatttttctggacttacacatcccaaaagcaagaaaaaaatgtcattttggaagtataataaatgctacttgtaaacaaggctagaaagggtggagaatgaaatgagatggggggtggggaaacaaaccctttagttacaatatcttagggaaatgaatctacaataagacaaatttcaaatcaagttgctccactatactgcataagcagtttagaatcttaagcagatgcaaaaagaataaagcaaatgggaggaaaaaaaaggccgataaagtttctggctacaatacaagagacatatcattaccatatgatctaatgtgggtgtcagccggattgtgttcattgagggaa

SEQ ID NO: 10178 - DNA, 2300 bp, Homo sapien
agtttctcccagacatacctaaatttttacatcaatccttttaaagaaaatctgtatttcaaagaatctttctctgcagtaaatctcgcaggggaatttgcactattacacttgaaagttgttattgttaaccttttcggcagcttttaataggaaagttaaacgttttaaacatggtagtactggaaattttacaagacttttacctagcacttaaatatgtataaatgtacataaagacaaactagtaagcatgacctggggaaatggtcagaccttgtattgtgtttttggccttgaaagtagcaagtgaccagaatctgccatggcaacaggctttaaaaaagacccttaaaaagacactgtctcaactgtggtgttagcaccagccagctctctgtacatttgctagcttgtagttttctaagactgagtaaacttcttatttttagaaagtggaggtctggtttgtaactttccttgtacttaattgggtaaaagtcttttccacaaaccaccatctattttgtgaactttgttagtcatcttttatttggtaaattatgaactggtgtaaatttgtacagttcatgtatattgattgtggcaaagttgtacagatttctatattttggatgagaaatttttcttctctctataataaatcgtttcttatcttggcattttaatcaatctcttgtcatgattatagaggtttagctaaaagtattttttcttagaagacaggttctataaactgaatctctgttgcacactggtcatgctggaaaaacatttgatgaggaatgaagatgctctgtatatacatgtttaggttttacaggaaacacaggagtagcatgttttaaaaatttctaaagtcaaaacatggacacattcacaggctaatgatctcatgaaataaggataagagaccacggtagcatctaccaaaaatgtgatactcaaaggattacatttcattgcttccctgttgaagtgaagatataaatgttccattctgacccacctttgaaaaacaattactttgccccatggattctttgttcaattagaaatttccccggggcaggtgacccatagtcttaaagaacaggctaaacaccacagagagattggttgctttttgcttttcatcacctgcaagatgtacataaaaatcacataagctggaattcaacaaaaggtatgtttatgaacttttattctcaaaagttgaaatgctgactttctcgattcctcattttcagacttttatttcagataaatactaaaaacctaagtgaaccttgataatgctgtagtgtagattacttcactaccccatataatagaaggacttgctgtttagttgtagaggataacagcgtttttcagtggaaattgaaagtggaaaaattgaattttgctctacacagttaacatatagtggcctttttttggtatatatgtaaacatgttgacactggaaatacgcagtctgaaataaaattagtaattacttgaaattagtaatctcaaataacttttaagaagttatttctacacccaggaataaattattctgattttgtagacaacacaggaataggccactgaatatgcaggtatttagagtacaaatgtctgtggatattattggcacaccattctcgagagttagaattcgtagacccgcaacacatggactacccttgccaattgttatggttttatttttaaacctattctgtgaaaaagctcctcggtatttcaaacttgaattacaataaaaacaccaggtagggttgtttttaaatgggtctcaccccagtgctgactactgttgtttaccaactacatttcatctggtaactccattgaaactaagtacctcaaccattttttttttttatcataaagccttttttcaaatggaaagttgtttttgaagatcttgacatcagactttttcaatctttgaaaatgatggaaacagttaataaaaatgtttattttagaattcaggtgatgtctggcttgtgaggagctgtttataagtttgtctttgaaaaaggcttgcacacatcactctgagaccagctgtttcctgtgactttaaccttaccttccccagacaattgagctgaacctgtatctgcggtacagtagctgtttgtgatgtatttcttgttcactgtttctggggaatgttttgaaatattttattataaatccttttaagataggatgactactttcaaaattattgttgcctttggcaccaggaattcatagtt

SEQ ID NO: 10179 - DNA, 2300 bp, Homo sapien
ggggtggagaaagtaaacagtttctcgcctggccataggtgccagtggcttcccgactggccgaggctgcgcgcctgattcctgttttggcggctcaaccggttggttcctggagattgttttgtccggtactactgtgttatttctaaaaccctgcccgctttttccatccccgcacatgcacaacaacggatgcaatcctggacattttaaaaagttgatagttttcattttcgctcctcaaaggagcctggggtaggaggaatccgcagtgggagctaacgatcctaagcgttgtttctctgttcttcttttcttctatagaacattataaacatcactggttcccagaaaagccatgcaagggatcgggttaccgttgtattcgcatcaaccataaaatggatcctctgattggacaggcagcacagcggattggactgagcagtcaggagctgttcaggcttctcccaagtgaactcacactctgggttgacccctatgaagtgtcctacagaattggagaggatggctccatctgtgtgctgtatgaagcctcaccagcaggaggtagcactcaaaacagcaccaacgtgcaaatggtagacagccgaatcagctgtaaggaggaacttctcttgggcagaacgagcccttccaaaaactacaatatgatgactgtatcaggttaagatatagtctgtggatggatcatctgatgatgatggataaatttgatttttgctttgggtgggctcctcttggggatggattatggaatttaaaccatgtcacagctgtgaagatctggcacaagatagaatggtaaaaaaaaaaaaaattttaagtgacagtgccatagtttggacagtacctttcaatgattaattttaatagcctgtgagtccaagtaaatgatcactttatttgctagggagggaagtcctagggtggtttcagtttctcccagacatacctaaatttttacatcaatccttttaaagaaaatctgtatttcaaagaatctttctctgcagtaaatctcgcaggggaatttgcactattacacttgaaagttgttattgttaaccttttcggcagcttttaataggaaagttaaacgttttaaacatggtagtactggaaattttacaagacttttacctagcacttaaatatgtataaatgtacataaagacaaactagtaagcatgacctggggaaatggtcagaccttgtattgtgtttttggccttgaaagtagcaagtgaccagaatctgccatggcaacaggctttaaaaaagacccttaaaaagacactgtctcaactgtggtgttagcaccagccagctctctgtacatttgctagcttgtagttttctaagactgagtaaacttcttatttttagaaagtggaggtctggtttgtaactttccttgtacttaattgggtaaaagtcttttccacaaaccaccatctattttgtgaactttgttagtcatcttttatttggtaaattatgaactggtgtaaatttgtacagttcatgtatattgattgtggcaaagttgtacagatttctatattttggatgagaaatttttcttctctctataataaatcgtttcttatcttggcattttaatcaatctcttgtcatgattatagaggtttagctaaaagtattttttcttagaagacaggttctataaactgaatctctgttgcacactggtcatgctggaaaaacatttgatgaggaatgaagatgctctgtatatacatgtttaggttttacaggaaacacaggagtagcatgttttaaaaatttctaaagtcaaaacatggacacattcacaggctaatgatctcatgaaataaggataagagaccacggtagcatctaccaaaaatgtgatactcaaaggattacatttcattgcttccctgttgaagtgaagatataaatgttccattctgacccacctttgaaaaacaattactttgccccatggattctttgttcaattagaaatttccccggggcaggtgacccatagtcttaaagaacaggctaaacaccacagagagattggttgctttttgcttttcatcacctgcaagatgtacataaaaatcacataagctggaattcaacaaaaggtatgtttatgaacttttattctcaaaagttgaaatgctgactttctcgattcctcattttcagacttttatttcagataaatactaaaaacctaagtgaaccttgataatgctgtagtgtagattacttcacta

SEQ ID NO: 10180 - DNA, 2300 bp, Homo sapien
gtttaaattccataatccatccccaagaggagcccacccaaagcaaaaatcaaatttatccatcatcatcagatgatccatccacagactatatcttaacctgatacagtcatcatattgtagtttttggaagggctcgttctgcccaagagaagttcctccttacagctgattcggctgtctaccatttgcacgttggtgctgttttgagtgctacctcctgctggtgaggcttcatacagcacacagatggagccatcctctccaattctgtaggacacttcataggggtcaacccagagtgtgagttcacttgggagaagcctgaacagctcctgactgctcagtccaatccgctgtgctgcctgtccaatcagaggatccattttatggttgatgcgaatacaacggtaacccgatcccttgcatggcttttctgggaaccagtgatgtttataatgttctatagaagaaaagaagaacagagaaacaacgcttaggatcgttagctcccactgcggattcctcctaccccaggctcctttgaggagcgaaaatgaaaactatcaactttttaaaatgtccaggattgcatccgttgttgtgcatgtgcggggatggaaaaagcgggcagggttttagaaataacacagtagtaccggacaaaacaatctccaggaaccaaccggttgagccgccaaaacaggaatcaggcgcgcagcctcggccagtcgggaagccactggcacctatggccaggcgagaaactgtttactttctccaccccaccccagatgcacacaatggagttgatggctttggagatgagaagcgccaccggactgttaaccccgaagggaagaaaaacaagcaaccctaaaccacgctctgggcagggctgttaattgtgccggtgacaaatccgatgattaatgggcaggggcaggaggcgcggggagacggcacgtccgttctgagctggctccggggcagcggcgcagcttcccaccccggggctgggccgccgaccacgcaacggttggagggggctgaggaaaggggacgtcgaacccaccccagccccacggctcctttgtccccaaatccgccgacggtcctcggaccgcagctcccgcctcggtgggcttaagtttctttgttgtgcgtgttgtcttctcctctccgttttgccagctggggggaagggggcgccctccgtccagcccctaaagcctcgcggggaaccgctgttagcggccacccagcgcaaccacaccggtcccgcggcggggcccaagcgcgaccggccccggggcgctgccgaggttcccgcagccccgacggccggactctgacccagggatgtggggcccgcgtccctccgacgccctcgccctgctcacctgccagcagctcctgcaggctctggctgaaggtctgcagctgtcgctcgctcgtgagccccttggtgcggagaaacttggagatgaaggacacggcggcggcgatctcgcctatcatggtggcggcccgggtgtagaagggatgcatgggggcggcgtgcgggggcggcccggggcggctggggctcggcggcgcggccccgacggcggagcagccaccccgggcttcctcaccgggcggaaggctgagaggaagagagggcgtgaggggcggacgactacttttgtctttctttctttagactaaaaaagttattttcgagacaggaggcggcaggagagaggaagagacgagcgatggcggcctggtcacatcgctcggacctccccagctgcctccgcctccagctccgcagcattcgaagatctcaatagctgcatttccagctccgagaggcgaagagatgcaagcgccgtgcagcaccctttatagtgccacgaaaaggaagtggcgtagctggagcgtgatggccgactccagccaatccgaatatcgcaccattgtgacgcaagccggttcggagccgaaaggggcgggaaaagagttcaggaggcgggtccagagatagggaagagagggaggagctgacgtaatccgcttgtaaacaaataaacccggagtggcggctggagacccagttgcttgtgtcgagggagggagggagggaacagagggtgcgcgtgtgaaagctccgcccccagccctagctcctccttcccgcttcagcaggtccaggctctgcgccagtgcatccttctccaagagtgcgctgcctgggcccgcttgccctggagtgtaagtgctgggtaaataagaaccgcctggcgcaggctgtg

SEQ ID NO: 10181 - DNA, 2300 bp, Homo sapien
tgggatgatttaaggtgggaaacacacatatataatttgaaaaactcagtgcgggaagtaactctccctgagtctatgggttaaactttctgttaaccctgttcaactggttttataaggctttcagaaggggtcctgctgctgctagtgcaggcagttaaaaatagtatggagaacaagggcttgggggaagtctgagtccaatcctagcattttgttgatttaatatttctgttttttagatgagacaatttaagcacatgaccgagaggccaagttggagaccaggtttagaagagaaaaactttcacttgactcctaatttgtactcagtgacacattaacgacaatgtaagtgaaagcagggaactaagggtgggtcaggttaggtgggagaccaggagttgttattctagtgttatggtaatttcatgaatttacttttgcttctcgatcttctttttgagtagtaaaagaggtttcatgcctccagtgaaattactatttttaagcagagttctatctgaaaagttctataagaaaaaaaaaaaccactctttaattttttcacatgtaactacttagttatgtgtactaatgaaaaaataatctagaagttattttttcaaatcgagttttacatattttttaaacaataaaacgttttctcctgttttataatgtcattatttttgcttcatttctatatcctttagctcagtattaaaaagaaaaaaaaaacactcaaagtggtgtgttttgcaatattgatgatcaactaaggtcgggatatttatttccatctggtagagttcaacttctgcctcctgtttgctttctccatctgcctgcctcccttcatctttctttttttcttttcccccttctccttaatggagttggggttaaccctgtcttaggcctaatcgttttagcaggctcccgccttcctgttacactggtttttaaggttgtttttttttttttttggtagggtttcaaataaacttgaatgtctacacttaatactttcacaagcttcaaattctttttattttatttttataaagagcaggactcaggctaggacggcatttggactaggtaaaaaagaaaatcttcagttttgtgcacacaagttttaaaatacattgtacagattttttttttttggatacacaccactctttacaggatccgcgttatatctgctttcagtaactggctctcctgtccgcatccagtaaggtttccactcttctctccgttgactgctgaagttactgaaacagcaaccacaaatggccttactaacctacttattttgcaattaaacttttaaaagatatccccctactcctcccctagggtggaacagaaatggctccgcggcgttggcagctcgtctgcgaggggaccctggctccccgaggctgcagtcctttttcttggacagaacgccccgcaggaccgttccctccactttcccccgcactaaggcagcgcaccgccagcacacacagcgctggcgcccgcatcgcgccgcaccacacgcgtctccggcttgaggagccagtcaccgagacccggagcgggaacgagatgtaaacacggagtggggacatgcagcccgatctgagaaggcggcgtgaagagtagacacagcctgcgccaggcggttcttatttacccagcacttacactccagggcaagcgggcccaggcagcgcactcttggagaaggatgcactggcgcagagcctggacctgctgaagcgggaaggaggagctagggctgggggcggagctttcacacgcgcaccctctgttccctccctccctccctcgacacaagcaactgggtctccagccgccactccgggtttatttgtttacaagcggattacgtcagctcctccctctcttccctatctctggacccgcctcctgaactcttttcccgcccctttcggctccgaaccggcttgcgtcacaatggtgcgatattcggattggctggagtcggccatcacgctccagctacgccacttccttttcgtggcactataaagggtgctgcacggcgcttgcatctcttcgcctctcggagctggaaatgcagctattgagatcttcgaatgctgcggagctggaggcggaggcagctggggaggtccgagcgatgtgaccaggccgccatcgctcgtctcttcctctctcctgccgcctcctgtctcgaaaataacttttttagtctaaagaaagaaagacaaaagtagtcgtccgcccctcacgccctc

SEQ ID NO: 10182 - DNA, 2300 bp, Homo sapien
gtagatgccaaacttcacaatggttagattcatgtttaaaaagccattggatcaaacctttgtgaaagtttccagcttttttctgttccaaatatgtgtccattataaaagaatctcaagagcataattgccaagatagtctatgtccatgagtatttcaacatctctcatgaaatctgttcccatcattactcaagatattgtatgaacagtattccacataaactaggtgctcaataatgattgattggccaatggagggtcattatttaatgcactacaatcttttatgcaaggggcccacaggaatcagtatgatcccataggaatccttttcttttccattgaaaaagaaacagatagtggcttgtattaggtttcttgtgtgtgttgtgaggtggaaagatatgaaaagaaatttgatcagagcataaatctgagcccatgggataggaaagaatgagggaataaggaagaaaacacagattatagacaggaaaatcaaacctattaaaactgataattttcgaatactaaaaatgtacattcatttgaacaaaaagattctataaagcaagatttctctgttcttaccagcactaccatgcccaaactaccttaggaaatgaatagcagagtcaaacttaaaagcacctgaaatttaaaacaaaaaccaatttacattttatttaagaaaagcaaacagatgggcctgctaacaatgtcaaagtctcgtttacaaagaaaaaaacaaatctggaacctgaagtcaaacgagttcaaaataaaaagcaaaccaataaacagaaaccaacataaacagaagttactaccatctccctcagcctgtgaaattctggaacttctctttctttctcgccttcttcttctctcacctggaagacgagcagagtgaacacatcaggggttgtcagttccccagatggcaccacattcataaaccaccgactccaggagaatgtaggaagcttagttaaggccaaagttctctttggatcttcctcatgggcttcaaggcaaaagaaaaaaaagtttgcttgagaatatcttcatatctattagtttgaaccatgcaaaattacagtttttataggtaaaatgagtgcatattggcaatttcaaatgattaaccctaatacattatgcttttgggtatagaaatattcagatcttaaacatatgctgttacatacaaaatcaggtatattcctgcttctataattaaagcaaagagaatttcttttggtcactactccttctgacatgaggtatgaaccaagttcaggacccctaaaggtctgggtctgggtcatttctccacctctaacttgtgccgctttcttggtcagtcattgtgttctgagctgtctcataaaacatctgctatgactttactttctcctgatagggtggctttccatcgttggcacttcgttggccttattggtatgctttatacactggttctcgtttccaaattggcattattattgttatgattcctgctgctctcccacatttcccatctttctcctgatctctctcacctgtacatttcttacattttctcctgtgcttccttcttcccatcatcattgcccaagtgtgtcttctttcttctccttgtcacatttcctttgcccgctctcacatatgcagagatggctcttggttttccttctgaaatctcatagtttggaggtaaacttgttagcaaggccactgagaagagaacaaaagggaaacataagagaaaccaagtcactatctctctcatttcctggtttctagaagtaagacccaaagaactcactgtttcagtgctttcagctcaggccaaactagggtgatcaaactgagcttctgagtgctgatcaaaacctataaaaccaagtagacagaccatctacaaatcttcactgttaaataccataaagaatgaaaaggtcactaattggtaagactatatgtgtgataattaaatttatgcatcaacctggctaggctaaaggatgaccaggtagctggtaaaacattattctgggtgtgtccataagagtgttttcggaagagatcagcatttgaattggtgaacttagtaaagcagacggctctcaccaataagggcaggcatcatccaatctgtcgaaagcttgaataaaacaaaaagaggaagggaaaatttgcttcttttcttcttgatctagtatatcatcttctcctgcccttggatgtgagtgggccttcagacttaaaccaggagttacacctttggcttc

SEQ ID NO: 10183 - DNA, 2300 bp, Homo sapien
cctaactgtgatcctgggagaatctcttaatatctctgaatcctaatattctctttcaaaaagagaacgttaagacctctgtcttaattgatacatgctaagatattgacacataaacaaaatattattaatatgttaagaaattttaccaatcttttgtgattaggtcaaaatttaggggaccatgtaatcagaggccacaaaataaaagatgcttaataataacaaccatttgtaactgttggggtatgtgaagagaaaacaggcataaacttccgttaggtgtaaggcagaggtgggaattggtcagtaaaactctgaccaatggaggtgaaagtccaggttgtgaatttccttctatagtctggattgtaaaagaaaaatccttcaggcagagatagcttcataggaaacagttttccaaaaatcaatttctgattgattaaatgtcaagatttgaaggaagaacttctggttgcttatcgagctaaaggaataatcctattttccccactatgactgaatatatttctttgagaatatgagtaaatttagaatcccaaaggtagagtgatttgacctgattagaagtatttttttttccatttttgcacctagcagaagcagctgtcagcaggttagttatgttatcattccaaccaaaatggtttaatattttggcggttggattttttaaagttgatttaaatagctgaaatggccagttgttttcaggtccttagagaggtgagcagtcacattctggtttcttgggagaattaagagaactgtgttttggaagggagattttgggggcagttagtcttttctgtcattcttgctgggagatctgtccttggtgcgatagtaatggaatctgagctcctctgagctcccaggtgaggcaggtcatccgtgcagatattcttgtatatctggctaagtaggggggtgaaccagaatagtgggagagcctttgctctgataaatgaatggtgggcctgtcatgcacacagggtgtaagatgagcaaggagatggatgctggggcttgatgaggcaggtgatgtgggaagcagctgaaacgcccaggaactgctgcgcagattctgattttcttcacttgagtttttttctttccttattttcacttgtcacacacataaagggcagcgaaatgccaacctgacccaatgaaaggcctggagatatgaaactgtaaaagaagataatgattaagaacatgtggagatgactggagacccttgataattgtgcttcactttcctgtttaaccttttaactagaaaaaggcattcatctaacagacatggtctgcttaaaggaaaaaagaaggaaagaaagaaaaacaaagagaaagaaaggcagaaagaaagaaaggaagaaagaaaggacagagaagaaagaaagaaagaaagaaaggcacaaagaaaggaagaaagaaaggaaagagaagagaagaaagaaagaaagaaagaaagaaagaaagaaagaaagaaagaaagaaagaaaagaagaaagagaaggaaggaagggagggagggaggaaggaagggagggaggaaggaaggaagggagggaggaaggaaggaaggaaaaaagagggagagaaaataagtttttctcaaatcatataggcacatttttttacattgtatcacaccaatttatcagttccttaaggaaatcacagaatctaaaagtggaaatttccttggaggtcactttgcccagatttgtactcatgcagaactcttttatgtaactacctcggtaggttcattgattcattcaacaatatttcttgagcatgatcactagatattgatctaggcacagggctgaacaaaagaaacgaacatttttgccttcatgtagacctgcttatattccagggcctatgcttgatcatttccagttattgagagctgtcagtttagatgcaagtaaatcagttcttaagtgtttaacaaactcttttggagcagcattttaagcactttacaaatacagtagtaactcatttaatgctcacagtaagcctataaagtaaacactactgtcatcctaccccttctacagatgaacaaattggggcacaacgaacttaaggaatgccttaagactgccactggtaagtaacaggggttaattagaaccccacagtgagggtctacagtgaggacatggagtgcagtgttctagttaagagtctgctctcttaaccactaggctacactgccaacatttgtttagcttatgttcatgatttggctctat

SEQ ID NO: 10184 - DNA, 2300 bp, Homo sapien
atatataaccactcaagaatgaattacagcaaatatttaactgcctgcctgcctttgaattggttaatcagaatgagtgatgcattagctggttcaactcctttcacctggaaagatggctatcgattccctttattgtgatttaaaagatttgaggaaagtctaaaagcatttcaaaagatttcaataagtaagacataattctgcttttcataaccactaaatgaaaaaaaaaactaaatacaaaaaagattcttcgagtaaaattctgtcattctccactttttattgtgttaaaaaaatcaactataatatgagtgaaagtcaagttctgctggtatgtatgaaatgagaagagaggtgctgtaggttattaataacaggggatgttttgtacctgttctggaagatgaatatgcatttttgtgttggagccagtccataagtcaaattcctttaaaacaggcagaggccagccttgttctggctgcagcctgcacggccagaaaaacagaggaagaagcgccttccaccagcatgaaatgttatccactttgatatgtaaacattcttccttcacctgaagttgatgtcagggtaactaaaacacaagaacttggttgactgagcagaagcaatctgttgtattcttctgtttttcaaaaccagagataatcaaggactgttatgtcagatgctagctgacctaacttttgagtggaaaacgaaccaggaatctgagataactggatagtctccgcatatttttaaaaaatcagcatgtctcttgaaactgctcagacttagctgatttttgtagttgttgttgttctctttatagttttttttcttttttctctgtattccagactcctggcatttaatctattgggtgggaataaatgacgtaaattgtactcatatttgcaaaaagcccaaaaaagatgttaaggctgttaacaacagacgtctacgctacagttgaaatgggctaggtgaattgagacagaattctatgaacattttatgaagctttccttaaatttctaattgaaaattgctactgtttgtgttactgttgattcatttcatttaagtcttggtcttgtagattctattgataccccattcttggggatgaaaaacaatgttaaatgcgcacatttgttaggaaaatgggctgggtgggagacggaaggctttggccgccatcctagggcattcctgtgcattgcgatggtcagcatttctgtatctaaacatcgaaaaagtacaataaaaatacagtattataatctgggaccactatcatacacgcagtctttcttgaccaaaacatccttatgccgtgcgtggctgtgctgagaaggaggagcactcgtcctctccaagcacatccaatttgcctcagtcctcatgactcccgccctgttaccagaactgagctcatttgttattgaagttgcttttcttatacccagcccagttttccattgatgcttccgcttattctatgtaggtattttcatttatcacacaatatccctagtctaagacttcatttgaggaaagaaaaaaaaaaaaacctctgctgctaaaaataatttgaaaactcctagacaataggacctttcaaatcccttacaattctaacaaccagtgaattcatgcttcacagccattcagatctatacgtatgaaatacaagacatatgtgttcaactttccttcatcgcctcctttaaactttcttttttcttttttgagtcagtccctgcaggaacagaccaagtgagcccattaagagaacagttcattcccacctgctacctcgagccagccaacaatctcagcctcaccactccattcttgattatgtagaaccattccaatcctgagtgacaggatttgcaaagacagctgttgggctccacaaacatttggaggaggggaaaatgtgaggttggttgctacattctcctacttctttttactgaaaggaacagctgcgatcttcacatgtaagatgaagtaaacaaaagctgacaatgcccagcaccattcagcagtaagcattcaaatggatttttcctcaccgcgtttgcaggcccggcacagtctcagttccccacagcacagagaggaagcaaggtctttgcatgccctgttcacttggccaaacattgccctagatgtgcaattcaacccatataaagcaagcgtaattcaagagccctgactctttcaccatttcatgatggcttattactcgcacacggcattgtcaggttccagcaact

SEQ ID NO: 10185 - DNA, 2300 bp, Homo sapien
tcattgtaaatatggtacaactgaatttttgtagccctaaaacctaaaaggaagctcaaataaatctcatacctcttttcaacaactagaaagaaaatatcttttaggaatttgccaattcaaagccataaagtaagcaaaccaggatgtcatcttttagcatagacatactttttaaggtatactttttattgaagcaaagcatacataaacgtaaaactacacacaggcaaaaaatgctgaggcgagctgctccctctgcgatattggagagcacctccatgtgtcatctgagaaagggccacagtgaggttgccccaggttcttaaaggaaaagctgactctggggtgtcccttccccacccaaaatgcctccctgttgccatctccttgacaaatcagatggaggtggcacatttttttccgtgataatcttttgtgacctttctataagactcttaatttccttcttgaagttacaaccagaggttggaagtttttgcattgggatcaagtattccattatcattatcccctaggagagacagctttacaatcccatgtgcgtgaggggattggtagaaaagagtatgaccttccttccacaaactaaaagctaaaagactttattcatttttttccttcccaaattgaagcaattcacttctagacatccttggcaggagctcagaactgtttatgcaggctccatgcaggcaaaatattttttgatatcctgcttttggttgagtcatggtaatgttggcaatggtggtgagggcaggagatcaagtcatttttcaaagttctaagtaaatgatgttctagtaagatcaatatgagagaattaaagactaatataaagtttatcacaaggccaacatctataagttagacctttttttcttttcctctaagggcagtggttctcaaattttaacccatgtaagaatcacctggaagtcttgttaaacacagacttctggctgggcacagtggctcacacctgtaatcccagcactttgggaggccgaagtgggtggaccacctgaggtcaggagttcggacagcctggccaatatggtgaaaccccgtctgtactaaaaatacaaaagttagccgggccctggtggtgtgcacctgtaatctcagctacacaggaagctgaggtaggagaatcgcttgaacccaggaggtggaggttgcagtgagctgagatcgtgccactgcactccagcctgagtgacagagtgagaccctgtctcaaaaaaaaaccacggacttctgaccccatcccagagttccaggggttggagagcatggagggggaagatttttcctttctaacaagttctcaagtcatagtgatactgctggtccagggaccctactttaagaactaccgacctcagggaaccttcacagtaagtatctgtaatgagtccaatcaatgaaaacttcagtgaattagacttcattagaattacttcaactttgttttgggaaagtctatagacatttttgtttaatgctgcatacatatgcattatctccacctaggcatcaaataaatattctttggggtactgatctaatgagaatactggtagatataaatgctcttccatttgcattttaattatttgaaaactaatgttcacaaattcactccctggtgctctaatcatttcctctactattcaatgcttatcaaagcaagtcattaataaaatagatcaacacaaaatgttttatgatgtgaagaaagtagagtcccaaagaatgcatctcacaaccttagagaaaataaatgaaatagaaacctagaactgcttcactgaactatgagtgatgatttgttgaatgcctcaagaggaagtaaaaagttacatttgcatcatttctgtatttgatcagccgttgtttacctgacttgttcttaggctgccttagattctgagctggcttccctttaggctttttcataaacaaataactggaaatgtctctaaggaggggagagaccagttcctcattgcagctggtagcaaggttgctttcactcagccaggaggacgcattgttacaggtgtggaacttgttgctccgagccctcgcctggcagctcactctggatctgcgggttctgaggagcctcgggacccacctgggtgcagttgccttcagggacagaccatcttacaggtattaaaggcaacattcagctgctttctgggtttctctcttgcactttccttttgtcctattgctatcagtttcgcttgttttgctgatctctc

SEQ ID NO: 10186 - DNA, 2300 bp, Homo sapien
acatgtgaactcataaattctacaacaatccaacaaggtaggtaacattattacttctcattttgaaaatggggaaatggattcagagagtttgactagtttgcctgaggacacacagctcataagctatggagcatgcagcagttccaggcagtctggctttgagtctgttctacccctgatgtggccctgttccttcaactgtaggagtccccatcaccagacctggaaactcctccctccattctctcattagagctctccatagatcttgccttttctcattgatttgtcaaccactccaaaaatttatatattcagtcttaaccttcagttttgctccagttccatgtcaccaatgactactgtacatcttcatgccacctacctcttagttactaagtttgagactccagaattaaccttggcttctcgatttctttaccctgtgtatcctctctcgtaaccttcaaatgcttctcattgcctctcctaaccactgccaccacaatggaggcaagaaggtactaaatgggtgtgtcgttttcaagagttaatgtgaccactgggagaatggtctcctctcccctcactggaatacccacccagccatttggccaggaggctggtcaaacccatagaaagccatggtgagtgcccttcaaaacacggggttggcactcactttcccacaactccaatgctgcttccattgtctcagcctctttcttttccaactggctgctgattttttatttccacaacatgcagtcactatggtttcagacatcaacaaaaggcatatgtcccaattgcagtaggaggtctttaactggttccaagattcctttgctgctgtggaggctaatgagtctacaataggtttcctctttcagtgccataaccctaccagagaaaccagccacagcccattagcacattctgaaactatgacacggtctcctttcagcacacagggagccccctacctgcaacagcagataacctgtgccttctcttgctcctgaaaaaaacattgattaactttcacaaaactgtttagatccatgccaatatcgtgcactctgaggcaatagaacaagttgaaaaattgtgataaacattcatttgaaatgcagccaagctgacttttaaaagccttgcacattgttatttgatagcttcttcctgctttggttggtaaaatgaactctttaagtgggcaattcatgatgtcgcaatagaatagtgaatgaactaaaaagaaaatgttcacaatataagcttaaaaagcaagttgcaaaaggatgtgtaaatatggtacattataccatttaaaaattaattatgaatatgatcagaataccatatttccaatgggtatataggggtgaagacacatttcatgcttttttttgtttgttttttctcaaattttctacaataaacatattatcttagaaatcagattttttaaacaaatattattaagaaaaaatgactataacaaaaataagtgggtgattccattctaaggaaaatagagtttccagcatattctggtattctgtagcagagaattattgtttggggcaactcgcttgaacactgggctttattttgtcatctgctaaattaagggttgaaccaatatgtctgaggtaccttctgatgttaataaatcttagggtccagagtttggaaaagttaagactgtgaaggctatgtcaccccaatgggtaggcatgataagactgtttgctatatgaccattctgtgcctaggatttttttttttttaatttgtaaaatgagaggtttggacaaggtagtctcacgggcctgtgtcccccaggtctgacattctgtggttctgcagctcctactagagctcagaaatggctttggaactgttagtggcttaaagacaaaatatgccatctcttatcatgaatgttagggaatgaacgaaagatgccaaggctaccgaagtcatgtcattaaagaatcaatgtttgaaaatcctgtttctaaccatcttcgagcagggcaaagacaaacacaagcacatatctgatctggaaaactgcctgtcctctgtgaaaattaccagcttcaggggctatgacttctacggtcttaaggtatctttcaaactgttaactatggggtttgactttttcttttcgttttttggtggggtggggaaggtcgggtcagtattttaagctgccagattactgccttgtttatagtaagagcaaaatgcaagagaggaacccaggactgagcagggcctgc

SEQ ID NO: 10187 - DNA, 2300 bp, Homo sapien
tattcttacatggttagctctcacccactgcttattttcttttggagtaattaagttctccagtgtattatcccagtgatggagttatcatgaactgtgcaggggagtacacagattttccaataatccatctagctcagctgtagatgagagcctattatattattcaaaggattctacatgagaattccagtaaagaaggtcttagcatgtaacattaataagcagttttaaacttttttttttttttttaaagacagggtctcattttgtcacccaggatggagtacagtggtgagatcatagctcactgcattctcaacctccctgggctcaggtgatcctctcacctcagcctcctgagtagctaggaacacaggcgcatgccaccacacccagctaatatttttttagacgagttgttgccatgttgtccaggttggtctgaaactcctgagctcaagcaatctgtctgcttccgtctcccgaagtgctgggattacaggcataaaatcagtgtgcctgaccctaaactaatttttgaaaaacaaacaaaaaagagaaaaaaagtcacttttatcaccccatgtcgctgagaatgtttcccatattgtctgaaaataaagcacctcatgtttagaaagatggaaaagtatgttctttgtaagtgcattatcactagtgattactcatatattagctgtaggcatgaccgtgctgctgcaccatcgagagacacacacacacataataaaaaaccaaatatatttgggatagaaatatcatattacattatataatgcattatactttacaaaacattttcctattcattaactgatttgcaaataatatttaattttgtgctgcttttcaaaagatctggaagtgctttccaaaaagcactccattcattgcttcataggcttcattcagtggtctgttggttttttctttttttttttttttccctcccagcaaggttagttccattattccctctccttccctattcaagcaatattaaaggcttctctttttctaccagggtgttaagttgagcctcttggctgtgaatattggcagaatggtaggacgcagaagctgtgatttctcgagttaaataatgacatcgtgcctggaggtcagttcaaagaccacgtcgttttggcacgatatttatctgtgacctcattttcttcttaatctataaaacagaggcgttaatgacaatttacttcataaatcgattatcagaataggacttaaaattccttaggaggtcaagcacgggctttagaaagtgcaacatgtgaacatcagcctattaaaaattgttttgatctagaaaagacaacctcaaacttctcttgccaattcaaattccagcttcttcctacccttcttttctaaatctttgctttctctttggctgaaattagaagcaggaagggagcagggaaaggaaacctgggactggaaaagggcagggaagcccaacagaccggttaagcacgtctgagattctctagtcggcttcaacccaggggctaagaggcagagtcagcgtttccagcagaaactagcatatagctcaggctcaataccacgtcgagtcaggagccatcgccggaagggtcacaccgacacattttacaaaacagcctaaggcgtcccctcctcccgcctgggtcagggagggacacccccaggggtcctcgcccgcctcccactagcgggcacgcggtcgtcgcgcgggcgcggccctctgacggagcccaggcgtgcactccgcagcctcggcgtcccccagctagccggaagaagctgcggcgacagcgtcctgccgcctgtctgtcacgcagccgcccacgttgccaccgcttccgattggtcgctggcctggaccggcccccttcagccccgcctcccgcgaatggacaggcgaggggcgggcccgccaccgccccgccccccggcggccgcgggcgggcccgcccatctgtcagttacgggggctgcccggcgggcgggctggaggcgctcgcaggctgcctagtcgttcgctcgctctctctcgcgtgctccctctcgccgcctgtggggaagtcggggccgcccgagcggccgtcgccaccgcctcgccccgacctccttcccggtcccctcccggcccagtccctcccgcccgcgcaccccgagtagtgagtggccccgcgcagggtctggagagtcaccgcggcggcgccgggtggtggttaaaccatgttaaggaggattttacagagggtaagagagtg

SEQ ID NO: 10188 - DNA, 2300 bp, Homo sapien
ttcttgcagaattttgtcccctaggatttctggagaagttgtctatgattgattgattgattgactttctgcaagccaagaacccaactgtggttaatattaggttttctgaaagacagagaattgcttaattaactgggcttaggatagtgttactcattagctagttttatattaataaaaatatgttaatcaattaaccagtcattgtcgatcacctggttaataactaatatttattgagaagtcattgtgtgacaggaacaatgtgaaatgttttcccttcattatctcattcactcctcaccatgagtctttgagatgatagtaatcataattacattcaggaatttattcgacgtatatattgagcacctgcttatcaatagacagttctaggcattggagatacagcagtgaacaggcaaaatttctcttgtctcttggatagattatatcaggtaactatcgctgcctaacaaacctccccaaaacctactggcacaaaacaattaacactaattattgttcataagtgtatgggttttccaagcggtttttctgatcttgatgggactcactcatgtatctgttgccacctggcagattagctggtctaagagggtctctactaggaaaactcatctctactccacaaggtctctcatctttcagcggctctcctaagcttattcttatagaaaaggcaggggtcccaacagaggggctggaaatgtacaaagcctcttgaggcctagattgggagctcatacagtatcacttctgccacactctgttagccaaagaatgtcatgagactagcccaggttcaagggtggggaaatggagttgacctcacaatggacagagttgcaaagtcacattgaaaacacagggtatgagaggtcattgatgcagaccatctactacatatataatgatgactaaaatgacactaaggaattcatggaaatatttcatttgagtctcacaataatccctggaggcaaattctattaccaatctctgctccccaaatgaggaaattgaggcctagggaggttacaaaacttgtctaagatctatgaatatttggtgatggcctcagggttcaaacttaagattccagtgtctgagcactgacccactatgtgattctctccagcctgcgcacttcatgagagaaagtacaggacatggtcactgcccgtaaggcacttatagtcctactggggatagataagtccctgaggaatcagtaaaaatacgtgtctctaacccaaacttggtaattgcccaacaagcagtaagaattaagggggccaggacaagagacagaagcttccataaagagattctccaatgaactgggctttgaagggtctaggcagtgaatagcaaaaggggagagttttctgataatggcatcctctcaccttcatgtaagggcttatagtataaacttccttttctttagaatggcattcagtgctgcaggcaatagaaaacctgattaacagtgacttctcatatagggatttttgtttgtcatgcacaacaagtgtgggaaaaagaagttcaggacttcacaatagccagatgatgtcatcaaggaaccaggttctttctgtctttctcctctgccattctacaaacataccccgattcctgggggtttcataatgccaggatggcagctgtattcatgagtattcttgtgcattctcaaataggaagaaggaggaggtgagcatgctagcacatcctgtccactgaactactttcccatgatttccacccattgtaccctccttactctctttggctagaactcagtcatgcgtagctgcagggaaagctggagaagctaatgtttcagttttctgaaactctgtaatatgggcaaacaagaaaaaaagggggctgtgaatgacttttacataatcaatccacagtgtcgatcccaacccgcccagcaccgtctcccagcactttccccagccactcctatgcaccagcaaacagaagtcctctgcattagtccattttcacactgctgataaaaacatacctgaaactggttaatttataaagaaaaagaggtttaatggactcacagttccatgtggctggggaggcctcacaatcatggcggaaggcaaatggcacatgttacatgatggcaggcaaaagagcgtgtgcaggggaactcccctttataaaaccatcagatctcataagacttattcattatcatgagaacagcatgggaaagacccacccctatgattaaattacct

SEQ ID NO: 10189 - DNA, 2300 bp, Homo sapien
tttgtcatttaaaaggccacaataaaacaaataaaagtaaaaaataaaaaagaccatagtgaggagggtgcagtggctcacgcctgtaatcccagcacgttgggaggctgaggtgggcagatcgcctgagctcaggagttcgagaccagcctgggcaacatggtgaaactccacctctactaaaaaaatccacaaattaaccaggcatggtggcatgcaactgtggtggttacaggtactcaggaggctgaggccggagaatcccttgagcctgggaaatggaggctgcagtgagctgaaacagcaccattgcactctagcctgtgcaaccaagccaggattaataactttattgatgtgaaccaattatccaaaaataataatcacatattagccatagcggactccccagctagatgttttctgcctgtgtttgtaaatcctggacatagttaaatttcaagtgccttcaataagaaatcaatggcttggaaaacatctctgcgcagtcttgataagatttctaattgtggtgaagcctcattccttaaattatttattcaacactaacccattctacaaacttacatctgctgggctctgggagtaacaagatgagttagatgcagcagtcccaaatctaaaggaggttggagactagaaagaccagtgcctgctctgagctctccagtggtccccagcctctcagtcaggcctcacaggcccctctgccagaggcggaaccagcttgcctccgctctgcagccacactggccttttctttcatttctgagaactctcctcactccctcccactttgggctctgcagaaatcccagttccctttgccttgaaagctcttggtcaatttagctcctcctccttcagccctcagctcctgccttgctgccccaataatctttttctgactgcagatctggtcaaatctttgtctgaaaccttagagcccattacatttgtagttttacgtgtacacgtgtgatcatttaatatttgacggtgtgctctcaggtgcctacgctcctggagaggcaggggctgactggttttgttagatgccagtgcctgacacacaataggccctcaaggggtgaaaaaccaaccaaccaagtcaggacccaagcaacctgggcctctgtggaagggcagaatggcctgagtttgggtttctcgagctaccttaagatcaggcctcctggctcctatcttagcccttctaacactctgaagtgtagaggttgtttgttccaagtccccaaggtactgtaagctcccagatagcagaaatcccattatattttagtgctgtggccccagcatccagctgcgctgttacttagcatgagatccacatgaaaaccatttcgcaactattagccattgccagtattaatactttccggaaggtggcacaaagtgggggatgttatagacagcttcaaagaaacgtttaagctagagttgactctttaaataatacaagccatccccaaccaaagattaaaaatttaaatacaaaaaaaaaaaaaggaaatttgcctaccccccatttgtgaaaacaaagaaaaaaaaaacagttaacgtcttaacttttctaggccttcactctcgcctctccccgcgctacaagggcgaattctggacgtatctacacagtcaccgcggagtctgcaatcgccgcgacgtcccctggcatttcttggccaggctgcaactttggtgacggtgtatgtagttacatcccctgtagtgcagctggtatttagggtcctcattggcaaagttgagggtataagcagggagggaggggaccttggcttctttccattcactggcatgttttcggggcacggtcatcccacgctgggctccagcgccagtcccaaggcctcgccgaactccagcccgggagtgcgcgcggccccgcccaccgggcggccgaggtcccgcccctacctcccccgccacacctacccacccaccccattgcaatggtctctgcacgcaggcgcagtggcgcgcgggggaggcggggcgcatgtgggcttcatttaaacagagcagagggggcggcgcgcggtcgccgcggtgctgctgctcagtgggagcgggtcttcgcaactgtctccgcgtggcgcgcgcctctagccgcccttcccctggcggctacggccggagggagcggaggcgagcgggagtcgggctccatggagagcggcggacaactgggcagaggcggagctttcatctcggcaccctggttccagtgacccgcgcta

SEQ ID NO: 10190 - DNA, 2300 bp, Homo sapien
ggagactagaaagaccagtgcctgctctgagctctccagtggtccccagcctctcagtcaggcctcacaggcccctctgccagaggcggaaccagcttgcctccgctctgcagccacactggccttttctttcatttctgagaactctcctcactccctcccactttgggctctgcagaaatcccagttccctttgccttgaaagctcttggtcaatttagctcctcctccttcagccctcagctcctgccttgctgccccaataatctttttctgactgcagatctggtcaaatctttgtctgaaaccttagagcccattacatttgtagttttacgtgtacacgtgtgatcatttaatatttgacggtgtgctctcaggtgcctacgctcctggagaggcaggggctgactggttttgttagatgccagtgcctgacacacaataggccctcaaggggtgaaaaaccaaccaaccaagtcaggacccaagcaacctgggcctctgtggaagggcagaatggcctgagtttgggtttctcgagctaccttaagatcaggcctcctggctcctatcttagcccttctaacactctgaagtgtagaggttgtttgttccaagtccccaaggtactgtaagctcccagatagcagaaatcccattatattttagtgctgtggccccagcatccagctgcgctgttacttagcatgagatccacatgaaaaccatttcgcaactattagccattgccagtattaatactttccggaaggtggcacaaagtgggggatgttatagacagcttcaaagaaacgtttaagctagagttgactctttaaataatacaagccatccccaaccaaagattaaaaatttaaatacaaaaaaaaaaaaaggaaatttgcctaccccccatttgtgaaaacaaagaaaaaaaaaacagttaacgtcttaacttttctaggccttcactctcgcctctccccgcgctacaagggcgaattctggacgtatctacacagtcaccgcggagtctgcaatcgccgcgacgtcccctggcatttcttggccaggctgcaactttggtgacggtgtatgtagttacatcccctgtagtgcagctggtatttagggtcctcattggcaaagttgagggtataagcagggagggaggggaccttggcttctttccattcactggcatgttttcggggcacggtcatcccacgctgggctccagcgccagtcccaaggcctcgccgaactccagcccgggagtgcgcgcggccccgcccaccgggcggccgaggtcccgcccctacctcccccgccacacctacccacccaccccattgcaatggtctctgcacgcaggcgcagtggcgcgcgggggaggcggggcgcatgtgggcttcatttaaacagagcagagggggcggcgcgcggtcgccgcggtgctgctgctcagtgggagcgggtcttcgcaactgtctccgcgtggcgcgcgcctctagccgcccttcccctggcggctacggccggagggagcggaggcgagcgggagtcgggctccatggagagcggcggacaactgggcagaggcggagctttcatctcggcaccctggttccagtgacccgcgctagcgtcccgtcccgcccgcgtcggagcggccgccggccccgggactgaccggcctcgccgcacctcccgcaccgactagcgctcccgggcgctcctgcgcccgactcgccctcgcccccactccccggcggggtggcggcggccgggcccccacggcggcggccggagcagcagcagcagcagcaggagcccgcctctatgatgaagttcaagcccaaccagacgcggacctacgaccgcgagggcttcaagaagcgggcggcgtgcctgtgcttccggagcgagcaggaggacgaggtagggcgcccggcgccgcacgctgccctccggggcgccggggtctagggcccgggtgcttcccctcgctccccgcccctgcgcaggctgcggggctgggagggattagcccccttcctccctccctcctttcctccctcactcctttcctccctcacttcttccttcctttctctgggctgatagatgagacaaagggggctcgcccagccccagtttctccatctgggcactcgagaaggcgcctggtccccgggaaggtcccgggccgcgtaagtctcgcctagcgggagtcaccatcttaacgtgcgaattgagttgaaagccggataaacctcgagtgctcagcgagagga

SEQ ID NO: 10191 - DNA, 2300 bp, Homo sapien
ttttttgtcttcaagtgttagtatccatcaaaattacccctgatgtttaaatgcagattcccaggtctcagcactgacctagagaattagaatccctgggggaagggctccagctgcaggaatgctttttttaaaacaaaacaaaacaaaacaaaaaacagtgccctagatgattccaaggcgggtggctggtaagcatactctgacaaatattgtacatgtggcagtttctttcccaaaattggccacaaccatactttccatcacatatatgctgctagttcctagagtcttgcagctcccctttcaagaggtggtgtccatgttccctgccccttgagacagggtgagttttgtggctgattgactgatggattatggttattgtgatgccatttgacttccacgaggccatgtgatttccacggctgggtcaaaaaaggcgatttagtgtccatttcagcttgctagaacacttactcttggagcccagccaccatgcaatggggaagcccaagatgccccagggagaggcccacttggagtgaaactaacagccagcaccaacttgcccgccttgtgaaccatcatggaagccaatcttctggttgcacaggctgatgcagcacaagcagagtgtgccttcctgccaagccctgcccagactgcagacctacacactcccaacacaatagcactctgcctttctgcctaccagcatgaattatcctgggtcctctataaaatattctgaaaagtatctttgtccagtttcatttacttttgcagattcttctagtcacagaaccacctattgcagacttctggttatttgaaattctcattattacctctgaaccttggcttctcatctaaaacgttctgttaataatagagactacttcatctgtttcataattgaatgatgtattaaatttattaaccatttagcatcgtgccagcacaaaatatttcttattgttcttagtaggtttcttgtattcagagttccagtttctttagtgcactattttttctctctcatagctcaatgccatttcacaggccatttcctatgcttggcatactcttccctacaaggtcaggtaggttcttactcatcattgaggacttcacttatttaagaaggcttccctgagttctcaagcagttaatgcctctctgctaaaatagcaccttggaggaacctgtattacagacagcccttaacacattggattgtaactaattgtttactggtctctcttctccattggaatctaagttcctggaaggcacggtcagtcttgtcttcatttattcaccatctactgtctgttagtgtgctaggaaacactgtggttaagtagttaagggccaggtcttggcggatctgcctggggacaaaacagctccttggaaaaggttaactatctaagcctcatttgtaaaatggaaacaacacctcctcacgattgctgtgaagatgaagtaaagtgcttgcaaacagtccatcacacagcaaaccatccgtcatcaggataaaacgcttccccaacaattcaattttcgggcacccccactctaattctctcataggacctcgcactctataggtaatctctgctttacggattactctgggttctttaaacctctccttggtcattcgtcctgttaacaattctgagtctcaacctttaggtctaggcgttcagaaccattcttcccgcctccaactcgctccaaacccttttccttcagcctaccctgggcctaggggcgtgtcagaggtccgatttatacaatttaaacatcaaaactcccccaacagcgtgtgagtaactggagagacccccagtcagagctttgccaccgagtttcggtcttgccctccctttgaggaaggagcaagacgatgagccccacctcagtcgttcactgcagagccagcagggaacgcgcgcaatgcaggctgagctgaaagaacgaacgcgtgagctgaaagaacgaacgcgtgaatgaatgaatgggatacgtcgtaggccaggcctctgttacgtcgtccaccggcgcgggcgtggccacggttaagagagacgcgcgcgcagtcgcgcgcgggtcgtgccgtaccaccgtcgcgggcaggctcggccacgagcgccagagccccgcgcctcccctcgcggcctgtcccaagtccctgccccgcaacagagcgtcacttccgccatccccggcagcggttggggcggggcgcacgggggagggggccaggtcggagggaagcccgcccgtgc

SEQ ID NO: 10192 - DNA, 2300 bp, Homo sapien
agttgttccctcactcagcctaaacctgtctctcccctctcttcccccaaaaatgttggtttcttttctggtctcagctttgtgagaccttccttggtcccactaagtgagtctccctgttggggactggtcccactctgctcacagccatcaagacttgacctctggaattatctttgatccattcttcttacactttacgcagggaatgttcaaccagtccagttgactgctcattcaaatctgtttctcctctctgtcccttcctattgcacagtccagaaagacatcatgggtggctttggaggatggacacgactggaaaggacacagatgggccctctgtgggcttctataagagcaaagattagcctcctgatattccgtgggaaatgaggagacacactacacagcccgtatttagttttctttactatgtgatgtgtgttcacttactttcaatactagtcacttcaggaatatggttcttaacttgttgaggggtttatcaattccctggaatacataataaaagctatagattatttcttagaaaaatatacaaaagcaaaattttgcaaatcatgggagaagggaatttccaggcgaccgcttctgctttaccagccaatcatctactgtcttggatacttgcagcgttatctagtcttttcattcattcagcaaacacttcctggagacctataatgagaccaagcacagtctgagatgctgggtttgcatacagtgaagaacaagatagacatatgtctctgtcttcaaggagcttacattatccagcataagagacattaaacgaggttgggtgtggtggctcacgcctgtaatccagccctttgagaggccgaggtgggcatatcacctgaggtaaggagttcgagatcagccgggcaaacatggcgaaaccccatctctactaaaaatacagaaattagctgggcgtggtggtggccacctgtaatcccagctaattaggaagctgaggcaggagaatcgcttgaagctgagaggcggaggttgcagtgagctgagatcatgccactgcactccggcctgggcgatagagcaagactccgtctcaaaaaaaaaaaaaaaaagaaagagacattcaacgagcaaacaaataatcaatataaagtcaggtaatggtaaatattctgaaggaaaataaagcggggcatggaataagggtgggtgaggctattttaatggtgtggtcctttctaagatgatatttgagaaagacctgtaaggtcatgagaagaggtcagagaagcacattgctggcaatgggaacagagagtgcaaaggcccagaggtctttccttcctcctaagatggaaagcgaggtccaagattctgcatatttacttcctcccataataggtagccagcacagttctgagggcacagtgccaggttttcagagtggaggttctcttcaggttctgatttcaaacgtccaaatcctagcctccacatttcagggcttctctggaatgtctcttcccctgggaaactttaactcatctactaaagagcaatctacgatttctctgaatattaacataatttttttaaaaagtacttataggtttgcatggtggctcatgcctgtaattccagcactttgggacgccgaggcaggaggattgcttgagacaagcctgggcaacataccgagacctcgtctctacaaaaatattaaaaaattagctgggtgtggtggtgtgcgcctgtagtaccagctactcaggaggctgaggtgggaggctctcttgggcccaggaggtagaggctgcagtgagccgtgagggagccattgcactccagtctgggtgacagaatgagactgcctcacaaaaaaaaaaaaaaaaaaaagcttgttactttctaagggtatgtgtttggggcagtgattttgtttttctgggcaccttagtaacactgcggccacgcttccccaactaaaggtaaaagtccatagcaacaatcctccctttctctctgcacccgggccgctttcccgcggagactacatttcccagaatgccccgcgggctgggacggcgcgcgcagcgctgtttcgtgggaccaggattgaaacaagatggcgggttcgtggtgagaagccgtcaaggtaaccgcttccctctactcctcctgtcgaggacttcctcgaaactgggcagtcccacagtgttggtcggcagttgtagaggtctcccgcctgtcgttcccggcagggcgaggttgcctgcatccccagcctttgtcct

SEQ ID NO: 10193 - DNA, 2300 bp, Homo sapien
aacataccgagacctcgtctctacaaaaatattaaaaaattagctgggtgtggtggtgtgcgcctgtagtaccagctactcaggaggctgaggtgggaggctctcttgggcccaggaggtagaggctgcagtgagccgtgagggagccattgcactccagtctgggtgacagaatgagactgcctcacaaaaaaaaaaaaaaaaaaaagcttgttactttctaagggtatgtgtttggggcagtgattttgtttttctgggcaccttagtaacactgcggccacgcttccccaactaaaggtaaaagtccatagcaacaatcctccctttctctctgcacccgggccgctttcccgcggagactacatttcccagaatgccccgcgggctgggacggcgcgcgcagcgctgtttcgtgggaccaggattgaaacaagatggcgggttcgtggtgagaagccgtcaaggtaaccgcttccctctactcctcctgtcgaggacttcctcgaaactgggcagtcccacagtgttggtcggcagttgtagaggtctcccgcctgtcgttcccggcagggcgaggttgcctgcatccccagcctttgtccttcctgcagaagagccggcatgtggctgcgcgtttcttatagcgccccctttgttccctggcggacgcccgtggggaggtgatgcagcttgtggctctagggactcctttaggtcgaagagttctggtgctcttggtagcctgttcctcaaacctctgaccctcagaggctctgtagcttttgttttggggttgaattccgggctgagggacttgatctctgaaatgatcttcctggggtgaataatctgactcccagcagggcgtgcttttctctgggcttcggacagaggggacctaatttcccccaagatgttttattcgtggtcagaagtcatgggtttacgtcccacgcatgtattaagcagcgatatactgagcaagtaatcgattgacctctctgagcctttgttcttaatctgaaatggagatgctgcttcacacacttgtgaaagtcagagcacatattgtatatgaaagtgggttgtaaactaaaaagcacacctatgagctcagggttaacggtgttaatgtactggcagtgcaaggtatcagtgtgagtggtttagactagcaaataagagggcctgtgtcctaattctcttttatcactattggggggaagggcacggatactcattgaagactattaaaaacaagatttaacaatggttatttgtcatttattcacaacaggccatgaagattgtggttttccccattttgtcattggagaaactgaggatcgtttagttaatgacttgtttaaagtttcccaatttggcagtgactgactctaaagtccttggaagcaagacgtttaaattttgtactttagtttcttcatgaatcagaataaagatacctcacatgattaatacgagagcaaaatgaaatggtggtgaaagtacgttggaaagttaaagactttgtacacatataagatggtgaaattttatctgggacttgagggcatttatgagttcctccaattgagtaataggctaaggataggccttgtttgatatttctttattattattattattattaatggctcagggcagacaactatttcatttaatcagaaacaggatagtactgtaaatgatgtagtatcttgtgtatggaaccttggagggtgtacacagccacactagcattaaaagaatgaatactctgtgtaccatttgtgagtgactgtttcaagagtaattacacatttactgagtattcattaagtggaaggagctgcactgggtcctgcagagaagtttgtatctaagataaatagtaatggacatagttccagtggttctgatcttatattctgtccatgtcgctcttcgtcctgttgttcaatcatgtggaattgccaagttgtttaaaagcattgcttcagttgacttctaggcagtgattcttaccttgttcttgtggtgtttaatataacttaaatttaccataggtagcactgatttttctttatctcttcagcaggagtagaaattggtatgcttagaagcagattctaaaagcagtttctcttcagaacatcttttttcataccacttgataagcatcttgaaacaccatggctgtagctgcagtaaaatgggtgatgtcaaagagaactatcttgaaacatttatttccagtccaaagtaagtgaaattttttttaatgtttaaaaact

SEQ ID NO: 10194 - DNA, 2300 bp, Homo sapien
gaccaggctgggcaacataggaaacctcatttctacaaaagttacaaaaattagctgggcgaggtggtacacgcctgtggtcccaggagggagccagcttactcaggaggctgaggtaggaagattgcttgagcccaggagttcgaggctgtgattgtgccattgtactccagcctgggagacagagtgagaccctgtctcaaaaataaaaaattaaaattaaagaaagtttcattactgttattattgatgtttaataaaaaagggaaggacagtaagattggaggcaaagcgaaatcatgattaaggaagaaagttcagtgagcaaaaataaaaagccttccttatattctagaaggaatattttaaaatttcccaaatggtcagtcagcccgggagtgtagaacacttcacagttttcaaagcatgttaagccatttgatccttataacagctttgattttggtagcccatgtagtattatcctctttatgaaggtaaagaaacttgagttctgtggccctcataagttcacccagggtcacatatttggtaaacaaaaactgtgaccaaaatctggatctcccaccttactttgtcctgtatactttctactgtacttccttttctgtagcaaggtaaaatactgagcatttgaagatgggacaacttttagctttcatagctctttcaaaatgcaattaaatatatatatgtaacaagaataactcataaattacagaaattattgttaattgaaattcttttggcacattgagcttaattgctgttaactttggcattggtcctaattatatatttagagcttctgctacttctatatccagaattacttccattggtaaaatatcaggtaatgaatgtttccttatttttttttcaaggtgaagtctcactctgttgcccaggctggagtgcagtggtgcagtcttggcccactgcagcttcgacctccctgggctcaggtgatcctgctatctcagtctcccaagtaagcaagactacagatgtgtactaccatgtctggttatttatttatttatttatttttgagatggagtttcactcttgttgcccaggctggagtgcaatggcatgatcttggcccactgcaacctccgcctcccagattcaagtgattttcctgcctcagcctcccaagtagctgggattataggcatgtaccaccatgcccggctaattttgtatttttagtagagatggggttccaccatgttgatcaggctggtctcgatctcctgacctcaggtgatctacccacctcagcctcccaaagtgctgggattacagacgtgagccactacgcttggcctatgttttgtatttctttgtagagatggagttttgccatgttgcccaggctggtcttgaactcctgggttcaagtgatccacctgcctcagcctcccaaagttctggtattacaggcgtgagccaccatgcccagtccttatgaatttttcaaacatcagttatgcagaaacatttgagaggcagttcggcaatcactttttaatgtgtaggcactataggggacacagtaatgaacaaggtacagttcctggccttaaggaacttatttagacttgtaggtgaaacagacatctagcaacactaagaatgcccagaatatgaggcagaatgtgataagtgtgtcatgagggcacaaacaaatgtctgtgtaaacacagagtagaaattttactgagtttcttgttaactaaaatactgttgtcttgagttttcttgtctgcatatttcagaacacttaattctgtcacccagtcatgtttctttcagtgaaaatgtatatcatctagttggtttatattcagagatacaaaattgtttttttttaatttatattttttattattaatttttttttaatagagatggggtctcactatatgacccaactatgttgcccaggctggtcttgaactgctggatcaagcgatcctgctgccttggcctcgcaaagcgctgagattacaggagtgagccaccacaccccaccagttttaatttttttagaaacgattttgctctgttgcccaggctagaattcagtggcacaatcatagttcattgcagcctcaccctcctaggttcaagtgatccttcagcttcagccacctgagtagctgggattataggtgcatgccaccatgcccagttaatttttaaaaatagtttttaaagataatatctcactgtgttgcccaggctggtctcaaactcctggccttgagcag

SEQ ID NO: 10195 - DNA, 2300 bp, Homo sapien
actatctgctaggccccttccatcaattcttattaaattctcaaaataatcctttgaaaagggagtataattacattttacagtgactcgaaccttacccaaacaagtgggagagccaggagccaaactatcaggctccaaagcttttttttagtgcatcacaatgacaaaggggtggttttctttcacccaagaatgtgctttcctggaaatttttctagatagaatattatgtaatttgttttgaaggttttttttcctgactgtcttaaagattatgctagctttagaacacatgcaaacagctgcagctctgtgattaaaatgttaaggtcactagaatagtgttaggaaaatgttaatagataattctgctgcctctattagcttatgtatgatccttaatagcattgcttccccttcagtttctatttaggaggtgaagaatcttttaataaggtagaaagttgctttatttaaatttgtactgtagaatgtttgtgatacagtatttgtaaaattgatatgaaaaataatttctcaaagtctattgtttgatctagttattttaataaaggaactctagaagtttcaagtggccagtgaagtgtgaggaatagagagtaaaggaaataattaataatggtgaccctctgttaagtggtttactttttccattaatataaatttcatttggaaagattaaaaaaacaagtttgattgaacttgataaatcagaaatatttaccagctttgtcgatggtgtattcttgaaaaatgtttggttttctttcaggttgacttatatccaaaattctacaaattcttagctatgttataaatgtagaaagaagtgaaaaatcaaaatatgattatgaagattttcttctcttccgagtacaaagctctgctaaataaggatttacccaagatgcccacatccacatacttatgtgtcagtgctttggagaattaactttgactttattctactggaagtatagattaacactgtgctttctgggattttgcttttcatgggttgctgatttttaattttgctaaataagcacatagtccgtgatcaccagcatcacctgccctctgttcctcccccgtcccccagggataagaacctgttatccaccatcagtaacattttatgaaagatctacttatttgtctgttttgcagacattttaaaattcgtaaagtgggatgcttctttaatttaaatacatttagcttcatgaaaaactcactacacagttcttgttcaagcattattgggaaaccaccagagggcactctcacccagggcttaatttgaacatctcgcccaaaagtgacttttaaaagcacttaattagcagagaatttggatgttcattagttgagaatgactagtagaataaatggtaatagtgaaattaagtgctggaatattctgagtagaccaatagcaaaaactgatttttttttttttttaaagaaaaggtcttgctgtgtcgcccaggatggagtgcagtggcacaatcacattgcactgcaacctcaatatcctgggctcaagcaatcctcccaccgcagcctcccgaattgctgagactacacatgtgtgctaccatgcctggctaattgttttaattttttttatagagacggggtttcgccatgttgcccaggctggtcttgaactcctgggctcaaagcgatccacccaccttggcctccaaaagtatgggattacaggtgtgagccactgtgcccagccttattttttttttttaagataatattgttaacattttgtatttctctgcataaatatatttcaaaaataaaaatagagctcataatatatgctgttttgtaatgcttttttcacttaataggaattttttccgtatcattaagtactctgatttaatgggtgcatattattctataatctggcttgtcataatttaattaactccctgctgttagacaaaatcattgtttctgttccatcttgtgaataatgctgttattaacatcctggtggattattaccattttctttttttattttttttttaaatttatttcttcttttttttttcttataatctcatcagaagctggcaagatcattactgttttcttagatttgtttctgtaagtgcaatcgttgaatcaccatgtccggcatccatgtttatgtacatttttaaagtcagtggtttaaactgtatactttttgggttttggagatggaggtttgctctgcccaagctggaatgcaatggcgcgatctt

SEQ ID NO: 10196 - DNA, 2300 bp, Homo sapien
caccgagagtaaaaggatgacagttgaaataacagctaattgttattaagtatttgctaagttccaaagcacttttcatagattagctcaattaattctcacaacagccctgtaaggtagggaccatgatcatctccagaagaggctaaataaattgccaaagatcacatatgtagcaagtggtggcagagtgaggattcatacctggacagcttaactttaaagccatggtgctaatgcattcattcattcatccatccattcattcatccatccattcattcaatgattatattggatgcctactacatgctaagaactatgttcaaggtgctgaactacagctgtgaacaatgcaagtacaaatacatgaagcagagttggggagaaagtaagctggagaaataagacataaactaggttagatggtgaacatgattaaggaaaaaactagagcagggaggaaagagaaatgtgcagggggaaggtcaattctgagtgagccaacaggcaaggtctcactaagaaagcggcattaaataaagatttgaggaagtgagggagtaaaccttgcagctatctaaaaggagagcatgagaggtagaggagacagcaaatacaaagaccctgaagcaggggcaaggctaatgagttctagaattagcaaggagtccagtgtaacttgaacagagtgatcaaagaacagagcaggaggaaatgaggtcagagaggtaaacaggctggagtgcagtggcaccgtctcggctcactgcaacctccacctcccgggttcaagcgattctcctgcctcagtctccctagtagctgggattacaggcatgcaccaccacacccggctaatttttgtatttttagtaaagacggtgtttcaccatgttggccaggctggtcttgaactcctgacctcaagtgatccacccgcctcaacctcccaaagtgctgggattacaggcgtgagccaccgcgcccggccaggattcttttaatcaagtatgatgcagccatcagggttggagcattctaggaagagggaacagcatgcaccaaggcaacaggaaagcacataaaaaaggagttgctggaagattcatttcaacccactatcaagtaaatattaaacttactgtataaaaatgttagggccaggaggggtggctcacgcctgtaaacccggcactttgagaggccgaggcaggaggatcggttgaacccaggagttcgagaccagcctgaccaacagggcgaaaccccgtctctactaaaaatacaaaaactagccgggcgtggtggtgggcgcctgtaatcccagcttctcgggaggctgaggcaggagaattgcttgaacctgggaggcggaggttgcagtgagctgagatcacgccctgcactccagcctgggcgacagagggagacttggtcatgctccctccccgccctccgtcagttttaggaataaatacctttttatttaagctaaagtgtgggtacacccttcctctaggattctccatcaaggaataagaagccatattaggacaatttagagggcagttaaccctagtagacatagtggttcttaaaaggcttggggcctcagactgtacacaggcttcacatggaatctgatttgttcctttatcccagtccctcacccagaacccgaatctagcccttcatgttataaaaagggccagaggtccaaagagggtaagtgccttgtgcaaaattattcaactactttgtagaggattttaactagggttcagttagctccgcccacactataaaaggctctttctaaaaaacgaaacatgattaagggcacacggctccagcgttaacaaagctctttgttagctgggaaatgcccccctccccgactcatctgcttatcatctgcatagaattatgtactcaaaagcaggaaaattattgagaaaaccattggtccccggctgcagaccccaaggttgggagctggttcccgtttcctcccagagccggcagggggggcaccaggcaaagtttgcaagacgcgcctccctcccacccctcccccttcctcgcccaacttcccatagccgcggcctcaactaaaagtggccattgacctttcaagctttcgagcagtgatgcaatagaatagtatttcaaagaaaaatgcttatcgaaattttggatccggttttcccgtgattgttaagggtttcttttaaaaagtaggtcacatttcaagtaggtcatatttcgggggcgggtgcgcagacaaggagatgagt

SEQ ID NO: 10197 - DNA, 2300 bp, Homo sapien
tatctaaaaggagagcatgagaggtagaggagacagcaaatacaaagaccctgaagcaggggcaaggctaatgagttctagaattagcaaggagtccagtgtaacttgaacagagtgatcaaagaacagagcaggaggaaatgaggtcagagaggtaaacaggctggagtgcagtggcaccgtctcggctcactgcaacctccacctcccgggttcaagcgattctcctgcctcagtctccctagtagctgggattacaggcatgcaccaccacacccggctaatttttgtatttttagtaaagacggtgtttcaccatgttggccaggctggtcttgaactcctgacctcaagtgatccacccgcctcaacctcccaaagtgctgggattacaggcgtgagccaccgcgcccggccaggattcttttaatcaagtatgatgcagccatcagggttggagcattctaggaagagggaacagcatgcaccaaggcaacaggaaagcacataaaaaaggagttgctggaagattcatttcaacccactatcaagtaaatattaaacttactgtataaaaatgttagggccaggaggggtggctcacgcctgtaaacccggcactttgagaggccgaggcaggaggatcggttgaacccaggagttcgagaccagcctgaccaacagggcgaaaccccgtctctactaaaaatacaaaaactagccgggcgtggtggtgggcgcctgtaatcccagcttctcgggaggctgaggcaggagaattgcttgaacctgggaggcggaggttgcagtgagctgagatcacgccctgcactccagcctgggcgacagagggagacttggtcatgctccctccccgccctccgtcagttttaggaataaatacctttttatttaagctaaagtgtgggtacacccttcctctaggattctccatcaaggaataagaagccatattaggacaatttagagggcagttaaccctagtagacatagtggttcttaaaaggcttggggcctcagactgtacacaggcttcacatggaatctgatttgttcctttatcccagtccctcacccagaacccgaatctagcccttcatgttataaaaagggccagaggtccaaagagggtaagtgccttgtgcaaaattattcaactactttgtagaggattttaactagggttcagttagctccgcccacactataaaaggctctttctaaaaaacgaaacatgattaagggcacacggctccagcgttaacaaagctctttgttagctgggaaatgcccccctccccgactcatctgcttatcatctgcatagaattatgtactcaaaagcaggaaaattattgagaaaaccattggtccccggctgcagaccccaaggttgggagctggttcccgtttcctcccagagccggcagggggggcaccaggcaaagtttgcaagacgcgcctccctcccacccctcccccttcctcgcccaacttcccatagccgcggcctcaactaaaagtggccattgacctttcaagctttcgagcagtgatgcaatagaatagtatttcaaagaaaaatgcttatcgaaattttggatccggttttcccgtgattgttaagggtttcttttaaaaagtaggtcacatttcaagtaggtcatatttcgggggcgggtgcgcagacaaggagatgagtttccactaaggccagggggcctccaacggggttggaggtgagaatcccaggtagggtagaggtgccgagatccttccgaatcccagccctggggcgtcagccctgcagggaatggcagagacactctccggactgagggaaccgaggccagtcaccaagccccttccgggcgcgcaggtaagggcgcccccttagcagccggcgcaggtgacccgggcgggccgccgggtctaccggagacgttggagcagaggggaggaggaagggaggagccgggtgggtgcgggtgacaaggagccggagcgccagggggaggggactaaggacggccggcgccgcttaaggaggcgctgctctcccgctcgctgccttccaggacctgatcaaggggaccgcctccggtccccggccgtgggcaccgggacgagcacggcgtccccacgccatcgatgtgtcttagagccggagagtctggtttccgaggacccacagtcgctcctgcacgcccaccccccgcaaaagtgcggccaggagggtcgcatcgagggggcgccgccgggatgtttagaggaaccca

SEQ ID NO: 10198 - DNA, 2300 bp, Homo sapien
aaatgcccccctccccgactcatctgcttatcatctgcatagaattatgtactcaaaagcaggaaaattattgagaaaaccattggtccccggctgcagaccccaaggttgggagctggttcccgtttcctcccagagccggcagggggggcaccaggcaaagtttgcaagacgcgcctccctcccacccctcccccttcctcgcccaacttcccatagccgcggcctcaactaaaagtggccattgacctttcaagctttcgagcagtgatgcaatagaatagtatttcaaagaaaaatgcttatcgaaattttggatccggttttcccgtgattgttaagggtttcttttaaaaagtaggtcacatttcaagtaggtcatatttcgggggcgggtgcgcagacaaggagatgagtttccactaaggccagggggcctccaacggggttggaggtgagaatcccaggtagggtagaggtgccgagatccttccgaatcccagccctggggcgtcagccctgcagggaatggcagagacactctccggactgagggaaccgaggccagtcaccaagccccttccgggcgcgcaggtaagggcgcccccttagcagccggcgcaggtgacccgggcgggccgccgggtctaccggagacgttggagcagaggggaggaggaagggaggagccgggtgggtgcgggtgacaaggagccggagcgccagggggaggggactaaggacggccggcgccgcttaaggaggcgctgctctcccgctcgctgccttccaggacctgatcaaggggaccgcctccggtccccggccgtgggcaccgggacgagcacggcgtccccacgccatcgatgtgtcttagagccggagagtctggtttccgaggacccacagtcgctcctgcacgcccaccccccgcaaaagtgcggccaggagggtcgcatcgagggggcgccgccgggatgtttagaggaacccacccccgtggcaggccaagggccaaggatcgctatccttccctgaacccgggcgctcagctggcccgggtagggggcaggctccggccgccgaaacggggttggctgtagccggtggccggggagatctctagcttgcgcccgagcaccccggggtgtggggccagaggcaggccgaccccggcgtgcacaccgcccgccctgcacccgagcgctctcacccggtcttccctgaagcctgtgtattgcgaccgagcctctttaaagcagtagcggggcccgcggtcacgtgaggccgattcctggaaagttcctggaaagccgcctccgcagcagccgggcggggcgcgagcggagcgctgactggggagggaggcggggagcaagggaggcgcgtcggtctgggaagtcgcgcgcactcgctgctcctgggaccgacgtttaactcttgccaagtctcgtcgcagccgccgcggctggcgggccttgggcttcccctgaagcatgagccctctcgcccgcagccaccctcaccgcgtggcccgcggacagtgcgcgccggggtcccgggtgcacagcctcaggataccccgtgcccgcagctcgggcgcccgcggcaggtaccggtagtgggggaagcccgaaggctccgccccgaggagagttaccggggagggcggcgaggcgcggccgcgtgcgccggggagcggcggacggcctgggcttccgcagctcggagcgccggggaagagagagtccgaaccgcggctctgccccgcggcctagcgttgctgcctgctttctccagccccttctcggcgtctggaagtgtctggagtttcttttttttatttcccctaaactgccattcaaattaataatcctcctaataacctgatctcccgctcctccccaccggcctgcctcccgccctcgctccttcctccctccctccctctctccttcccacctccagggtcgcagccggagggaaacccggcagcagtccgagagtggaggtgtcccagcccgtagggggcgtcgccgcgcggtgggggatggggtcgaggcaatgatcctcgaggcttttgtgtgccctctgcgcacggaactccgaccgccgcctccgagcgcggggctggttgcatccccgggcatctcgttcccaaattaaacgttaacgggggaaacaagggcagacgcccctcctctcccgggcccctcccacctccccttttccccccacccccccgccccatgtccgctgaggaggctgcctggtgcggaggcggcggcggcggccgcggc

SEQ ID NO: 10199 - DNA, 2300 bp, Homo sapien
aggaacccacccccgtggcaggccaagggccaaggatcgctatccttccctgaacccgggcgctcagctggcccgggtagggggcaggctccggccgccgaaacggggttggctgtagccggtggccggggagatctctagcttgcgcccgagcaccccggggtgtggggccagaggcaggccgaccccggcgtgcacaccgcccgccctgcacccgagcgctctcacccggtcttccctgaagcctgtgtattgcgaccgagcctctttaaagcagtagcggggcccgcggtcacgtgaggccgattcctggaaagttcctggaaagccgcctccgcagcagccgggcggggcgcgagcggagcgctgactggggagggaggcggggagcaagggaggcgcgtcggtctgggaagtcgcgcgcactcgctgctcctgggaccgacgtttaactcttgccaagtctcgtcgcagccgccgcggctggcgggccttgggcttcccctgaagcatgagccctctcgcccgcagccaccctcaccgcgtggcccgcggacagtgcgcgccggggtcccgggtgcacagcctcaggataccccgtgcccgcagctcgggcgcccgcggcaggtaccggtagtgggggaagcccgaaggctccgccccgaggagagttaccggggagggcggcgaggcgcggccgcgtgcgccggggagcggcggacggcctgggcttccgcagctcggagcgccggggaagagagagtccgaaccgcggctctgccccgcggcctagcgttgctgcctgctttctccagccccttctcggcgtctggaagtgtctggagtttcttttttttatttcccctaaactgccattcaaattaataatcctcctaataacctgatctcccgctcctccccaccggcctgcctcccgccctcgctccttcctccctccctccctctctccttcccacctccagggtcgcagccggagggaaacccggcagcagtccgagagtggaggtgtcccagcccgtagggggcgtcgccgcgcggtgggggatggggtcgaggcaatgatcctcgaggcttttgtgtgccctctgcgcacggaactccgaccgccgcctccgagcgcggggctggttgcatccccgggcatctcgttcccaaattaaacgttaacgggggaaacaagggcagacgcccctcctctcccgggcccctcccacctccccttttccccccacccccccgccccatgtccgctgaggaggctgcctggtgcggaggcggcggcggcggccgcggccgaggtcgaggtaagagcgcggcgttggtggtttgcattttccgcagcgctcgcgaccgcccgctcggccccggcctcgcctcggagccccgcgagggctgcgcgctcgggccgattcctcgacagcgcccgcggcggcgagaaccaccgcagccatcctggtccgggagcgaccgccgcggcacccccaaccccgccagagcgggcaccaggaagcggggggaggggagcgaggagcctcccgggcggagatgcggcagctcccgcacctccgcaccccgggttggtgcctcggggccccgcagcgctttagggcggagaaccaagtttgtgtgggtgcttcttcctgggggccctcgggctgcgccaggtgtgagaccggaatgccaatttggggaatctctcctgttctttcctttttaattttttctacttgtccttgacaagggcctattcccactggatctgcaggtgactatttgctcttcctaggtcgccagtctttgatttcagctagtgaccctgggcgggaagacaccctgttcaccctcctcctgacctccgccccccacctcttcagccaactttatcttggatctctgctctctttatcttttctctagagctgggccagggcgctaactggaagcttggggttaaatggtgcaggaacgtagaggcggaggagtccctgggattttccacgtctatttccccacccccaccccagccgcaggggtccagtttggactgacccaacctcccgctttctctttgtaggcgatcagtgggtgaccgcggctgcgagggactttgtcatccgtcctccaggatctggggagaaagagccccatcccttctctctctgccaccatttcggacaccccgcagggactcgttttgggattcgcactgacttcaaggaaggacgcgaacccttctctgaccccagctcgggcggccacctgtctttgccgcggtgacc

SEQ ID NO: 10200 - DNA, 2300 bp, Homo sapien
agggccttcgccagacgcgccgcctgcggggatggctcctccgccgaccccgcggtcccccactggctccgcgtcccttccccgccattcccggagggctcaaggcaccgcagggtcatgagagaagggtcaccgcggcaaagacaggtggccgcccgagctggggtcagagaagggttcgcgtccttccttgaagtcagtgcgaatcccaaaacgagtccctgcggggtgtccgaaatggtggcagagagagaagggatggggctctttctccccagatcctggaggacggatgacaaagtccctcgcagccgcggtcacccactgatcgcctacaaagagaaagcgggaggttgggtcagtccaaactggacccctgcggctggggtgggggtggggaaatagacgtggaaaatcccagggactcctccgcctctacgttcctgcaccatttaaccccaagcttccagttagcgccctggcccagctctagagaaaagataaagagagcagagatccaagataaagttggctgaagaggtggggggcggaggtcaggaggagggtgaacagggtgtcttcccgcccagggtcactagctgaaatcaaagactggcgacctaggaagagcaaatagtcacctgcagatccagtgggaataggcccttgtcaaggacaagtagaaaaaattaaaaaggaaagaacaggagagattccccaaattggcattccggtctcacacctggcgcagcccgagggcccccaggaagaagcacccacacaaacttggttctccgccctaaagcgctgcggggccccgaggcaccaacccggggtgcggaggtgcgggagctgccgcatctccgcccgggaggctcctcgctcccctccccccgcttcctggtgcccgctctggcggggttgggggtgccgcggcggtcgctcccggaccaggatggctgcggtggttctcgccgccgcgggcgctgtcgaggaatcggcccgagcgcgcagccctcgcggggctccgaggcgaggccggggccgagcgggcggtcgcgagcgctgcggaaaatgcaaaccaccaacgccgcgctcttacctcgacctcggccgcggccgccgccgccgcctccgcaccaggcagcctcctcagcggacatggggcgggggggtggggggaaaaggggaggtgggaggggcccgggagaggaggggcgtctgcccttgtttcccccgttaacgtttaatttgggaacgagatgcccggggatgcaaccagccccgcgctcggaggcggcggtcggagttccgtgcgcagagggcacacaaaagcctcgaggatcattgcctcgaccccatcccccaccgcgcggcgacgccccctacgggctgggacacctccactctcggactgctgccgggtttccctccggctgcgaccctggaggtgggaaggagagagggagggagggaggaaggagcgagggcgggaggcaggccggtggggaggagcgggagatcaggttattaggaggattattaatttgaatggcagtttaggggaaataaaaaaaagaaactccagacacttccagacgccgagaaggggctggagaaagcaggcagcaacgctaggccgcggggcagagccgcggttcggactctctcttccccggcgctccgagctgcggaagcccaggccgtccgccgctccccggcgcacgcggccgcgcctcgccgccctccccggtaactctcctcggggcggagccttcgggcttcccccactaccggtacctgccgcgggcgcccgagctgcgggcacggggtatcctgaggctgtgcacccgggaccccggcgcgcactgtccgcgggccacgcggtgagggtggctgcgggcgagagggctcatgcttcaggggaagcccaaggcccgccagccgcggcggctgcgacgagacttggcaagagttaaacgtcggtcccaggagcagcgagtgcgcgcgacttcccagaccgacgcgcctcccttgctccccgcctccctccccagtcagcgctccgctcgcgccccgcccggctgctgcggaggcggctttccaggaactttccaggaatcggcctcacgtgaccgcgggccccgctactgctttaaagaggctcggtcgcaatacacaggcttcagggaagaccgggtgagagcgctcgggtgcagggcgggcggtgtgcacgccggggtcggcctgcctctggccccacaccccggggtgctcgggcgcaagctagagatctcccc

SEQ ID NO: 10201 - DNA, 2300 bp, Homo sapien
cccccacccccacaattaccgggatacttgcaatctgccggtgcctccccgggagggaaagcccgtggcccacacggaaagaccggaatcgcaagcgagagaacttttccctctccctccccctgttgctaccaaaatttcaactgtgccacaactgtaagcttttaggatacggatttggaaagccagaatgatttgccagatactttactttttttcttttttcttttttcagatgcctagagacagcgtgccgcgcgaattgcctgactgtacttgaaagcggcagtaccctgggcgcgccgaccatggaagccgcgctcggcgggggcttcgcagcctactctcgacgcccgggcagccgccctcgcggcagtgtcagtccctgaacttggccgccaagatcctgggctgcagccgcagctccgcccgggagccagatgctgctgggcctgcggggcccgcggcaccgacttgctgattgcaccccgtgcaaagggaggcgcccgacgctttccccggccggggttcgagcccgggagcctaaccctgagcagctgcggaaaacagtaaatcttccagcgtgctaagaagctatttccaagaagctcttcccgcgctctgcgctccgccaggcctgagtccctggagaaccactttccttacgcattcccaaggacccaggaccctgcgagcgtgctctccgcggtcccttggaagcaagggacgtatttccatcttattctttgcttcccacctcgaccccgcttcctagctgcttccttggggaggcgctccctcccgcacgcgtcgcggccgatcggctccctacctgtctgaccgagctcccgcagggccttcgccagacgcgccgcctgcggggatggctcctccgccgaccccgcggtcccccactggctccgcgtcccttccccgccattcccggagggctcaaggcaccgcagggtcatgagagaagggtcaccgcggcaaagacaggtggccgcccgagctggggtcagagaagggttcgcgtccttccttgaagtcagtgcgaatcccaaaacgagtccctgcggggtgtccgaaatggtggcagagagagaagggatggggctctttctccccagatcctggaggacggatgacaaagtccctcgcagccgcggtcacccactgatcgcctacaaagagaaagcgggaggttgggtcagtccaaactggacccctgcggctggggtgggggtggggaaatagacgtggaaaatcccagggactcctccgcctctacgttcctgcaccatttaaccccaagcttccagttagcgccctggcccagctctagagaaaagataaagagagcagagatccaagataaagttggctgaagaggtggggggcggaggtcaggaggagggtgaacagggtgtcttcccgcccagggtcactagctgaaatcaaagactggcgacctaggaagagcaaatagtcacctgcagatccagtgggaataggcccttgtcaaggacaagtagaaaaaattaaaaaggaaagaacaggagagattccccaaattggcattccggtctcacacctggcgcagcccgagggcccccaggaagaagcacccacacaaacttggttctccgccctaaagcgctgcggggccccgaggcaccaacccggggtgcggaggtgcgggagctgccgcatctccgcccgggaggctcctcgctcccctccccccgcttcctggtgcccgctctggcggggttgggggtgccgcggcggtcgctcccggaccaggatggctgcggtggttctcgccgccgcgggcgctgtcgaggaatcggcccgagcgcgcagccctcgcggggctccgaggcgaggccggggccgagcgggcggtcgcgagcgctgcggaaaatgcaaaccaccaacgccgcgctcttacctcgacctcggccgcggccgccgccgccgcctccgcaccaggcagcctcctcagcggacatggggcgggggggtggggggaaaaggggaggtgggaggggcccgggagaggaggggcgtctgcccttgtttcccccgttaacgtttaatttgggaacgagatgcccggggatgcaaccagccccgcgctcggaggcggcggtcggagttccgtgcgcagagggcacacaaaagcctcgaggatcattgcctcgaccccatcccccaccgcgcggcgacgccccctacgggctgggacacctccactctcggactgctgccgggtttccctccggctgcgaccctgg

SEQ ID NO: 10202 - DNA, 2300 bp, Homo sapien
gccttggcttcccaaaatgctgagattacaggtgtcagccaccactctcaggcaggttttggaggattctggatttcaaatttttgtattagggatgtttaacctgtaaacttcaacgcttggcagtgttgcaagtggtctgcactttatctggatgaagacaaagaatggtgctaacatttgtctatgaacagatgggaaatcttgctgaggaaaggacaatgattctcaagcaaaaggggaaaagggagagagaaaagagagcacctggaactcaagagtatcaagaatgggaggtggcaacaggatgatttgcaaataatatttggctatcattagaacaataaactcttcactatacaaggttgtatggtgtattggaaagagcatgaaatcagagaaacttcattagacttcaagttttgctctatattagctgtgagattttgcctaagacaattgaccattctgattccacagtctttatacatgcaaatgctaaaacagttgtaacagtggagatacattgtgaaaaatgtgtcattgtgcaaacaaaataggatgtacttatgcaaacctagatggtatagcctactacatacttaggccatatagcatagcctattgctctgaccaccatcatatatgcagtctgtcattgacccaaatattgttatgcaatgcatgactgtaataataataatacttgccacataggtaaaaatactgtcattaacggtgtagtaaaatggtaactggcatagtaatgctgtaaattgaatacaatttttagaaggttttgaggagggaggttcagaactgttctccattgatttgcttaacaaagatattttcattttccaccaaagggtttggctgtgaaaacctttgcagaaataatattttaggagttttttccccctgtactgtcaactgatttttagtaagcatatgactttctgtatgtatcatccaattgatttaaaaatgaatcaatgaatgtatttattgatcgcctgcctcgcttcacaaaggaatgtgaggaaggacacccaatttggcattgctgtgtttctctgtatttgggtcatgcattttttcttgctttccacattgaaaatgtggtggatgcagtagattggctttaagtgtcaggccttccctcatttactatacctttttgtgtttcacaagctggaaagctaccaactacatgctctagacatccttgctgctaatattctgcatgtcagattggtctcaccaatggcacgcagcaaagcaagatttgcaggtgctgttttcttgctgctggcaaatgcagccgtggagaccaccgttttttgcagcactgttccagtgtcctgttaattgttctgtcggtgttgagaggaggttggggaccaggcatggcaacttcctgacgccatcttcctgattgtgggcagcagccacaatcagcaatcttatctaggtagtcatccatggatgttcagctcagcccttctccagcctttccaatgatttcgaatgtccccaattccccctaacgaatccctttctgactaggagtaactagctgagtgctgcaatgaaatcctgactgacagatttgtaaactctttgcgggcaggaacccttgatataaataaatgaccttgcattttaatggagggaagcagaaggataaacaaatgaataagtgaaaagttttaataagatggtgatgcgtaaaaaataaagctggttaatggggagtgcaggaaatgagcgcagctgtcttgccgttttaatcagataggtcagagaaggcttctctactagggtggcttttgacctgcctctctgttaggtcaattgtgtgcgaggccctgatggagttactgtgttaaaatgcaatgattcaattactccattacttagataccctttaagtgacactacggttgtccatctccccgctattgaattgtttacccacagtaagcatggcgggaagagcttcgatccgacccttgaacgctcaataaaaatggcgacagcacttcctgtacttgccctcaacaaagatggtgtcaacacttcctgtttagggttttcgccattaacaaagatggtgcttatggggcaggttccctaacagtcaggattccggttgcagtttttctcccccgccccaaagatacgtggttgcagacgtaagtaacaggaatccatctttctttgaaagtcctgcattgtagcgtctgcgacctgggccctgcgggggcttccccgccccgctaacttgctccgcattt

SEQ ID NO: 10203 - DNA, 2300 bp, Homo sapien
aataaactcttcactatacaaggttgtatggtgtattggaaagagcatgaaatcagagaaacttcattagacttcaagttttgctctatattagctgtgagattttgcctaagacaattgaccattctgattccacagtctttatacatgcaaatgctaaaacagttgtaacagtggagatacattgtgaaaaatgtgtcattgtgcaaacaaaataggatgtacttatgcaaacctagatggtatagcctactacatacttaggccatatagcatagcctattgctctgaccaccatcatatatgcagtctgtcattgacccaaatattgttatgcaatgcatgactgtaataataataatacttgccacataggtaaaaatactgtcattaacggtgtagtaaaatggtaactggcatagtaatgctgtaaattgaatacaatttttagaaggttttgaggagggaggttcagaactgttctccattgatttgcttaacaaagatattttcattttccaccaaagggtttggctgtgaaaacctttgcagaaataatattttaggagttttttccccctgtactgtcaactgatttttagtaagcatatgactttctgtatgtatcatccaattgatttaaaaatgaatcaatgaatgtatttattgatcgcctgcctcgcttcacaaaggaatgtgaggaaggacacccaatttggcattgctgtgtttctctgtatttgggtcatgcattttttcttgctttccacattgaaaatgtggtggatgcagtagattggctttaagtgtcaggccttccctcatttactatacctttttgtgtttcacaagctggaaagctaccaactacatgctctagacatccttgctgctaatattctgcatgtcagattggtctcaccaatggcacgcagcaaagcaagatttgcaggtgctgttttcttgctgctggcaaatgcagccgtggagaccaccgttttttgcagcactgttccagtgtcctgttaattgttctgtcggtgttgagaggaggttggggaccaggcatggcaacttcctgacgccatcttcctgattgtgggcagcagccacaatcagcaatcttatctaggtagtcatccatggatgttcagctcagcccttctccagcctttccaatgatttcgaatgtccccaattccccctaacgaatccctttctgactaggagtaactagctgagtgctgcaatgaaatcctgactgacagatttgtaaactctttgcgggcaggaacccttgatataaataaatgaccttgcattttaatggagggaagcagaaggataaacaaatgaataagtgaaaagttttaataagatggtgatgcgtaaaaaataaagctggttaatggggagtgcaggaaatgagcgcagctgtcttgccgttttaatcagataggtcagagaaggcttctctactagggtggcttttgacctgcctctctgttaggtcaattgtgtgcgaggccctgatggagttactgtgttaaaatgcaatgattcaattactccattacttagataccctttaagtgacactacggttgtccatctccccgctattgaattgtttacccacagtaagcatggcgggaagagcttcgatccgacccttgaacgctcaataaaaatggcgacagcacttcctgtacttgccctcaacaaagatggtgtcaacacttcctgtttagggttttcgccattaacaaagatggtgcttatggggcaggttccctaacagtcaggattccggttgcagtttttctcccccgccccaaagatacgtggttgcagacgtaagtaacaggaatccatctttctttgaaagtcctgcattgtagcgtctgcgacctgggccctgcgggggcttccccgccccgctaacttgctccgcatttccgatccgggccaaggctgggtggctgcggcagtgccggaggcccgctctccccttggtccgctctttagttcattcccagcactccctctttagcgggtcaagttgccgcagaaaccgcccgtagtcttcctgtttgatacaagggtttcagcggccgaagcagagcctttttaaatagttcccaatgggcgctcacggccaaacgtgaacacctcccctcctcacctgtcacctcctgaactttacagggttgcgagggggagtgtgggatcgggtgtcgcctagccgtggtcgtactgcccgggtgtgtctgaagccccatctgtcatccctgcctgcc

SEQ ID NO: 10204 - DNA, 2300 bp, Homo sapien
aaagaaggtgattggtaatgaggaggaaaatgggaggcatatttacaataaatcaaaagcagaattgtgattaatgggctccacaatgattattaatgttctccctataaaatattgatgtttgcattaatttaaaagtacagactgggttttttgctttgttaaatgaaaaataatttttttcctattttaaaatgagaatgactattttaaaaacagaagactatgtccaagatctttccctttccccatttcaaaattatgagttttctttttgtctttctgaattcttgaaatccagtgacattgtcatagctctgagaaccaaaataatagaaaccactaactgtaggagacagccttgatgcttttgattatattttcctagaaagatttttatgatatttaatcttaatagctttttttttttaggaactcctctaatgccaataaatgagaatctaaatctcaggagtttaggcaaatttagcccatcagcatagcctaaaaacaggataatttaataaaacctaaataatacattagtttttaaataatatgttatatactttagatatatatatatatatcctgttaagattagtgggtaccaacctcatatctgtattggaaataagcagggtgcagatttttaaaaggaaaagaggctacactactactcaaagtctcctcaacatttggatgcaggagagaaatggaaagaaagtcgagttcatcagggctggtgcccatcccatggcactacacttcctcctatcccctgaccactgccaagtttggtcaggataggtggcttcgtgtctctacatagtcagatacctgtgtattttgctgggagaaggggaaaaaaaataaacaaataaaaataaaactctctattcccaaactccctgcatcctttcaaagtcacattttattaatggaaattaaaatgatgaagaaagaaaccattagtaacctaaatgataagtttccccttaaagacacattttaacaccaacaagaggactttcttctttcactttcttccttccttcctttcctcgtttctctctctccctctctttccttctttctttctccttccctctctctcttctctttttctttctagtcagagtttgtgacttactaattatttttattctgtttgaatagggtccctgttatcttttgtgattttctgaaatgaagttaagatttccattatttatgagaataaaacaggaggttgacactttacgcacaaaaaagaataaccaaaggttacaatgacatcagttttagtttttattaagggctggcgtgtggtgcagggggtggcggtgggagcggggtgaggcaggtgtgaggaatgagtttgtttcttccaagagaaggatttgctttggtcagtgttgctgcagtcccagtgaaggggcctactctgccagctcttctgggtagacttcataacagagtgggcaggctcaattctctaggaagcctgatgatggcaactgcatctcatggaagaattccacaaagggttaaattagggtgagattgtcaacaggcttcaaaaaggcagagttccagggcccatgcctgaggtctcatgggcctccttcaggtcctcatccccacagtctgacacttttggcccttctcttctccagctccccaccccattcttcggccagtccttcctttttcctctaaccctgcaaaaaatgagcagcgctgttgttttgttccaactgacaaaacagctaagaaacagcagaacatgactgccctttgcaaaatgggccatgtgatcctcctagctcaattcaacacttacagtaaaaacgaatagaaagggacctgtttatgaaactctcctgcttgcctttggaatactctcatcctctcccttctcagcctcctaaatacccaagtgaatttatataatgagctttattttatcaccctgaaattcttcctcagtccaaattgctaatgtggcaggttccagctgcccaaattccctaaacaacattgcctgttccataaaaagcatgcaattacaagcacagcagtcctgctctggttcttagaactataaactgactacacagctccctggcccgggaaggctatgaaacaggcaacatggacaatttaaaggtgtacaacatccgaggttccatttcaccctcaggcagcacggagtggacaaggtaaggccaccctccacttttcttctggctactatattgattctctggaaactctctctgctccaaaagaaacca

SEQ ID NO: 10205 - DNA, 2300 bp, Homo sapien
tttaggcctttccccttcttcctcccctctccttatggacactccaacaccatcatcacagcacaaagggcaacctcatatctcgtgggaaggcattttctgcctcctgccaggcaaagataatgttatccaattgcaaatgaaaggcttatgaatgaaaagatgaccactctgactttagtgtatgagagccactgctgaaatgataggatccttgaacttcacatctagagcagaaactcacacttctcttcttctccctccacctcacccttctttccttaagccttccagaactcctgccatatccctcagcactggggagaacttgaagcactgttggagaagtttgaaacctgcaaccttcggcaggactcagcatgggacaaaagccacctcattcctttcccttcccaaaacagcatctcgagctggggaacttggagggaaggaagaaaggggatagcagccaattgccctccctggggcctggggtctggaaatagcctgggaaggaacagagatcatttcccaacgatccatagaggtcctcagcaccctccactcctatgcaccccctggctcatctgccagactgtaagggtgctgatggtgcccgcagctgccccgggaagctgggaggcatttgtgcatcctctgggaagccccattccgagaaatcatgaacctattccccagtgggcaatgattccctgtgcttcagaaattcttggcggctgtgggggcaacccagctgttattcaccctctgggtgaggtggtgagacctcagggggtccaaaggataaaagtgggtaatgatgagacagatggagagcctcgagggaaatacggggacttgggtctaatagtagaaagcagggcgggggctggttggtgcatttaacttgaggaacttttcagtctcactacagagaatgatctctgggggattatggcaatggccacaggtggcacttaactagagccaggtatgtaagaggccctggggctagatatggattcgaatctcggctctgatatctaccagcagtagaatgccagcacgttccacaacctttctataaccattctcctggactactaagtagggatgacaataacagtcactaattaatagggctgttatgagaattatgagtcttaacccatgtggtgagttcacaagcgcacccggcacgtagtaagtgctcagtaaatgttagccccgctcattaggttagatggtgagcagaactttccaagtgctaggcttgagagcctgggactctgttgccaagggagattagagaacctttgcaaatatgggcgctccggccctggggattgtccagaacgagagtgtggcgcctgcctttctgccacctcactcatccgacccggggaaacccacaccctgtcacaggggcgccttggtccccggagtctccggctcggccatgtctcccgcgcgcctccccggggcctccctctcgccgctccacacctgtcagccgctctcgcagcagccctgtggcccgagcccggggcctcagctgcaaccccttcgcaccctggatcctcgctccgcgcgcctggcgtatccccgacccggctgctgtcgtaaacaaaaccgggcgttggagcagcaccgcgggcggacgggcgcgggagcccgctccgtgcgccgttagcgcgccccgggagccccaggcgagccaagggggcgatggtggcggccgcggcggccgcggcgggcggctgagctttgttatgaatagatgaaagaggccacctacacagtaacccaaattacgagacctccctcctccctatctcaccgaatcaagaggggaggggagatgggcgtggagggagggcgggcgggcgggcaggaggcggagggcggaggaggaagagaggatgaggaagggggccagttgcatcccactttcacaatgggaaagtgaaacgcacaagcgcacccaacctctccagccctccccgcccgcctcgctcctctccgcccgtcccctcccttcccctccgcgcctccccgcgagcgccagcgctgcacacaggaactctccggcgaaggagggcgaggaggaaacggtgccggagcgcgcagggcttgctgccgccaccgccgctgcacaggctgccggagcgagcctgccgcgcgccgccctccccgctctccttcctgggcgagctgcggggatggggcggccgcgggagcccgagcgcgcgcaggaaccgccgccgccgccgcccgcgtctccgttgccgcgcgcctga

SEQ ID NO: 10206 - DNA, 2300 bp, Homo sapien
tacctgtgaataggccaggcacgctggctcacacctgtaatcccagcactttgggaggtcaaggtgggcagatcgcctgaagtcaggagttcgtgaccagcctgggcaatatggtgaaaccccatctctactaaaaatacaaaaattagcagggcatggtggcatgcacctgtaaccccagctactcgggaggctgagaggagagaatcacttgaaactgggaggcggaagttgcagtgagctgagatcccaccactgcactccagcctgagcgacaagaatgaaactctgtctcaaaaaaagaaaaaaaaaaaaactacctgtgaataatcagtgtttcattctcccagtgctgcatggaattctaaattgtatttcactattatttgagaatgttctaaatacagtccgcgcacttcatctgatctggaaagaaaacactcaaagtaaggggaatacccagcatactctgtcctaaataaccaaaggacaactcaaaaccatttgcaactctcaggagagtcctgtgtgacacttataatttaaagcattctggcctggtgcggtggctcacacctgtaatcccagcactttgggaggccgaggtgggcggatcacctgaggtcgggagtttgagaccagcctggccaacatggtgaaaccccatctctactaaaataaaaaaattagccgggcatggtggcacgcacctgtaatcccagctactcgggaggctgaggcaggagaatcgcttgaacccaggaggcggaggttgcagtgagccgagatcgcgctactgcactccagcctgggcgacagagtgagactcagtcataaataaataaataaagcattctaacaattctgaacaaactgagtttgaaatcaaacctcaatacaaaaggtgagtattaattctaaccacttacaggctaaattcataaatatggaaaattctaaatccaggtaactgtaggatagatacctttaattgtgttttagttaaatgtcagacttgtttacagacatgttgcttggtaacagaagcactgctttaacaacccactctgttttagagctgcttaaagtctgaacagattatgaagtatatatcatatacacgaaattcagacaagtctttccttatcctagagatctgtaagatttgaaagagcttcctcatttcagctaactaaaggctttacaaatacttagcagtggatattcttaagagcaaaatgcccattgattatggtcaaaagttggacactgaggattaaccaaagtatttaaacccagcatatgctaacatattttaggtgtttatctcagtaatgacagtcgacatcactgttcattcaaattgtcttcaaagccaaggaaaatggtagcatagctttttcatcgtaaattaagctggaggtacttaaacgtctggccaattaccaaactggctacacaaccaccaagccagagtgcatccaaaagctccatgaagagtttcacgtgcgtctctctgcctacttttctagcacgagcttccactactttaacaggaaaataaaaaaaggattcaagggcagtttgtggagggacaaaatgagtattccaaaatacaaacaagacaccgtccccagaaagagaggttacataccagacgcacgcacgctccttgcaacccgcacacggaaaacttaagtgaccgcagttctggccgcgctcgccaccggggacacctccacagctccaaccacaggcacccactcaactccgcttacggaggcattgggactaagggttacggtcctacagcggggtgtcggcccagcgagaggaagagggccgaacggacccctcgggctcccgtccctagggaaatgtgaagtatcccgggagaggtccgagggcggcggcggcggcggtgaaaagccccactcctccgcgtggaccgggatcctcaggggtgcggcgccaccccacgtgctgacgtatggcccagaagccgcctcatcgcaccgccccaccagcctggaggagcgggctctgtcccttggcccagcggcacgcgaagcaggaagtcccaccccccacgccgacgtcacccacgccaccgacgccggttgctgccggagccgttagagggaggagacaaacgaaccgaggcgggagcggccacgggtgacagcggcagcggcggggccgggctgcgctcccgaaggcgttcctggagggccctgggatggactcagagatccccagagccccaggggacggaaaatctagccccgggcacttgcctt

SEQ ID NO: 10207 - DNA, 2300 bp, Homo sapien
actggcacagctttaattaaaacataaaacacaactttgtttttgtaaaataataaattacaaaaaacaccaaccagataaaaagtccaaaagacaaaatgtaaaacacttgtattttgactgaccttcttccagatatttttgtacacttatattaacatatgtacacacatatattcacattaggacagcactgtacttgctaaactacattctgctttttttttcctgaggggaaactatattttttggacatactttaatgcaaataaagaactttccatcagtttttaatgggtcaagagtattccattgcatgtaccaatcataattttcttaactagtgtcctagtgatggacacttgtttctagaagcattatttttaaaaaaggtggcaaatagtatccttatgaatcccttattttccttagggtatatgcctcggaaatgagacagctgtggggcaaaggctaatgcatatgttaaattttggtaaatagggttgtaccaatttcaccttcacaccaaaaatgcctgacagtaattgtatcccacacccctatcaacaatgatagacaaaaaacaactgtttggaagtgggacaactttccgtttgttaattgaatatttgtttttcttggctttttgtatttttaatagatgggatttcaccatgttggccagggtcgtctcgaactcctgacctcaggtgatccacctgccttggcctcccagcgtgctgggattacaggcgtgagccaccgccatttcccgaatgatctttttcctactgaccaataatttgtcatgtatagtttactggctaccacagagatttctggagttgtctggctccagcgtttaaaagtaatggttttgggcaactctgtgaaatggagataacaattgcacctaccttacagaaatgttagagttaaataagataacctgaaaaagtactccagtacttgccacacaaatgctcagcaaatgtgagctactgttattatactaaacacgcacacatacatgagaatttctggattctctattctatctcccatgtctcatctatgtaatccatccagcaacattccattaccaactcgctgtcctttttttccctcctcttaagagacacggtcctttctaatggcccgttttccctcatttcaacaacaacaaaatcacctctcagttgtccaataataactacagcctgaaaatcataatcttgggggtaaaaataagctgtacttcacaaagcagtgagaatcaaagcccaaccaaggcactgaacaaacgctggggatgggaaggtgtctgtttcttccaacacgtattttgaaaggctgaccgcctactttgtttcagactttggatgatcatggaagttctcaaaagctagcaactcctcttccaactattgtttacagccttaagacaagtagttccccatgtgaccccaggtgggccctgaacttgggataaccaggacaggagacttggagcaggaggtgcgggggcgaggagggctctctcccgggcgattggtcctaacccgaggttccctcgtggcaagctgagccgactccccactcgtgggctgatgcccgaggcagacgcggcaggcaggcggcttcgggagcgcatatctgcacccatggggacgatggcaggctggcgaagggagagaggtggcggcaggactaccatttgaggctctcaaatggtgtggggaagagggaaggagaggcgcgaaaaggaggaaaacccctggagacgctgtgtcgggcggaggctagggagaccggcttcgcgctccaacgacgcgcatcactcagactccaaggcaagtgcccggggctagattttccgtcccctggggctctggggatctctgagtccatcccagggccctccaggaacgccttcgggagcgcagcccggccccgccgctgccgctgtcacccgtggccgctcccgcctcggttcgtttgtctcctccctctaacggctccggcagcaaccggcgtcggtggcgtgggtgacgtcggcgtggggggtgggacttcctgcttcgcgtgccgctgggccaagggacagagcccgctcctccaggctggtggggcggtgcgatgaggcggcttctgggccatacgtcagcacgtggggtggcgccgcacccctgaggatcccggtccacgcggaggagtggggcttttcaccgccgccgccgccgccctcggacctctcccgggatacttcacatttccctagggacgggagcccgaggggt

SEQ ID NO: 10208 - DNA, 2300 bp, Homo sapien
ctgtggaactgaattatgtatgccttactggtcagtctggttttaaaaatcttattgtagttttaaaatattcattttaagagttagaattagcaaaatgacctagcaaagaaagtatatacgtctcatatacggagtgtactattgacttaacatttggtttaaggcaagatccatttgctggaattcattatttaacatgacttaagacctttacttgaactgagccagaggatagaggctatgcaatattaactttgatagacactcttcctcttaaatattacagtagagttttcacagagtaggctttgactagcctttattaggctgacaaaattctccctcttttccaaaccccactgcccttttctctccatcccacccccaacacagagttaaatcaacaccacttaagccacatagcaattttgagatctttgcatttgttatttaatgtcaaaagcaggaaacccctggtcccccagaacagtctggccttagtttttcatatgacttgtggcaattcaaatatttgagaatctgtgcctacaaatatggtcaaaagggatttaaagatgagtgacagcaagaaaacttataatctgctgcaaaggttaagtactcaattataatacaaagcagtatatgatcacaaaagggcaagaggaaaatattaaatctcttctgtttgccatgacatcatgtccttttctgatttcattaaatcccaaaaggaatttccttaggtgagaccagagtcccaaaaaggttaatttacttgccccaggtcgtatagctgctaagaggcagaagctgggatttgattaggtctggttgtctatgcttgtctcctcagagagttgcctaaggcgctgtcaccaatgggctccagtgctgtttcctctgtccctttctctctctgttcatcaggacgtctgtgtttgaaggtcccataggaaccttaagtttatcatgtctgaggctgaaaattcctcttgcctatcttgtgaataagcttagctaccagaaggaatgaaacagaagtggggttttccttgactcgtcccttcacccccacatccaggtggtggcaagtcctctcattccacctccttcatagacctctcacgaccaccctacatccagccttcaccagctcttgccatagattgctgcagcaggctccaggctccagttggctccatggaaatgcattttccatcttgctttctcagaaggacttgtttaaaacaggatgtgatcatcctaatcctctatgcggctgccaagggacctacaggatgaaccccaaacacctctgtatgagttaagtgggaccctccgggtgtgacccatctgctgtcccagtcttcaactgcaccaagtcctccaaatctttacttctctgtctaactgattcaccttctgacaagcctttctgctttccattgactttttcccctccccctttcctcttatctcccccttagcagctccttccaagtgctcgcttagcaccaagtactctcctgacacttatcagtggctgtcattgtgtctctcccccggccactacgccaggaggcggctatgcccctttgcctccccagcacgcctcgctgcgcctgacactaggaggcacccagcaagtgtctgtctcatgaatgaatcaacagagagtctcctgactgctcactgtctttaagccacttcccttcccttggtgctggctggcccctttgctctgccttcatcacattggtgtttactgtgcccagtccactgctggcatttgctctgcctaacaaggtttgttgagccgagcccatttccttattggtaaagagagagtaccagactgaatgtcctcttgcaatcccagagtcggggtgattgatagcaggcgcccttctagtcgacctccctgcaaagatatagaatgtggatctcttctgctgactgcacaaagagcccatttgtacagcaatgtgttgaatacggtgcattattactgacatttgtattgggtacagtgcagggcgtggagtttctctgagacaaacacaggaataccccgagataatgtgagcagtatctccaaagtccaggctgagtcatatggtaggtgctgtttggaatatctagcctgcctgccttgcagattcaaatgcctcgggcaggagggtgagctagctgccgatcctgctctgctcctgggtttgctgtgtggcccttggtaagtctcttcacaactcttccgtttcagccagagtgtgtaaatatgtattgtggagctt

SEQ ID NO: 10209 - DNA, 2300 bp, Homo sapien
atttcttcttaagttagttttaaccctttctctacaaaaaaatatatttttaaaattagccagaaatggtggcacacacctgtagttctagctacttgggaaactgaagtgggaggatcccttgagaccaagaatttgaggctgcagtgagctatgattgtgccactgcaccccagcctgggcaacagataccctatctctaaaaaacattttttaaaaaattttactttctgaatagttaatatatgcccacagtataaacattcaagtttcaaaagtatacacagtgaaaattagatctctctccatctctgccttctagctacctggttcccctctcttggcatcaatttcttgtctgtttccctagtttcttatttatcctcccagatatatgtcgtgcatgtagaagcacataacatatattgtttttacataaatggtggaatgccatatatattatcctgcacattgctttttttccactgaaccatgtatgttagatttgcttccaaagctattcatagagggctgcctcatttctattccagttacctaatattctattggatgatgtaccatcatttatttacttagtctccttctgaaggataattaggctattctgtctttacagtggccttctaagaagccagtgtgttttgcccatcttcaatcgctgcttcaccctgatgtcagatataccttctccttaaacttccattcccatgctatcatttccctgttcaagaatttccaacagctacccagttcccacagaataaggctgaacttcttacccttgaacgaagattctgcatggtctctgccttcttttccatcatgtcttcctgttcctgaggacactccccaaaactgatgacttgaggttttcccaaatgtacctctgattttaggggctccaaagttttcttcagcctgctctaccgtcccctttgaaccctatgagggaaatccttccctccccctggactggtcacactgggctccaggtcctctctggaacagctgcactttaaatatttcagcccagtctcccactgtacaccctacagagccagaacaggtgttttgaattttgtttggggttactgatatttaaattgttcaccaatggtccttcctcttctaaactccaaattccttgtgggcagggactgatgactgggaatggggaatactaaaatgaaaagatatcctgacttccaagtagcttaaaacataaaggtaagctgggcacagtggctcacgcctgtaatcccagcactttgggaggctagggcaggtggatcacgaggtcgggagatcgagaccatcctggctaacatggtgaaatcccgtctctactaaaaatacaaaaaaatttagctgggtgtggtggcaggcgcctgtagtcccagctacttgggaggctgaggcaggagaatggcgtgaacccgggaggcggagcttgcagtgagccgagattgcgccactgcactccagcctgggtgacagagcgagactcagtctcaaaaaaaaaaaaaaaagaaagaaacataaaggtgagccagatatgcaaaattaaaatacacaacacagtaggatcttagtttaagtggaagtatgctctatgctcagggcaatcatggtcggggggagtttttattttatttcatttttttactttaaatctctggtctctagtccagcgtctggtacatggcagctgcccagtaagtgcctgttgaatggagaataacataaaaagaggcatttaaggcaagtgtcaacttcttgcagtaacagtcaccttttatatataaaataagtcaacagatagtgtagtgtggatgtcgcttatcttttggggagaaagagggctgtgtgggaggggatggaatcaactttcagccagggagggaggcgaagacattgcctcccgggtcgggggtgggtggggggtccaggcggctgcggggcgcgggagaggcggggagaagggaagggggaggagactctcgcctcctgccccgcctcccccaccccgcggcggcggcggcgcagggcggccgcgcgggtgttggcaccagaggcaacagctgcagcagccgcgccgccccctcgcccgcggctcccagggtgatcccgagcacagccggtggctcgcggcgcggcagccccagaagacgggaaagttcgcggccggagcgcggagatgccgggcagcgacacggcgctcaccgtggaccggacctactcgtaccccggccggcaccaccgctgcaagagccgggtga

SEQ ID NO: 10210 - DNA, 2300 bp, Homo sapien
agagtaaagaagggatgataggaaaaaaaggtagaaagtgagtgtatggtcactaaataagtagagcataatttaacttcaaaaaattcaaagacatgtctagggtcatatccacaggggttagtgagaacataaaagcaaaacgtattataaaccattaggtacagtatggctccaactatgttaaatattcatacccacatgtatatacatacttccagaagaaagtgaaataaaatgcatgaaacattaattctctgggcactgggattaaggttgatctttattgtcttctttattacttttatttcccaaattttccacaacagacatatattgctttagaaatcaaaataaatgtgggttttaaaggctgtttttatttttttatttttatttttatttttttgagacagggtttcactgttacccaggctggaatgcagttgtgcgatcacagctcaccgcaatctccacctcccaggctcagaagcaatcctcctgctccagagcccccaccacccatagctggaaccacaagtgcatgccaccacacccagctaatttttgtatttttgaagagatgaggtttcatcatgttgcccaggcgggccttaaacccctggacccagagccatctgcctgcctccgtctcccgaagtgctcacaggcagagccgcagcgcccagcccaaggctgttttttaaaagaagaaacttgataccaggccaggcctcaaatggcaaaagggctattaggtagaatcccaagaggcaggggctgtgtttactcagacagccaagggggaagtgcctgtgtctgggaagagaacaagacttagggggaagggggaagcttaaccacgaagcttatgcctgagagcatcaggccagggaaggactctgtaaaataggaataaattccaaaagaaaataaaacagaagtgacgacatcagcagtccctagttaaaagaagaagaagaagaaagagaatcctggagcaagcctctgcgcagataattttttttccctggctggaacagaagatcagtcaccaaaactaaaaagcaaaagatccaagtggctgaaaaaaggaattatgggctcccactggggacaagacttgcctggaagcccatctgagggcttgctgccctatccttcacatctgagattatcccctgatcccagccaagaccagggatttcctgctttttggcatccagatgcgagaaatagatctgctgactctgagatcactgactgacactagccagggcccagagagaacgccgccgtggggtctaagatcgagttcacctggcatctttctcggcacgtatcttcctggcttgtcctcagtctccactcctctcagtttgagttcccacctcacctcttttgcagagattccttgtagctcatatgaaggagtggacagaagacacagaacagatagcagagagaagtactgggggcctcccagctcttgttcagggccccactttcctctgacaagcatgttaaggtttatccagattatccctccagttcccctatttcacagatgagggaaatgagacagaaaaagggggactgtatgtctgtgcccatcaaagtcagatgaaatgatacactgtcttaagaccatctgattcgggaccttgcctgaggtcacaaatctttgtagtgacagagccaggacaagcacataactatcctaatggctgctccttccttcagcactgtggctgcctacgagctggactgcagtctctactgctcactagaaaagttccagtcccccagcaggcacaggggctccagcagccgcggcgtgtccttgtcctccttcggggggctacagcggcatcctgtctgggtccaacggattgcttgcgggcaacgagaagctcaccatgcataacctcaacaactgcctggcctcctacctggacaaggtgcacgccctggaggcagccaacagcaagctggaggtgaagctccgtgactagtaccagaagcaggggcacaggccctcccacaactacagccactactacaggaccatcgaggacctgcgggacaagattcttggtgccaccattgagaacgccaggattgtcctgcagatcaacaatgctcaactggctgcagatgacttctgaaccaagtttggtttgagtgtttgggtgctggatgaggtgaccctggccaggactgatctggaggcacagatcaaaggcctgaaggaagagctggcctacctgaagaagaagcatgaggaggaaatcaatgcc

SEQ ID NO: 10211 - DNA, 2300 bp, Homo sapien
ataaacatttctccaaagaagatatacaaatggccaacaagcatatgaaaacatggttaacatcagtaatcaggtaaatgcaaatcaaaaccacaatgaggtatcacctcatcatccattaggatgcccactgtaaaaaacaaatgaacacaggttgggcgtggtggttcacgcctgtaatcccagcactttgggaggccaaggcgggtggatcacctgaggtcaggagttcaagaccagcttggccaacatggtgaaacctcgtctctactaaaaatacaaaaattagccgggggtggtggtgggcgcctgtaatcccagctactcgggaagctgaggcaggagaatcgcttgaacttgggaaggggaggttgcagtgagccgagatcgcaccgctgcacgccagcctgggcaacagagttagactccgtctcagaacaaacaaacaaacatacaaacaaacacagaaaatatgtagtgttggtgaggaggtggagaaattggaacctttgtgcattgttgttagtaatgtaaaatggtgatgctgccatggaaaacagtatggggattcctataaaaataaaaaataaaatttccatatgatctagcaatccacttctgggtatatatccaaaagaactgaaaacaggatcttagagatatctgcacacccgtgttcactgcagcattattcacaatagccaagaggcggaatcagcagaaatgtttatggacaggtaactgggtggcatatacatacagtggaatattattcaacatttataaaaagaagaaaatcctgtcatatactacactatggatgagccttgtggatatcatgctaagtgaaataagccaggtcctaaaagacaaacacctcatgattctacttatatgaagtatctaaagtagttaaactcttagaaacagaagtagaatggtggttggcaggggatggagaaagaggaaaaagttgttccatggatataaagtttctgttttgcaagaagaataagttctagagatctgttgcgcaacaatgtgcatgtggttaacactactgtacacttaaaaatggttaaaatggtaaattttatattttgtgtttttaaccaccactaccaaaaaaaaaaaaaaaaagctagggaactaaattgttattttgaaaacacacataagggaaagaatcggctgggtgtggtggcttacacctgtaatcccagcattttgagaggctgaggcaggaggatcacttgaggccagagttcaaaaccaacctgggcaacataacaagatgcccatctctaaaaaaaaaaaaattagccaggggtggtggcacttacttaaatgggaggactgcttgagcacaggagtttgaggctgcagtgagctatgatcacaccactgtatttcagcctgggtgacagagagcctgtctctaaaattaaaaaacaaaaaaaaagtaagagaatcaagcacccatactgcctttcctacattaattgtatctcaggagccaaatagttgaagggaggtttctctttgtagaagaattgtggttaacaaatgaagtaatattgaaattttttaggctcaagcgatgctcccatctaagcctcagcctaccgagtagctgggactacgggcacgcgccaccacatccagctaatttttaattttttttttttttttgtagagacagaattctcgctgtgttggcgaggctggtctcgaactcctgggctcaaacgatcctccctacccggcctcccaaagtgctgggattacaacagtgagccaccgcgcccaccagagccaattatttttagatgaggaaactgaaattcccaaagggggaatccccgtgtgagaaagcctcgtgtaggtgagctttccagcatatgcccgccttctagatttaacctctgaaaactaaattttaaggtacctttgcttccaggggaaaccaattctgcctacttgggaagccagaacatgaccgcgtaggcaagacctagctctgcgcacgcgcagagccaccacgtctggcgttcgcgtgagaaccttctgggcgtgggcttcctgcggctgagtggcagcttccatccggtgggttttgctcggcgcacccgggaggcggggccagcgaggcaagatggagttagtgcaggtcctgaaacgcgggctgcagcagatcaccggccacggcggtctccgaggctatctacgggtttttttcaggtaggcggccagagccatgctcttggcctctggggctggactttcgctggctgatttct

SEQ ID NO: 10212 - DNA, 2300 bp, Homo sapien
actgcctacagtattcagtaacatgctgtacgggtttgtcctaggtttgtgacttaagagcaacagactacaacatacagcctaggtgtgtctaggctagaccatctaggtttgtataagtacgctctatgatgagagtaaaatgaaattgcctaaggactcatttctcagaacatatccctgacgtgactatactttcataattttcacctttgggaccagcttatggtattggcaggggtctcccttaaaaccaaaccaaatacacaacaaataatgctaaaaggtagaggttggaaaaaaaaaaaagtttcactctcgcccaggctggaatgcaatggtgccaacactggaccagactcctgggcttaagcaatcctcccacctcagcctcctcagtaactaggaatacaggcctgcaccaccatgccttttttttttcttttttttttaagagatggagtctcactatgttgcccaggctggtctcaaactcctggcatcaagcaagcctcctacctcagcctcccaaggctctgggggcagaagccactgtgctcagcagaggtggatttttaatgagggataaagcatatttttacttgttagggattgtttcatgccttgatctctgtccgtctgcctagttccagagagaaataacagagatgttctcattcccagcaaacgtttgtttttccttccttggatttctgccctgagtttgtggctgctttcctacagtgccgacctaagctagataaaatagaaatttcatgacaaaacaaaggagatttaaaaaaaaactagaaatttcaagaatgcttcaaaatctaaagcgcagagtactttgcacacagggcagttattcctgccacaccttgccactacaggtggccactgtcagaatgcgatgttccaccaatgtctcttcatttcacaatttgaaaaattttttttgtggaggcagggttttgttatcttgcccaagccggtctccaactgctggccccaagtgatctttccttggcctcccagcagccacttgcctggctttcatttcatacatcattattgaatagcaggcattgtcctatgtgcttggtaatacatcactgagcaaaacagacaaaaaacggccattgaggataatcctcaatatataataatatatatattatagagaggatgtggaatatacatatatatgtgtgtgtgtatatatagagagagagagaaagactcattgtgtcacccaggctggagtgcggtggtgtgatcttggctcactgccgtcttgactcaggtgatcctcccacctcagcctccaagtaattgggacgacaggcacgcgccaccaggactggctaatttttttgtagagacgggttttcgccatgttggccaggctggcctcaaacaaccgggctcaagtgatccgtccgcctcggcctcccaacttgctgggattacaggcgtgagctaccgtgcccagtctctagtgattatattcttgccctgtttagccattatgtctctttactcacaacagtttataagtgaaactttgccttaccatttgcatgagtcggcctcagcttgtcattatatataaagcttactaatgtaaatgacgagttaatgggtgcagcacaccaacatggcacatgtatacatatgtaacgaacctgcacgttgtgtacatgtactctagaacttaaagtgtaatacaaaaaaaaaaaagtttaaatatgattggactctaccccagagcccagttttccagaaattagaaacagatatgcctaagacccagagggttatttattactcaaatctaaaacgttgactcaaaacctcccctaatgcccacctttggcaaacgatgcttaaacctttgcacgtggcttcaaaaattacctggctgggaacgcgtagctctggcggggcactctgcctccaagccaaaagggggcagtggactcacagagccgctgctcggccctccgatccctccaccccaccctgggaacgtcacgacctcctctcgccgcttctccccgttgctaatgcgcaggcgctggcgggatagcgcgccgccgagccgagaaagaggtcacgaactctgaccccccagaaatacccaaacacagaaagctctctccgccgtgaatctcgatcccacatcccgtcggctttcttcaacctctcttcccggagcgccccccaatccacgagtggcagccgcgggactgtcgcgtcggcgcccgacgccggagtcagcagggcgcaaaagcgcc

SEQ ID NO: 10213 - DNA, 2300 bp, Homo sapien
ttttaacagttttcaagtttatagttcagtaatgttaagtacgttgacattcttgtgcaaccagatccccagaactcttttcaacttgcaaaactgaagctctataggcattaaacattaactctattctctcttccctcccagcccttggcaaccaccattctgctttctgactcaatgaacttgattaaggaacatgtcttaacttttaatttaacttcttcttttatcctaacaattaacttacaatgatggatgggaaatagaatttatatttccctttagataaataaataacatggttttggtgccaaagttaagaaaaagtaataacctgttcagagcatgtgtcagccaaagctttgacttttaactcagagctgtgagggtggaaccctgatttaattagagataaaatcacaagtcccctccatcagtttggagtaaaatttgcgtactgtattttagtacttctctgttttgaagcttaaaagatcggtgaattccagtcacacaaaactagaagtgaaaagggttttttttgtttgtttgtttttgtttttgttttgttttttgagatggagtctagctctgtcgcccaggctggagtgcagtggtgtgatctcggctcactgcaacctctgcctccgaggttcacgtgattttcctgcctcagcctcccgagtagctgggatttcaggcatgtgccaccatgcccagctgatttttgtatttttagtagagacagggtttcactgtgttggccaggctggtctcgaactcctgatctcatgatccacccaccttggcctctcaaagtgctgggattacaagagtgagccacctcacccaaccaaaatgaaaagtttttaaaatagtatggtattgctgatttctgatttgtgcaatagacaaataattaaattttaaagtcatctgtaattttttcttcttttcctctcctctgttgtctttgtgctatcaaaaaacaaagtgcaatgtaattgtggcaactgatgattgacccaggttttggtaagagtccagtgagttgtgttaccttgttagcaaaagaaaacggggagccataaggccaggagaattagtaatctgggttaatgatgcttggatgaaagatactttcttaacatgcattatcattataatttcataatcactctgtgtaccagatagtggtggtacatatttagaaaatgataaaagtctgagcaaatctaacaaaacttatcaaccaacttgcgctatgttagaagcgtgactcttttttgtagttcttaggatgcagggacattttcacttggcctttttgatgccacctcacagtaaactcttaggttggagaatgagggtgaggctcaggaatgggccgagatagatgtctgttgtacatactaaggaagagaggtttcaagggataaccaaatgtctttgtagtcaagccaaaatgtggttccataatcaaatgttcctataaatgctgtgatttgggggctatctttttataaggccattcatctgcaaaagacttttacattcttcagacttcttaaagaagggatacttagcaaggccgcttttcaggttatctttactttctacagttctccctgccaccaccattattttgactatattgaccacaaggctctgattatcatttgaatccaattcctggcagttgtatttccactgccttattttaggggccatgcatttccttcttggtccattgggatttgtttgtatttatcaatacaagtgggagctgctgagtagggtgggctctaactagcctaggacacagactgtggctaccacgctctttgagagggttgttaacaagtttttcctaggagcaaatggtttcagggactgcctacaggaaagggtggaggttggtggtcagtctggctggggttcactctcagtgtatctaacagctgtaccttaaaataaaagggagcctctctacgaatctccttccagagttgcttgatgtttaaagtttggcttcctgagcacttgaatctgggtcccttgcttcttagaaaacactgtgttaatttagatgccttctcctttcagatgagccctcgctgtgctaatctggccctcaagcactacctgctcaagccggttcagaggatcccccagtacaggctgttgctgacaggtgggcttctccagcattttgccaaccacccagttggtttatccatcagccaactcttcttgcctttatgaaactcgggtgcctctctttgtatatcacccccgtc

SEQ ID NO: 10214 - DNA, 2300 bp, Homo sapien
tgtgccactgcactccattctgggtgacagagcgagactcctttaaaaaaaaaaaaaaagtcatgatagaaataaaatataactggctgggcgctgtggctcacacctttaatcccagtattttgggaggccgagacaggcagataagctgaggtcaggagtttgagaccagcctggccaacatggtgaaaccttgtctctactaaaaaacaaatctttttttttttcttaagttaaaaaaaaaaaattggggcttatttgcttccgattttttttttttgagacagattttcacctcttgcccaggccagagttcagtggtgtgaccatggctcactgcagccttgacttccctaggcttaagtgatccttccacctcacccacccaagtagctgggactgcaggtgtgccccaccacgcctggctaatttttttaattttttgtagagacaggttgccctgtgtttccttggctggtcttgtgctcctgggctcaagtgatcctctcgcctcagcctcccaaagtgctaggattacaggcatgagccactgcacctagcctaattttctatttattaaaatatttttctcttagggttcaagtcaatacatattctttggtgttagttgactttctgaaataacatttttccattggcttttaacaacaattgatgaaatattttattttcacattcaagaaggtttgcatatctactatgtgctagtctgtgctcttaagtatgcagaggatatcacagtgcacaaaacagacatcctgctttcatggagcagacatttagtaggggaaggaccagataaatagacaagaaaactaccagaagcagtttctgagttgcagagacctgaaataggacgctgtggtagcaaatgaagcttgagtggtcagggaaagccctctgtgaaggtggcatatttacagtgatatctgaaaggaaaggagcagccagccagggttctatatttccaggcatgtagaaccattagtggaagtctgcatagtggaaatgaattccatgtctccaaagaagataaagaaggccagtgtggtgggagagaaatggggaagaggaagagaagtgtgacaggggtcagaaagggcaggcctttgtatgccaggtaagaagtttttttttttttttctttttcttttgagacattgtctcactctgtcgcctaggctggagtgcagtgggcacaatctcggctcgctgcaacctctacctaccgggttcaagcgattctcctgcctcagcctcccaagtacctaggattacaggcgcctgccaccatgcccagctaatatttgtatttttagtagaggcagggttttaccatgttggccaggctggtctcaaactcctgatcagaagtaatctgcccgtctcggcctcccaaaatgctgggattacaggcgtgagccatcgtgcccatccaaggagtgagtgagttatttatttatttatttatttatttatttatttatttatttttgagacagaatcttgctctgttgcccagactggagtgcagtggcacaatctcggctcactgcaacctccccctcccgggttcaaacaattctcctgtcttgggattacaggcatgcaccaccatgcccgactaattttgtatttttggtagagactgggtttctccatgttggtcaggctggtcttgagctcctaacctctggtgatctgcccacctcggctcccaaagtgctgggattacaggtatgagccactgcacccagccatggtaaacattttttaagagtctctccttgtgttgaagaatggtttggagagggcaagaatggaagcagggagaccagttagagtccaggcaagatgggatggtggcagtggaaatggtgaaaagtaggcattttgaggtatgtcttacaagaagagaaaaaaagataagttggcggcttagatgtggactctgcgtatcattgcatatgttcatcaatctctctttatatttttttgtgtatctcttctctatccataggactgaacaacaaagaattgctgatatctttgtaaagaagggaccatatctaaaaatgtattccacatacatcaaagaatttgataagaatatagccttgctggatgaacagtgcaagaaaaatccaggttttgctgctgttgttagagaatttgaggtatttgctactatctaatgttgaacacttctctttctttttgttgttgaagctttaataacaagttgcagtcattgaaaacaaagcttgcaaacaaagaaa

SEQ ID NO: 10215 - DNA, 2300 bp, Homo sapien
atcttttcgctttataggtctgttgtgtaaagcttttattaggttcctatagtataggagcagatctgtaccgatgcagcattgtataataggtgttagttaaataccttatatataatgtttaggaagaattgctacactagaaattgtagttatcttttaaatgtagtagaacagtggatgttaatgagggataaacaacataacctgtggaacttaaaagatgtacagatgtccaggatctatccccagaaactaactagttcactctagggtaggacctagacatgtgactttttaaaaaatagagctccgtgaaggaatataatgaaaattcccaaccaataactcttggagaaagaaataccaggtttattatgagccttaaataataccaaagaattaattttcagtttttaaatttagaaaatttctgatttctgtcttccttttttaatattgttttggggttctatctatcgaggtagacagatcattgatcattgatctgaagtttaaagagctgcatcctacatttaacttaggcaaattcaactttcagcacttggcaaatgaattgaagaacaactatgtgggtcccaaactgaagtcaattatctcattttttgtcaatgaaagatatgatgggctgggcgcggtggctcacgcctataatcccagcactttgggaggctgaggtgggtggatcacgaggtcaggagtttgagaccagcctgatcaacatggtgaaaccccatctctactaaaaatacaaaacttagccggatgtggtggtgcgcacttgtaatcccagctactcaggaggctgaggcaggagaaatacttgaaccctggaagcagaggttgcagtgagccgagatcatgtcactgcactccagcctgggcgacagggcaagactccgtctcacaaaaaaaaaaaaagaagaaaaagaaaaaaagatatggtaacagttccaaagctggagaaacaaactgtattggatttatttaaaaatgtacaatagacccaaagctatgtatggaattgaaagacaatttaaggaattttcaggagtaatattgatactatataatgtaacatactcagtaaaaggcaaggtcatattgttaaaaataaaaaatgctatcagatttaatcatgtatcattttgtgctttggttgttttgacatcaaattattattttttcctttctagagataaagaagccaccagtggcccccaagcccaagtttgttgtggcaaataataagccagccccacctcctattgcacctaaacccgacattgtgatttctagtgttccacagtcgacaaagaaaatgaaaccagcaatagccccaaaaccaaaagtcctgaagacctcacctgttcgagagattgggcagtcgccatcaaggaaaatcatgttgaacctggaagggcataaacaggaattagctgaaagcactgacaactttaattgtaaatatgaaggcaatcagagcaatgattatatttcaccaatgtgttcctgcagttctgagtgtatccataagctgggccatagagagaatttgtgtgtaaagcagcttgttttagagcccctggaaatgaatgaaaatttagaaaacagtaaaattgatgagactttgactataaaaactaggagtaaatgtgatttgtatggtgaaaaagccaagaaccagggtggggttgttttaaaggcaagcgttttagaagaggagctcaaagatgccttaatacaccaaatgccaccttttatttctgcacagaagcacaggcccacagacagcccagaaatgaatggtggctgtaattcaaatggacaattcagaattgaatttgcggatttgtcaccttccccatccagctttgaaaaagttcctgatcatcacagttgccacttacagcttcctagtgatgaatgtgaacattttgaaacttgccaggatgacagtgaaaaaagcaataattgctttcagtcatctgaactagaggctctggaaaatgggaaaaggagtactttaatatcttcagatggagttagtaagaaatcagaagtcaaagaccttggtcccttagaaattcatttagtaccatataccccaaaatttccaactcccaagcccagaaagacacgaactgctcgtctgttacgccaaaagtgtgtagatactcctagtgaaagcactgaagaaccggggaattcagacagtagctcttcctgtcttactgaaaatagtttgaaaatcaataaaatcagtgttctgcatcaga

SEQ ID NO: 10216 - DNA, 2300 bp, Homo sapien
ggataattcaaatgcaagaatcatgaacttccagtctgggccctagaaattgggtttacataaatgtgaaattacatgcttctgtgcctgttccttataaactgttaagactggaattgaaaactgatacatataagacacggttattttaaatacatttgacacctccaaaaaggaaagagctaaaactggctggaaggattttaaaatttccaaccacttttaatttaaatcaatttcttgaacgaaggtaaggcacagaaatgtaggatgaaaataatttaccttatgtaagtataaagcctccctttggcaaagaaaagagagtttataaagatatctcatataagtgcatataacatcaaaaaggaaagacccacacaacacccacttcttgctttcttttcctattggctaacttcttgtttcgtttgttgtaatctgatcacagggagcaatgcaacactacaatatatctaggctttagaaataatacaaatcagaacatttgagtgctgttggacagtttcaagttgcaagaattttaaacaaatgccaagaaaagcaatgaaaatttaatctgatacttaagtgctgattctggaagtaaccttgagaagaagctttaaactatttcactataaaatttctaatgaaagtttcaacgtggacaaaaacgtaaaataacccataacactctacttaatacataagttctggtttaaaaattaacctatgtacttacgaagtgaacgtaacaccactttggtaattattttgtaaaacagaaattgttccttaagaatgttcagaaacacaacgtctagaattgctgaaaatccacacaaagatagaggctttgtcatttggatgaaggggaaagaactatgggaggcagacagaaaataaagctttgtttaccctaatcaggtagaaacaaacaaaataattgtaattgggtgcagacaagcaaaaaaaaaaaaaaaaaaaaaacctcaacaatctcaactcctctgcttctcaggtaacagaggtaaaaccaccaggacatgacaatgtctacgcctctttaaaatgggtaaaaggtttaccagcagatacaaggttgaaagcgactcacttagtggccaaattgaacacgctgagaacactgcctttacctataataactgatctattaacttgggaatctacactattttcacatgcaaaggcgaagtcctcgcactgctggagagatgagcgaacgcccttcacacatcgcatttcacctggtgcagagcccccagcacagtcccccttggaagggagatcccgagaaatcccgggtttccaaacagcccctctgggcaggaaaagacgagaaagccggcagcgaatcccattagctccgcgcttgccgaggtgctcggcaaaggtacggggcacacaactcgcccaccccggcgaagaaagttgctcgcgagcccaagcctagcagcgctcgccacaaactttcccgcggcagcgcgagcgccgtcacttaccggctgcagaagtcatgattccccggtgcagctcgcttccccgctcggcccctcaatccatcttcccctttcagtccattgttcccacagttcgggtaggagagaaaagcccccgcagcgcccacattccgtcccgccgccccgcggcgcagcctgagcgccacacaaaggacgcggccgactctagcgaccctgcggcgctcccgggcgcgagccgccggggtcgggcgggcgagcactagcaccgccccgcagagcggcaggctgacagccaggcgcgggcacgagcagtgctctcttcggctccgctggcgcgtgcccttctcgggctccaaaaatcagcagtgctccgggcgccccctgctagtcgcggccgtaaaaggcagacaaaagccctagcctcctccaatcggagggctcgagcttcagctcgctcccgcctctctcgcttacacgctcactctcttctccaataagcgggctcgaaaagggggcgtgagcggcgaggcatattgggaattgtagttttctggacccacgggacgggcaggagctggagctccgtgccgcctgtactcccgccttcatttcccatcgtgctgaggcgggtggcatggcggagaaggatgacaccggagtttgacgaagaggtggtttttgaggtaagaggaaaatggcggtgggtgtggattgcctttgtttgagaaggacgagacggaaatcgaggaagcaaggcgttcccggggcgagggatcgggtgacgcgctccagctg

SEQ ID NO: 10217 - DNA, 2300 bp, Homo sapien
taggatgaaaataatttaccttatgtaagtataaagcctccctttggcaaagaaaagagagtttataaagatatctcatataagtgcatataacatcaaaaaggaaagacccacacaacacccacttcttgctttcttttcctattggctaacttcttgtttcgtttgttgtaatctgatcacagggagcaatgcaacactacaatatatctaggctttagaaataatacaaatcagaacatttgagtgctgttggacagtttcaagttgcaagaattttaaacaaatgccaagaaaagcaatgaaaatttaatctgatacttaagtgctgattctggaagtaaccttgagaagaagctttaaactatttcactataaaatttctaatgaaagtttcaacgtggacaaaaacgtaaaataacccataacactctacttaatacataagttctggtttaaaaattaacctatgtacttacgaagtgaacgtaacaccactttggtaattattttgtaaaacagaaattgttccttaagaatgttcagaaacacaacgtctagaattgctgaaaatccacacaaagatagaggctttgtcatttggatgaaggggaaagaactatgggaggcagacagaaaataaagctttgtttaccctaatcaggtagaaacaaacaaaataattgtaattgggtgcagacaagcaaaaaaaaaaaaaaaaaaaaaacctcaacaatctcaactcctctgcttctcaggtaacagaggtaaaaccaccaggacatgacaatgtctacgcctctttaaaatgggtaaaaggtttaccagcagatacaaggttgaaagcgactcacttagtggccaaattgaacacgctgagaacactgcctttacctataataactgatctattaacttgggaatctacactattttcacatgcaaaggcgaagtcctcgcactgctggagagatgagcgaacgcccttcacacatcgcatttcacctggtgcagagcccccagcacagtcccccttggaagggagatcccgagaaatcccgggtttccaaacagcccctctgggcaggaaaagacgagaaagccggcagcgaatcccattagctccgcgcttgccgaggtgctcggcaaaggtacggggcacacaactcgcccaccccggcgaagaaagttgctcgcgagcccaagcctagcagcgctcgccacaaactttcccgcggcagcgcgagcgccgtcacttaccggctgcagaagtcatgattccccggtgcagctcgcttccccgctcggcccctcaatccatcttcccctttcagtccattgttcccacagttcgggtaggagagaaaagcccccgcagcgcccacattccgtcccgccgccccgcggcgcagcctgagcgccacacaaaggacgcggccgactctagcgaccctgcggcgctcccgggcgcgagccgccggggtcgggcgggcgagcactagcaccgccccgcagagcggcaggctgacagccaggcgcgggcacgagcagtgctctcttcggctccgctggcgcgtgcccttctcgggctccaaaaatcagcagtgctccgggcgccccctgctagtcgcggccgtaaaaggcagacaaaagccctagcctcctccaatcggagggctcgagcttcagctcgctcccgcctctctcgcttacacgctcactctcttctccaataagcgggctcgaaaagggggcgtgagcggcgaggcatattgggaattgtagttttctggacccacgggacgggcaggagctggagctccgtgccgcctgtactcccgccttcatttcccatcgtgctgaggcgggtggcatggcggagaaggatgacaccggagtttgacgaagaggtggtttttgaggtaagaggaaaatggcggtgggtgtggattgcctttgtttgagaaggacgagacggaaatcgaggaagcaaggcgttcccggggcgagggatcgggtgacgcgctccagctggcctcgaccaccgaaccccagcgatttcagggcctagagtccgtcgtcgcctgacaggtgtagccagaggcgccctggccgtggccggcctctatctcgggcccgcccagaattcccagacggtgcccggttgccaggctctgggctggagcggtgtctcttccttcctgggaatggatgtgcggcgggggggactgcgcccggctggggcggggccgaatcgtgccttttagatagtcacaacttagcctcctccttttccatcc

SEQ ID NO: 10218 - DNA, 2300 bp, Homo sapien
gggatattataatattaatgttttcagagaatgatgaatgggaaaagattcacgataaagtcaagtgaaaaatatatacaaaattctacgtggtataccttttgttttaaaaaatatcacacacacattgtgtcttaatatagaggctaaaaaattacacacacataaacacacatttacatagaaataaagtctataagaacacataccgtactgttaatagttaccatctttgggtggtgggataatggatgattttaacttgggggcttattttctacaataaaatgttccttgagcatatattactattatattcagaaatcaaaaataatgggtaaaaaaaatacacccatcagttacccttactctagaaaatatttctctctccttcagctaccacattcaatctataaacattgcctcgattttaacttacaagtgtctgtccaagccattattccattacgtctctcatttcatctcaggcccttgtcttccctaatgaacgcctcatatctagactcttcacttcggtaaaatggccacattttccactgcttcttcattgcagccacatcaagccactttacatagccaccctccacaccccgccccctaaaaatgcacaccaggtactttcacacttcccaagcttggcataatcagttctctttccctgtaatacattttctcctgccggtttttctaatccaattcatagttaaagattcacctcggatatcgcgtactgggtgtagcctctgggaggccgcaagaacagaaattaatccttcaatgacagtttgtacatatttcaacatttagcattctgtcctgtctgtgcctcgctctctcgctgtatggcatgggccacttcatttttaaattttcttaaaatctagttggataaatgaaagtaaagcgtatacatgcaatacacatacgtacaggggtgcgagttttgacctgtgtctgatggaaaaaaatggcatcaaaaacactcgcccgatttttttcattcaagatggcagagaacgtcttaaaatagtcccacacaaaagcactcacatctagagccccgagtcagaagaactggctacacctagcgcaacagcaaaggacaaaagaatcgaatctagatgctgagatgccctggccctaactacccacagtaggtcccacaaatagactttaaaccgtgttagaaaacgggcacctgctgccttcattccgagggccacgccttgacggtgaacagtgacctgaagcactctggatactgacccaaaaaaatcgcggatggaaaaggaggaggctaagttgtgactatctaaaaggcacgattcggccccgccccagccgggcgcagtcccccccgccgcacatccattcccaggaaggaagagacaccgctccagcccagagcctggcaaccgggcaccgtctgggaattctgggcgggcccgagatagaggccggccacggccagggcgcctctggctacacctgtcaggcgacgacggactctaggccctgaaatcgctggggttcggtggtcgaggccagctggagcgcgtcacccgatccctcgccccgggaacgccttgcttcctcgatttccgtctcgtccttctcaaacaaaggcaatccacacccaccgccattttcctcttacctcaaaaaccacctcttcgtcaaactccggtgtcatccttctccgccatgccacccgcctcagcacgatgggaaatgaaggcgggagtacaggcggcacggagctccagctcctgcccgtcccgtgggtccagaaaactacaattcccaatatgcctcgccgctcacgcccccttttcgagcccgcttattggagaagagagtgagcgtgtaagcgagagaggcgggagcgagctgaagctcgagccctccgattggaggaggctagggcttttgtctgccttttacggccgcgactagcagggggcgcccggagcactgctgatttttggagcccgagaagggcacgcgccagcggagccgaagagagcactgctcgtgcccgcgcctggctgtcagcctgccgctctgcggggcggtgctagtgctcgcccgcccgaccccggcggctcgcgcccgggagcgccgcagggtcgctagagtcggccgcgtcctttgtgtggcgctcaggctgcgccgcggggcggcgggacggaatgtgggcgctgcgggggcttttctctcctacccgaactgtgggaacaatggactgaaaggggaagatggattgaggggccgagcgg

SEQ ID NO: 10219 - DNA, 2300 bp, Homo sapien
aatcctgctttttctaactgagtgaacccgtttcctcatctatggaattggaataaaaataataatgataatgatgataataataacttttattgttgtgaaccttaactgagaagatgaaagtaaaatacttagttaagattttgccacatagtactttaactgtgttgctcttttttttttctgttgttttatctctaaaacctaattatagtcttttttttttaattattattatactttaagttttagggtacatgtgcacaatgtgcaggttagttacatatgtatacatgtgccatgctggtgtgctgcacccattaactcgtcatttagcattaggtatatctcctaatgctatccctcccccctccccccacctaattgtagtctttttggagatttaaatatttcattgaatggaatcaagatttattatttttttttttaattttttaatttttttttttttttgtgagacaaagtcttgctctgtcacccaggctggaatgtaatggcataatcccggctcactgcaacctccacttcccaggttcaagccattctcccgcctcagcctcctgagtagctgagattacaggcacctgccatcatgcccggctgatttttatatttttagtagagacagggtttcaccatgttggccaggctggtcttgaactcctgacctcagatgatctgcctgcctcagcctcccaaagtgttgggattacaggcgtgagccaccgcccccagccaagatttatttttaaacatgtcaccaactgtatgctttagagaaggttgaaagttaaaatttaagcttgctgttcagaaatagttgtccagtagattttcatccagtagtgacattgatatttctgtttgatggggttggggtgatttttttttttttttggtctgttctgaaaatctgtgctgtttccacatagcttatatatagttaaaagtataaatggagtgcttactatgtggcaaggactgtcccagatgctttatattaatttaattttcataagaactctatgaactaagtgctattactgctatttttagatgagacagctgatgcacaaaaggattataaatttcctggttacttagctagtaagaggcagagtcgggatttgaatctgtagattggtttttgtttgtttgttttgagatggagttttgctcttgtcgcccaggctggagtgcagtggcgtgatctcggctcactgcaacctttgcctcctgggttcaagcgattctcctgcctcagcctcccgagtagatgggattacaggcacaagccttcatgcctggctaatttttatatttttagtagagtcagcatttcaccatgttggccaggctggtctgaaactcctcacctcagatgatccacccaccttgtcctcccaaagtgctgggattacaggcatgagccactgtgcccagcagattgtattcttaacctctgtgttctaatgcttttgttagccatactgtgttctatttgtcatatgctcgtatgtaagatatagcttatctaaggtaacattattgaagagttttaagtttgttcacagtgctgagcatatggtagataatacgtatttgtgcttgaatgaattaaggaatatgatgagatgataaaaatattataattcatacaatataatcattgtttaattattcttggctttgagtaataacattgtcgtttgagttatctataacattggctattttgaagcaatctaagactataaaatttgggacagtgaaattgcttaacaatctatttatattcctaaattcattttttcttgctggtactcactcaaaaaaaaaatctgtgtgttttatttagagtttttccttttttgggttcctctgttgaattgtttgttgatttgtttgtgttaaatggcattgtattataacagataattcagttcttatagaagaagccttaaagaatttggacatactggtcacaatagtgaagtctggtattaagtttggcccccgaaacttttgaagtagtaatgatcttgaaatttgctttattttgtgtctttttcagaattctccactttaccaatacttacaggatctgggacacacagactttgaaatatgttcttctttgtcaccaaaaacagaaaaatgcacaacagagggacaacaaaagcctcctacaagagtcctaccaaaagtaagaacgcatgctcattctttctggccgaatcttttgcactttaccttactggctattcagatacttctta

SEQ ID NO: 10220 - DNA, 2300 bp, Homo sapien
ctgcctcagcttcccaagtagctgggattacaggcacaggccaccacgcccagccaagttttgtatttttagtagagatggggttttaccttgttggccaggctggtcttaaactcctgacctcaagtgatccgcctaccttggcctaaactgctgagattacaggcatgagccaccatgcccgaccaatttttttcctaatttggggagagctaaattttagaaaacttgttgtattgtttagctcattgtcagggaatgtatgtttagaattgctcccaaaattctgttcaaggaatgaagtatcaattatttcctctgaaaagctgtttttctatgagttcttaatgaaaccatccttagcattaattgctctctcttttttaactttatttttgcatatgcttgttagtagttgttaagtagtctgccctgatattcttactatgaatattcattctgtctctttttctggtttcttttcctgtgattattcttaaattcattccatagagttttagcagcaggcttctcgttggcttgatatcttctctggggatctcatctactttcttgccacttatgtccattctccaggctttgctgagttccaggtgcttgttagacattttcttctacatgtgccccacaaagctcagattcaacttgtctaaaataggacttcctcagacacccccaaaacaaacaaacaaaaaatgttccttttaatagtcccaaatcactaccccctcagacacccccaaaacaaacaaacaaaaagtgttctttttaatagtcccaaatcaccaccctctcagttaccataccatttccaatcgcgctgacatagccttggtcatcaagtgatacatcaagtcagcttctgtgtctcttaaatctaactcttattcatgatcttttttgtactcattacctaacttaaaggcctttattgttatttagctgagtgattaattttcttttctcttttttgagatggagtctcgcgctgtcgcccagccttgagtgcagtggtgcgatctcagctcgctgcaacctccacctcccgggtgcaagcgattctcctgcctcagcctcctgagtagctgggattataggtgcccaccaccacgcccggctaattttttgtatttttagtagagacggggtttcactatgttggccaggctgatctcgaactcctgaccttgtgatccacccacctcggcctcccaaagtgctgggattacaggcgggagccaccgcccccggccttgaatatccttttaatcatgcttcttgtctacaatcataccctgccagtttagcccctgcactattgccaattatttttctttattgtttcgcttccttgcataaaaatctttggtagctcctcacaccctacaggataatgttcatactattatggtgtgtaagtctaagatcctttaaaacctatctcagtgtacctttttaacttccttactaatcccttcttctcttgggtcataactgtcctggagtgcgccaccatccccatgacatgtgctttaatggctctttccttcatcctcttcccttgactgaagtgatcttctcttttttttttgagatgcagtttcgctcttgtcacccaggctggagtgcaatggcgcgatctcggctcaccacaacctctgcctcccgggttcaagtgattcgcctgcctcagcctcccgagtagctgggattacaggcatgcaccactatgcctggctaattttgtatttttcgtagagacggggtttctccatgttggtcaggctggtctcaaacccctgacctcaggtgctccgccctcctcggcctcccaaagtgctggggttacaggcatgagccaccgtgcccaactcgttcttcccttctttgttaaattcctactcatccgttaggactgaactccagtgttagctcctctctgacctcctcttttccaatactttttcagactttacattgattgtaattctttatattgtctcttcttctatactaagttcttgaaaacaatagttacatgtatttatcttttttcccatgaccctttgcagtacctgggatatagtaatcactcaatgaatataaactgcacttactggcatgctcaaggaatgggctattaaggtaaattgaatttttggttgattcagtagtaaagcttttttatcaatatatgacagtttttctaaaatggtcaaagtatctttttgacttagtattgtggaatgaaatggtcttaatatttgagaacttgtaac

SEQ ID NO: 10221 - DNA, 2300 bp, Homo sapien
tagtaaccatatattgactcatgttttcattacaaagtaactgtcaaatcagtctgtttattttatgaccatgcctcatagtcggcattcagttatccatgctaatggaagggatctgtggtataataatcataaaagataagtggtccaggctgggcgcggtggctcacgcctgtaatcccagcactttgggaggccgaggcaggtggatcacgaggtcaggagttcgagaccagcctgaccaacatggtgaaaccccgtctctactaaaaatacaaaaattagccgggcgtggtggtggtacctgcctataattctagctactcagtaggctgaggcaggagaatcacttgaacccgggaggcggaggttacagtgagccgagattgcgccattgcactccagcctgggtgacagagtaagacttcatctcaaaaaaaaaaaaaaaagataggtggtccaaaccagtttcttgagttgagactgccattatagaagagatagtcaagataccaaagccaggtcagtgataaaagaagaaaacttctgagtgtagttgtgagaggaaagtgattctattcagtgtaattgctgtaaaccaaaaagaggattaattgattcaaggattcacacatgtaaaagtttagcatgaataaggaggaactgattttatagatattctaaaatgtgtgataagctaggacgtagtggctcacacctacaatcctagcactttgagaggctgaggcaggaggatctcttgaggccaggagttcaagaccagcttaggcaagaaacagcaagacttggtctctacagaaaaacttaaaaattagctggatgtggtggcacacacctgtagtcccagctgctcagtaggctgaggcaggaggatcacttgagcccaggaggccacagctgcagtgagccatgattgcaccactgcactccagcctgggcaacagaacgagagaccttgtctcaaaaataaataaatgaaaatgggctgggcgtggtggttcacacctgtaatcccagcagtttgggaggcccaggtgggcggatcacctgaggtcgggagttcaagaaccgcctgaccaacatggagaaaccccgtctctactaaaaatacaaaattagccggatatggtggttcatgcctgtaatcccagctactcaggaggctgaggcaggagaatcgcttgaacctgggagtcggaggttttggtgagccgagattgtgccaatgcactccagcctgggcaacaagagtgaaactctgtctcaaaaaaaaaaaaaaaaaaaaaaagaaggaaaatgaaatgtgtgataaattaaagtgcatatagtattttttatggtatatattttaatgtattttagcttgtcagcaatgaaattagttttatctctatgtattgaacttcatttagcaacatattattgcaatagtacagtatttaagctgcatattctcttgactgcattatcctttaaaatcagtatattctgtgagatatggctatggatatatatatttcctctcctatttatatcctaagattttcttaaaggataattttactgttttaggctttatgtttttcagttttatatcatttcctaaagcttagctacctacaaatgaatattattgaagaatttttctaaaactaaagcatgtcttttataagtttactcttttataatatcctaaacaaagcatatccttttccccttccttaagtaaattcttaaggaaattaacttcatttctaaatcaaagtattttctgcacttttattgcaccaatctgttaccttctgttcataccatgacttaaataatgcttactcaggcacagtactatcagctgacaacgtacagaaggctccagaaatgtcactcccatcccttaaaggttggtatatggtcctggtacagtcgtggaggtccatatgggtgaaaagcccagaagtctacctgagctgaaagcactcccaaggagtttggttttgtttgggtttgttctaggtatggtcccagggatcccagatcaaaccaggcccctgggcctatcctagaaccaacctaagctcgcgcatcattcctggaacatcaagagtgtgaagactgaagataacctgaggcctaccagacatcctatattcaccaagattcacattttttggtatgtgtgcctacattttagcaaaaattggttggttaatccttctaaaattagagggatgacattgggtaacaaagtcttcccagcctttggcattatagtaatttct

SEQ ID NO: 10222 - DNA, 2300 bp, Homo sapien
gccactgcattccagcctgagcaacagaatgagaccctgtctgaaaaataaataaaaaaagtaaaataaaatacttaagagttttatattgttcttaggacaaagtataaagcccttagtatgatctaaaaggctctgtcagctctcctaccctttccttcctgcaaggctcttacctttctagtctcatctcatcacactcactcccttctccacctctttgcattccagccattctggatgttttttagttctttaaatgtgttatactccctactgttttacagatgagaaaatcaaggctcaaaaatatatgggctgtccagagtcacaaaattatagccaaatgaccattctagtattagaatccatgtctcctcttaaatacctcttaaatttttctttaccttccctttgccaagaatactctgccaggcgcaatggctcatgcctgtaatcccaacactttgggaggttgaggcaggtggatcacctgaggtcaggagtttgagaccagcctggccaacatggtaaaaccccgtctctacaaaaattagctgggtgtggtggtgggcgcctgtaatcccagctacttgggaggctgaggtaggagaatcgcttgaacctgggaggcggaggttgcagtgagctaagatcaggccactgcactccaacctgggtgatagaacgagactccgtctcaaaaaaaaaaaaatactctctctaaacctttcccctcccctttgcctatttatccttcagatctcagcctaattgctacttcctcaggaaactctaccaggccatcctacctaggcaagtccctttgtaatatgctctcatagcagcagttgtaaatttgcttttattagcatcattgcttgatgtctatttttgttaactggctctatgatgacaaggatcatctctgtttttgctctctaaatattgccagatctaggtttatagtaggcattgaacgaatggatggatgagtgaataagtgaatatgtcagccaagcaaagagcagcccagataaaagtaacagtgagtttgaaatgctccaaggtcagaaagagctttgagagctggagctataatagtaagagagtggagacattggagaagtagatatggctgggtcttgccgggcattttaaaggattttggacacatggaagctacttctatttttatttttgtggtattatgtttggtttaccaactttttattttttattttatttacttttttgggggggatggagtctcgctctgtcgcccaggctggagtgcagtggcgcaatctcagctcactgcaacctcccccggggttcaagcgattgtcctgcctcagcctccctagtagctgggactacaggcgcctgccaccacgcccggctaatttttgtatttttagtggagacggggtttcaccatattggccaggctggtctcgaactcctgaccttgtgatctgcccacctcgccctcccaaagtgctgggattacaggcgtgagccacagcgcccggccggtttaccaacttttatattgccagcaatcaactagggaaaacaatttaaaatctaaatagggatagatttaaagagataaagatctgtacaagaataagaggaacagtttttattactattggataggtgctgcctgaagctttaagacagagaatgtacatttatgcagctgcagtcagagcctgtgtgaggtttactgtaaactcactggcaataaggctcttaacgacattttgatgcccatgaagcttggtgcctagtttaaaactaatgaaaacacctaaactctccaggtggacaaagccatattcaggagaaattgagaaggagttggtgcaggcagccaatcacaatccacttacgccacaaactaaatctcaaactgcggtttgaacatgaggctcaaaacataagaagtaaagaaatgggcaaaattcaattagtttctggtgaaacgtcctaaatccaaaagaaaggtgaccagaaatagagaaaacggagtgtgatcttttgcattaatgagagagaccgtgtccccgtgtgttaaaacctgtcattcttgtcctgaattggaaagtgagcggagtgtgacgggttcccatcttgaaccgtccggggttgagtagtacaataaactaacacggaactccagcttccaaaattctctccagtgcctacagagcctcgcggagagctgtgattgtgaatgtcaacgcagatttgattaaatctcttagatttaagagatatgtggagtcatg

SEQ ID NO: 10223 - DNA, 2300 bp, Homo sapien
tgggaggcggaggttgcagtgagctaagatcaggccactgcactccaacctgggtgatagaacgagactccgtctcaaaaaaaaaaaaatactctctctaaacctttcccctcccctttgcctatttatccttcagatctcagcctaattgctacttcctcaggaaactctaccaggccatcctacctaggcaagtccctttgtaatatgctctcatagcagcagttgtaaatttgcttttattagcatcattgcttgatgtctatttttgttaactggctctatgatgacaaggatcatctctgtttttgctctctaaatattgccagatctaggtttatagtaggcattgaacgaatggatggatgagtgaataagtgaatatgtcagccaagcaaagagcagcccagataaaagtaacagtgagtttgaaatgctccaaggtcagaaagagctttgagagctggagctataatagtaagagagtggagacattggagaagtagatatggctgggtcttgccgggcattttaaaggattttggacacatggaagctacttctatttttatttttgtggtattatgtttggtttaccaactttttattttttattttatttacttttttgggggggatggagtctcgctctgtcgcccaggctggagtgcagtggcgcaatctcagctcactgcaacctcccccggggttcaagcgattgtcctgcctcagcctccctagtagctgggactacaggcgcctgccaccacgcccggctaatttttgtatttttagtggagacggggtttcaccatattggccaggctggtctcgaactcctgaccttgtgatctgcccacctcgccctcccaaagtgctgggattacaggcgtgagccacagcgcccggccggtttaccaacttttatattgccagcaatcaactagggaaaacaatttaaaatctaaatagggatagatttaaagagataaagatctgtacaagaataagaggaacagtttttattactattggataggtgctgcctgaagctttaagacagagaatgtacatttatgcagctgcagtcagagcctgtgtgaggtttactgtaaactcactggcaataaggctcttaacgacattttgatgcccatgaagcttggtgcctagtttaaaactaatgaaaacacctaaactctccaggtggacaaagccatattcaggagaaattgagaaggagttggtgcaggcagccaatcacaatccacttacgccacaaactaaatctcaaactgcggtttgaacatgaggctcaaaacataagaagtaaagaaatgggcaaaattcaattagtttctggtgaaacgtcctaaatccaaaagaaaggtgaccagaaatagagaaaacggagtgtgatcttttgcattaatgagagagaccgtgtccccgtgtgttaaaacctgtcattcttgtcctgaattggaaagtgagcggagtgtgacgggttcccatcttgaaccgtccggggttgagtagtacaataaactaacacggaactccagcttccaaaattctctccagtgcctacagagcctcgcggagagctgtgattgtgaatgtcaacgcagatttgattaaatctcttagatttaagagatatgtggagtcatgacaatagaaatgtgtacaagtgaacacatttcttagcccgtttccccactgcctgtgtgatttataaaaacgcaaatataaaatatttccgttccagcagagacgccgcttgctacggcgggttgcccgtctccacaggtatctccggctgactctagagctcaacttcccctttaaacttcaccctgcgcttgccgatttgcttcgggaatgcccgaggcaccggacgaagcagtcgggtctggccccagtcgactccagccaggcggggctccaagccgagactcctgcacgcccggcccgaagctagcccgacaccctcagctgagtcctccgccgtcccagcattccctgcgtccctaccatcgagagcagcttccggcgtggctggtgtaggcgggtggagaaggatcggggccctcgccgctctgtctcattccctcgcgctctctcgggcaacatggcgggtgtggaggaggtagcggcctccgggagccacctgaatggcgacctggatccagacgacagggaagaaggagctgcctctacggctgaggaagcagccaagaaaaaaagacgaaagaagaagaagagcaaagggccttctgcaggtaaagagagtttta

SEQ ID NO: 10224 - DNA, 2300 bp, Homo sapien
gagtgggcacatgttgcaataaaattttatttataaaacaggggaggcaaatagcaattccttgaaggtatcacttttacacttgtgtaatttatactcagtggtcactaagttgcaaactgtatattcagtatttaagaatgtgtgaaaattgtttagatttttttttttaaatatcattttaaggcagttaatgtttttcctactacaggagtcatggatcttattcccagatactgaataaaaaattctgtcagttggggtggctcacgcctgtaatcccagccactcaggaggctgagacagggggatcacttcggggcaggagttcaagatcagcctggacaacatagcaagaccccatttctttaaagaaaaagtttttaaaaattagctgggtgtgctggtatgcacctgtatactcccagctgcttgggaagctgaggcaggaagaacctaggagtttgaggatgtagtgagctatgatcacatcactgcatctgcctgggtaacagagtaagaccctgtctcttaaaaaagaaattcgttagcactggcagttttaaaatgtgagccatgtctttcaaggaagaatacctcttatatttatgtatacaattaggaaaacccagcacacgcatgtaatatgtgttttgaggaagtatatgcagatttccaagtcagtttcttgggttagtagttactctgttggcaaaattaaatgcaaattgttgttgtgctcctttgaagtgtctaaagtatatatgacctcaagtggaaggatgactttttcctacttactctgattctaggactcttcagacttttctgattgttttattatctttttgtgttgtcagggtattagttcctctgactatgaatgaaatctcacatgagggtttttttccctcccttagagtcttaaaaagtttttaatttcatttgagttggttgcaagtgtttggctttttgtatttcagaaactttattgacataaactgaatatgtactgtatttttatttgaactgtcttgttacttagtatagttgtcagcttttatgcttgttctgctgttttatcactaatagtattctatgcccactctaaaggcgaacagctgcttggagaactacaagtgaagaaaagaaagcattagatcaggcaagtgaagagatttggaatgattttcgagaagctgcagaagcacatcgacaagttagaaaatacgtaatgagctggatcaagcctgggatgacaatgatagaaatctggtaaaaggaatacttcttcgtaagaacatgataaaaaatgttttattaagtactaactctccaattataatgtttggctttcattaccactttgctaaatctttaagtaaaggttgtagaaatgccttctagattattttagtgtcactatgagaaaaccatgaagaggagtacacattggcacctcagccacccttttgtgtgcacatgtagtcattactgattgttattttctatctggaaatctgttattttgctatctaacaagtcatactaagaaataagaaagtattggagcaattgcccaaatacagaacatgatgataatacagtaacaaaaccaattcaagtaattattctctagtttttccttttgataaatggttagtataacatgtaattctctgattcctacaatttaaaaaatatacaacatgaacaaataagatcagcatttaaattggtctaagttagactcttattttctagtaaatttagttaaaagtggattgtgtttctctgactttctagcagaatcaaattccttgtcttctaaagatatgctattttcatagcatcagagaactgttatttatttatattcagaaagtgctcagatcattcccagaaggtatttaaggtttttagtaaactttctggacttgatgaactatatggtattaatatataaaagtaagaatgtaaaagtaaacaagttccctttgcttttttgttttagtgaaaagttggaagactgttcacgcaagttaataaaagagaatggattaaatgcaggcctggcatttcctactggatgttctctcaataattgtgctgcccattatactcccaatgccggtgacacaacagtattacagtatgatgacatctgtaaaatagactttggaacacatataagtggtaaattcttgcagaaaattcctaccccagcctcctcctgaaaaactagtttttgtctctgttaaatggagtgataaatactgaactcccaaattttgttcttg

SEQ ID NO: 10225 - DNA, 2300 bp, Homo sapien
gaatttgtctccagcctcttcccttcccactccgcacctcttcctagcttacatcattgtattaaggcattttattgaagacactattcagcactctccacctatgccttacacagcttgcctttgcttttcttcccatttcactttttctcttcatttattcacatcattttagtccttaaaagaccccgcccaattactagatcagagggaggcaactaagactcttcctatctcccaaacgaccttccagaatggttttatggcattataataggaaagcaagagttttgatttttctattattaatattttgctttcaaggaattacaggaaaaaccatattgcatgccagaaatacttaaattttaaatatttcatcttaagagatgccctcatgtaatgcttttaatgcatttgagaaattcaggtggtgggcaaaagtacaacatagaggttagatgttttgagtgggagaagtgcactggggtcattattgaatcagaattattatgcacttaaatatatagaaaaaagaacaaaatgagtattaaactatgcaaattcatccctttaatctttatttgcatgactacattttatgcagttgtaaccttaatgtacatatttggtatttttttcaaacatgaattgattagacattgttgctattttgtatctattttgttaacataagaacttcctgtgttatatcagattttttttttttttttttttttctgagacggagtttcgctcttgttgctgcccaggcttgagtgcaattgtggatctaggctcaccacaacctccgcctcctgggttcaagcgattgtcctgtctcagcctaccgagtagctgggattacaggtgcccgccaccaggcccggataatttttgtatttttagtagagacagggtttcactatgttggccaggctgctctcgaactcctgacctcaggtgatccacccgccttggcctcccaaagtgctgtgattacaggcgtgagccactgcgcccggcctctatgtcagaccttaattagccatttcctgttagttagaatcctgtgccgctccttcttgccttttacggtgtttggataatatgctgtgaatacctttgtgcactcatttctttattcaggtcataccactgaaacatactccccagaataaaactgatgatgaaaagataggaacaattttataccttgtcttacatattgcaagattttgcactgcattgatgtattgttaactttgcatgtttgtcttctttttaagctctccttggagagtttttaaattttcagtacactccacagggtggccaaagtagaactgctttgtcattgagtataggttcagttaaaaacaacaatctggctcagagttgaacacaaagaatccaataaatattaatgggttaattttcaggtaccttagccttgactttcctgttttccagatttcccctccttttccttttcggtatgtacttcattatttaaatgggcaatttcgggttaggcagttctagatagcggttcccttcctgtgcccgttctggaacctctctcgcccttctgcggtgcgaaaaaacccaattcacagccgtcatcgccactgaagttacacccaggggtcgcttcaagaaggaaacgttttctttaagaatttctatgccagtgaattggggaaggttttaaagataacggagtttgccacgcgtttctgccaaacaattcgacgttgtgtaaatcgcagaaattccaggaaggactaacgacgtccgtggatgattctgcggctcacaggcacacaggacacgctgggtttaccctcccgtgtcccgacggcactacaggtgcgaagcccgcccggggaggcagtgcttgttgttcgcgcagacccacttgcggcgccggggaccgtccgtggccccgacccccccacgaggcgcggaaggcggccaccggcaggttctcggtgcccgcgaagagccggcgcaggggtggggctgtgggagggggcggggcctgctgcgcgtcacggctgtcgtagccgccgcaccgggtcgtcgcggccgccgaaccggggggcggggggccggggtgagcgctaagatggccgccccggctcgggctggtgagtgtgcgcgagggcgcgcggccgcggcgattggcggagtgaggacccctgcgggagcggacgtgcgacggcagcccccggggccgggaggcacctgggggcctattctcgccgcgcagggcgctggggggtcctgagagaggg

SEQ ID NO: 10226 - DNA, 2300 bp, Homo sapien
ataactgagctccttagataatgacaggttggggccaggcatggtggctcatgctcgtaaccccagcactttgggaggccggggcacaaggattgcttgaggccaggagtttgagaccagcctgggtagcatagggagaacccccctccacccccacatctctacaaaaaatcaattagcagaagttgtgtcgcatgcctgtggtcccagttacacaggaagctgaggtgggaagattgcttgagcctgagaggtcaaggctgcagtgagccatgatcacgctactgcactccagcctggtgacaaaaccctgtctccattttaaaaataaataaaaagagagaatgaaaggttggtgtacctgtcctgaacaaaatgggaagagttttgatgggaaggaagagagacagactgcagtaaagccctggacacagcatcctgaggatccctgtaaaagtgagtatagagtgggccaggcgtggtggctcacgcctgtaatcccagcacctggggaggccgaggcgggcagatcacgaggtcaggagttggagaccagcctgaccaacatggtgaaaccccgtctctactaaaaatacaaaaattaaccaggcgtggtggtgcatacctgtaatcccaggtactcaggaggctgaggcaggggaactgcttgaacccgggaggcggaggttgcagtgagccgagatcacgccacggcactccaacctgggtgacagagcgagactctgtctcaaaaaaaaaaaaaaaaagaaaagaaaagaaaagaaaaactgagtatagggtggaggtggagtggatgtttatgtttaaaaagggggagaaatggactcacttcacaattttgcttccatttatacctaaaccctggggctcagggtttcagtttccagtaggcctatgttggaaattcacctgcaaggtacaagtttccctgacagaccaccaaataaacaatggtcttttaaaaacaaatcaactttggtaccatctactcagctggcatttaccttccttacctgctaccaacctcattcttagaattaaagaaaaaaggcgaattctaaagccccttctactcactttcctccactaaggccatagcttacatctgctgctcttttttccatactccttttttctcaactcctttctttcatatttgccagaaatttaaggtcgtttgggttcctctcatttaaaaagttcaactgaagtgtgttgctacaccttaatcaaaagtttatggctgagttatttagcgtttctttacccacttcctctgctcaatccttcatctcctcataaccattgaaatgaatgctatgaatatctcaatgcttagcatggtgccaggcatttaggtgttgaaaaaaatgttaagcgaatattagttattaggtaagagcattgtctgtaaaactctgaaaagtcttaaaagtgattcctaaaatttcacaagctcataaattctttagtctgcaattatgattcctgaaatattcttcgattcatgaaagactggactaggaaattctaaaaatcgacataaagcataaaaagccactctgaggtttatgaaatttacaatgttttgtcttcttttaattcattcgtacttttctctcaggatacaaagggcaaaactgtttgtgtagtaactcagaattgagtagttacacatccattaggtttcagaatcgttaaaattttatctggtttaggaaactgcttaccttggaagggcaaattgccatttctctccatctggggatcagggaagcaagggaagcccccctaaacatcacttccacgctcctatattatgctaaggaacttctggttgattcattaggcatttcagcagtgtttttggccggtactaggaactgtggagaggtatagaaagggagcaagtgcacagtcccggcccccaaagaggttacgatgcaaatagaagcaggctcagaactcggaacaaaagcagtgactgcataataatgcactgctgggggtgggggatggggatctgcacgcccggtttgtgacttcaggaaagcagtttccaggaggtgagagtttaagccaaacctgaaagaggttgatttgtaatgatttgcaggggggcactggaggcagccgccaggacttttcacttaggagatcagcatttgccctgatggaaactgggcgatcctgcagggactgacctctgagttatccaaaggccgacctggggaaagactgattttgaggttttaataggtaagtttggggacatcatt

SEQ ID NO: 10227 - DNA, 2300 bp, Homo sapien
gcgggcagggatccctgactttctctcacatggggggccgacaggagctgttgtaaatctttaaagccaaaaggaaaattaacgagcgcagcacagagcaggaccttgtcagctcggtaatgggtggtgggaggaagaattctgctgcttcctcctgggcattaagtgtaactcaaaaactcctgttttgtggccattgtccaattataacagctttctactctggagaatttagtcattgactgctttcaagtcacctgggggaaaacagtattcaatacgatcaagaggatgaggtctcttgttctgaattttccctttagtgatggaaacaaaatacttctctgaatccatttagggcattgagcactcccaaaagaagccctacaatggagagaaagagcggggattattagagagatcttctgaaggacctcccccactagaatggagagtgtagaatgcagagtagggattttgtgtcatgcgctgctatatctccagaacctagaactggtcctatcgcacaggaggctgacaagaaataggtgctaaagtaacgaatgaagatctacaatccaacaaatgacactgttcgggagctcagagctttaaagcagtgtgatgtagttgcaggagcgtagggtgtggaatcaggcagatatagtgttgttggattgtagatcttcatttgctcatttagcacctataggtttattcattaacttaacacctataggttttggctctgctagtttgctagctgtctggcctatggcaagttactttactccccttaatctcgtggtcttcatctgtaaaatgaaataataatcccaacttcaaagttgttctgaggattccttgagatgatgactgtgatggtgtttgacactctgaaaatgctgatcccaaccctatctctccttaaatcatgtcagttcagtaaggaatttacataatgaactatctattcagtgggagagttagaaagcggaagcatctgtttattgccacaaaaatttatagattaagtttgggcaacatagggagaacctatatcttcttaaaaaaaaaaaaattatccgggcatggtggcaaatgcctgtagtcccaactactcgggtgggaggatcacttgagccaccgggggtcaaggctgcagtgagctgtgatcttgccacggcattccaatcaagatgatagagcgacaccctgtcttaaaaaaagttgatagtttatacatttatttattcatttacagatctgtagattacaaattactcgtgatgtcttaaggtatttgttgttttgttcttacacgtgtgttattttgtgtttacaaaaggaaaagacatttcataaagctattgaatcccgaaaagtcaactttaattttatttttattttttgaggcaggggctcactctgttgcccaggttagagttaggtggcgtaataatggttcactgcagccacgatcttccgggctcaagcaatcctcttacctcaacctcccaactagctgggaccataggtgcgtggcaccatgcccggctaatttttaaatttttttgattaattaagtgggatctccctatgctacccaggccagttttgaactcctagggtcaagggatcctcctgcctcagcctcccaaagtgctgggattatagatgtaagcctgaacaatatgaggctttaaacactacttctcaaagagccttagccagttctggtaggataataacctcggggcaagtgaaaacttggagaggcaggttgttcctaaacttaatcttctctcttgaagcatttggtgaaacctataaaatttgggggcgtgcaaattaagtgtacttgtaaatatggtctgaaaaaatgcattcactgtatttttgcttcccactgtttagtataacatttatcagagaggcagaaaacatgcggataaaaatatccagttgtgtattctcagttggtatcaaaagctaggtcactgaaggtcactgcccagcaagtccccatgtgtaagagagtgttggtatgtaagagtgtttctgatgttaaggaattctgtttgctgtgatgcgagttgtgtacatctccttgatttttctccccatatgtaaccaaaaaaatgctatcctggattttatttctctttcacaggaatgggaaggaaaagtgtggagtccgtgtggatttctcttattttatctgtggcttgaatgtacatttctgagagagggtaagtgaatccactctccatgttttcctttctcaatgttacttcctg

SEQ ID NO: 10228 - DNA, 2300 bp, Homo sapien
gcataaggatagttcctatttttattgtctttacagataagggaactgagatgagagcctaggtatcttgctcaaagtcacacagttagtcagtagtggagatttgaagccaaactgatattttaaaggaaaaataatcaataaaagaagtttccaaggggaaaaagcagagaacaggattgagaatattagttgagaaggtgcagcatgaagaactggcttcttcagtgtgtgacactgtgctatgcaccttgctgaagtagtttcatttaaaatcatgtcaactgcatgaactctccatgagatgtagataccacaataaggaaaccaggattcaggaaagttatatttctcacctgaggtcacagaggctctgggaggcagagccgtcaaccaaggtttctcccagcgtttctcacttgattctcagagaaagcagtgggaagatgaaaaagattttgaaatggagaaaagattatccagaggaccctcccagtgaattagaatcagactaagtgggtaggttgattgagaagcctagggaatttctgaggcagccactgtgagaaatattattattttttaatccaggaaaaattgaataaatagagttgatgggctaggcacagtggctcacgcctgtaatcaatcccagcactttgggaggtcgaggtgggcagatcgcttgagtccaggtgtttggaccagcctggacatggtgaaaccccatctctataaaaaatacaaaaattagctgggcgtagtggcgtgtgcctgtagtcccagctacctgggaagctgaagcaggaggattgcttgagcccaggaagttgaggctacagtgagtggagatagcaccactgcattccagcctggaacaagaaaagaccctgtctcaaaaaagcaaaaatagagttggtgagcattggtttggagatccaactgaagttagggctcacgaatttgtgataagcccagaaagcacatttcacacatacatatatatgaaaagtgtatatatgtatgtatacaaacacatagatatacactttgttcaactacttttgccatcccaagaacaaagaaactgctgcaggttgtcagactgtgagcaataagtaattccaggagtagggagagggctgaggagaaggacttttgactagtattaaagacttacggccaggcgcagtgtctcacgcctgtagccccagcacttaggaggccaaggtgagaggattgcttgaggccaggagtttgagaccagcctgggcaacatagcaagaccttgcctctacaaaaaaaaaaaaattttttttaagtagccaggtatgatggtgccggcttgtagtcccacctactcgggagactaaggcaggaggatcgcttgagctcaagaagttgaggctgcagtgagccatggtggtaccactgcactctggtcttggtgatagagtgagaccctctctcaaaaaaaaaagcaaagctcctcaaaagagctatctgttcacatgctcaaattcctctactcccatactcccctgaatcctcttccactgggtttccctctcactatgtattacactgaaactcttcctgtgaagaacaccatcagcttttgtgctgttcaaatgcaatactccatcacatgccccatcttctttgacctttcaacatctgccacagctgatgctgccctactccttgaaaccttctttggcttccagaacactatactctcatgacgtcttttcctttctcactgaatccttccaccctgtcttctttgctggttcgtcctcatcaccccaaccaaagggcattcatatttcatgccttccatattaggataaattatgtgtttatttttgcagcagacatgcttttctgattatatctcgcttatctgtcatttaattagctttcattctctgagcatacactcactggctaaagaaggagtctcagaaatatgctgtgtggtgaagggaagccacttggggatggtcaagcctaatgttcacacgggtgatctacagtcagtctttgatccttgcgtgtcctctctgttgtagcgtgttcctgccatccagtaggatcagctgtccttcctgccaactcagtgaccttctgcgaccccagcaatggtgactgcccttgcaagcctggggtggcagggcgacgttgtgacaggtgcatggtgggatactggggcttcggagactatggctgtcgaccatgtgactgtgcggggagctgtgaccctatcaccggagactgcatcagcaggtgaatgtgca

SEQ ID NO: 10229 - DNA, 2300 bp, Homo sapien
ccaagtattttgccccatggattctttatctggctcaaatcttttctggacttaggagtttaggggcatttaaaattattggatatttttcccagggacctattaaaggcctaagattttactttaattcttgcactcttaaaatatgagctttaaaaaaaaccttttccttctcaaaccatattatggcaaaaacatgcaagccattgaaaggttgtaaataaacatcacaaggcaagtgtttcaagtcaaaaatacttgtacaggcagtatatgattttccttgaaattttttacaggtgagtcatagcacattgtgtgtttgtgtgcttctggccacaagcaactgttgccccagctaatgagaaaagtggcaaacagaacccaggcataatgcacactttaatttgacatttaaaaaataatgcctaaggaagccctttagttgcaaggcttcgtggggttggccattgtcagtgtgtgaaatgtctctgttgcagcctaagctgtcatttggcctcctccaatccttactatgacaacagttcagaggtactgcttcttaagcagcagaaacattcaattagccagaatttaagggttgatttccttttccctctttccccctctgttttaacctttaaaatagatgatttttgcttaaggtattcacaattaaaatgacaaacgcaaatcaaaggattatagtatgtactcagaatgttaataagtggataatgtttatcattttaagtcattttaaaacattaaagtctgttggacctttgggaggaaaagtgtgttttttaaagaaggtcttgtagttcacagataatatttaaaggtgctgttagtggctgccagactgtagacactctcctgttaagcaaacagttaactactctataacctgtcacaggtagaaaccctgaagagacagcatgtaaaataagcttttctgccatttggcagttcagagagtttttttcttagttatgtttatgtaatgttagaaactgatagtgcacatctgaactccaaaggtctctagctttgcctccctctaaatgaggacccattgtatatttattaaatatctcatattgcttttcctagggaatttatcccttccctggcttaaaaatataaagaaaatagaattccacatttccttctaaatacattctcataataaacatgttaaatcatgtgaaggactcacattaaatttgaaagactaacttaggtggtcttaaaaacattatggtttttcaatagtcatgacttcaaaaacacatcaatgtatttgaaatacagaaaacatttataaggcaaagtacttgaaaagttttaggccaataatcttcaccctggtggttctattttccctcctcttgccctctgcctaaagtgtttgtttctgtgatgtgaattttacatctgaacatgaaaagcaaatacacacacacacgcacacacacacgcatacacgaatgcattgtgaatgcagaacagtgttcatgctcaaacaggaacatggtggagcatggtagaatttgccatttatcgaaagtctcaagcgcttttggggagatccttgactgttgttgatggactaggtggccaaaagagctttccagatgggtttgtcttgcatcatgcatgctttccctttcttaggactgagtggagtagctggagtgagttcccgctgtgaaaaagcctgcaaccctcggatgggaaatttggctttggggcgaaaactctgggcagacaccacctgcggtcagaatgctaccgaactgtactgcttctacagtgagaacacggatctgacttgtcggcagcccaaatgtgacaagtgcaatgctgcctatcctcacctggctcacctgccatctgccatggcagactcatccttccggtttcctcgcacatggtggcagtctgcggaggatgtgcacagagaaaagatccagttagacctggaagctgaattctacttcactcacctaattgtgatgttcaagtcccccaggccggctgccatggtgctggaccgctcccaggactttgggaaaacatggaagccttataagtactttgcgactaactgctccgctacatttggcctggaagatgatgttgtcaagaagggcgctatttgtacttctaaatactccagtccttttccatgcactggaggagaggtaagggcacctgtttaactctacactgtaagtaagatagaaaaatgttaccagcccgcatttttttttaaagcatgaagctatacttgt

SEQ ID NO: 10230 - DNA, 2300 bp, Homo sapien
atgaacacttattgtaggtgttcttggctaagaataaggaaaaatatcagaaaaacatagtaatgttttgtataaactgaatattaaagactgttctaccattagagagctttctgtcttgttaaaggaaataagagccagttattcagcaaagaaatatattatcaatgcaggattcgtgcagacagtaaatggctttgaaatttgtaatgagatatggagtagttctgtgattgctttggcagcacatatgctaaaattggaacaatacagagaagattagcatggcctctgcatgagaatggcatacaaatttgtgaagcattctatatttttagcaatatattgtactcttgaaaaatgctaagacagtgagtgtattcttaaatgcatgttaatatgcaaaaatgcatatgttcattggctagatttagtcattccacgctgtatacatatttcaaaacatcatgttgtacatgataaatacatacaagtttatttgttaattaaaaaacagaaatggattagttctgcctaaatatactagactcagaagttaataataaatgtgcatccacccctttgtttaatttgccttggctattaagttaacatttatgctaagaacctttggctgttatagtttcctatcatttatttggtaaaaagattaattggagaggtgtttcaatggctccattaggagatatgaagaaagccccaccattgccagtatttgggaactcaaagcgtttattttctaaagcaggtgatgctacatgaattgctgtccacaccttctgctactttcctctgttggccagaagaataattttaatgtcgcccaaatggattatgctgacctcaacccagatccccctgggagatataaacttcttatatgttcctggctgggtcattgtaaataatatctacatgtatcccaaagctctgaattatcctcatctgtaacagacacaacgactaaatggtatctggaacgtagttaattttctggaaaatattcaaaggaacaaaatgagcactgcaatacaaaattgctgtcgacttaacttttgccagtttccctggatgtgtaagtagaattatattttcacagaacttgcaaaaatctcagactcggctgctatttaatctctttccagaagcaccagccctgagcaatcctatctgcaattagctgcgtgtggttgctactaaattgctccccataagttagttcctaacactgtttcacagcacggcatactctataaagggagaacgcttggaaggaccgaagagttccctttgtcgtgcccttgccctgcctctggacaacgatgttcttacactgccgactagctaatcctgtgacccttttctttcagcaccttgagtttgagttaggcaatacctcttacaccaaagtgggcacaccttcggatcatgtaggcagcgattgtttagccgagacatccccctacccccgcaaaaggcagcagagaagcggcgaacgccgcttagcagttggcgcgctctcagtgcgggtgacgcggggctgggttggggtgttccgtccccgggtcgtgggactccccgagagggggtggctggaggaggagggagggcttgtttcgctgggggatgtgggaagtaggcgctagcctgtttcgcggttttttaagccccttggcatgccctgacctgatctagagggagtctactgctcttaggaatgttccgggagaaggtgggagattgcttcccaggggaggcctgtgggtgctgcagggcaccaggggggtcactagggagatgcagggcgcgggccaggaggggcgccagggcagccgggggccaggctgaggcgaccgggaccagcgggcagccgggcgtcgggggcgtcggtcggggcgcgggggaccccccccccgggcggcagcggcagcggcgatccgatcccgcgggctgcgccgcccgggctgtcaagcgcggggggcgggcgggaggaaggggtggaggtgcgaggggaggagggctggcaccggagcgccgcggcgtcggtgcaataaaaatgcatcgcatggaactgcccgtggagaaggacgggacggagccggggcagccagaagaggtgggaaaagcggaggaggacgcccaggaggaggcggcggcggcggccgggaagtgaaaggtctcgcaaagttcagcggcggctgcgggcgccgagccccgggctagcggcagacgagcccgcagggccgctccgcggggcagcgcagccaggccggctatgg

SEQ ID NO: 10231 - DNA, 2300 bp, Homo sapien
aacacagcgagaccctatctctacaaaaaaaattaaaaaattagctgggtgtggtggcacatgcctgtggtcccagctactcgggaggctgaagtgggaggatctcttgagcccaagaggtcaaggctgcagtaagccaagatctcacctctacaatccagcctgggtgacagaatgagaccctgtctcaaattaaaaaaaaaatttaacatgaaaagaaaaaccaaccttaaatacactatctttacagaatgtgtttactgtagtatttcgtttcacttcactgagaaaacagctaaagagtcaggcttctaaaacacatattgagtctttgaaaggtagcttcatgaagtagaaaaagcagagttttgaaacccaggtatgtggtcctgagcaagctatgaggcagaagaatagcggctggaagcagggaacctagggcccatccatgctgactgggtatcagaggctactcccatttcaacccctcctttttctgcgtggcagttgaaaaatgaaagtacctcttattggtcccctcccgcaaccaatcagactggttgtgggccaatgggcaacctctagagggtatttaaagcccagaaaattctataaccaatgctcttgagccgcttgcaccaggcggtgcccaccctgtagagtgtactttcatttaaaataaatctctgctttcgctgccctgctttgtttgtgcgttttgtccaattctttgttgaaaacgccaagaactcggacagctaccctcaactggtaacagttacctgctgggcctacttcctcatctcttaaacggggctgtcaccccgaatcagacagtaaggtaagatttccacgattgttgaaaaagcctgacacatagtaggaactcaaagtctatacaaagacttaaagttcataaaacaatagacaaacggagaaatccactgaagtttagggtgaataaatctaataactgtttggtaaaaactacactgacaatcattgtctggtcagtgttcaacatttacgtgaaacactgagcttttacaaggccaagccccgttttacgttaaattctcgcaaccaccctgaggatggttccgtttttaaagccgcgttcctgccgaggaaacaatggccctcggggttaagacactgcccaacaccggccgcgcctgatagacgcaggttccgaatgcaggccccctccaaagtcttgcccactgctccacaatgcctcaacacccaacatttcatcctcaactccaaatccatctcttcagggccgcaaaaaagcgttacttcccaaagggcgtgttctccaagaactgcatttagcatttcagatcagagtgacccgaactcaataggattacgacaaaaactagtgagattcagataacaccgttacatcgaaagttttaatccgtgacagaggaaatattgcttacgcccttaggtaatttcaaatgcacgtatgaaggccgtgcgggtttctgcaggcgaagcaaaagaaaggtggggccggcagggtcgtggggcgggggtggggcatgacaccgtatcccagacgcaactcgacctcgtttgcaagaaattctgtatccaactctcttcagtgcgtttcgccgcccctagtctagtctggctagcccccaattcctttaaaaggggttaaaacgggtgttgcagaagagagaacactcaggtagaaagggcctgcggcagaggcgcccccaaatcatggaacctgttggaagagtgaggaaggaactctgggaccccgaacattctcacgggtgtaaaaagacaaagtaaatccccattagccaagttggggagaagtcacatccgttacacagcctctcccagaccgccctctaggaaggacaccacatttaaaaacaccggcctgcctccagtccttggctgcctcacagcgatgctcagagccggtttcccaaggtccgcgcgccgcctgcaaggcgcaaacccaagccgctgctggttgctaggagatactgggccagccatctcctccaatcagcacgcacctctttgcgtccaatcacagaggcaggaagggccgtggtgggaggtgaaaggtcatagtcctgtttggcggccatttctcttgaaactgcggctcgggacctgcggtacctgctgtagtcacgagggacgggcggcggcctggtcggcagagagtagcctgcaacattcggccgtggttacgatggtaaggagaaagagaacggcgggagaagcggggagaaagagaaggagggagaccagcctcg

SEQ ID NO: 10232 - DNA, 2300 bp, Homo sapien
atataatttcttttagactcacccagaacttgcaagctttaagtacatggtctgtgaagtcaggagaggaactatactattggctgaaatctaatctttaacttaattggccaggaagacaaatagcaggattaaaacacacgaataatagtaataatacctattacttgtttagagctgggcactgggctaagtgatttatgttttattttatttaaaactcagacaagcccataaagtagaaacagctctccctatgatgaggatgagaaaacgaggcttcgagaaattactgtaaagaaattccccaaggtcaaacagcttataggaaacagaactcagactaagacaagtttattgaaccctatttttctataattttaacccatcctttatacatacaattgcatagttctgcaaatatgcctaaaattgcaaaatgtaactgattaaagtcttcagcagaaattttataatagaaaattttaatatttctctgtgaattagtgactttatgtgtttctattccccactatttctacttctctttttaaagacatagaaatatatgtatgtataaactttttaaaagctatgcacacacacacacaaacaacctgtttgtgattgtgtatatgagctgtgaataatcttctgatgccccctcccccccacccttagggtctctttcactcacattgtctatatattttccaatttttatctttctctttcctaactgatctctcttttataggccataatatgaagctaaattatattcttatttatcgtggtcatctaaaggagtgtttgctttctgttccaggtttttttaatgagactaaattaacttttatattttgtgggtttgcaggcttagtctgcttttatagtatattatttgtgtccacatctatcacttttattgtaaagtctttactgggcagggaaagcgcctttcctatctttgtatgttccacaagacttaacacagagcttgtgataaacatgaataaacgaaatcaagtaattaaggactcaaaagcctgggcctggcagtgtttccatagcaattggtagcaggaagcgacgaggctgagaatcacagaccatcttccataaacttgattctgtctccaattttggtcgcaagttgcttgtaggcccaccagacacagctgaggggtgggagggggcatgcggaggggcggacactgagctgaaacctattttacctcagcgagtttggatccaggagcctttccaacctatcgttcgggaaggcgttgtgggaaaagtgggcggaggtgccaatcgatcctccagtctcggctctatcctcccccagcccggttcccggtcatctcagggaccgtctggtagctgatcccggaacgcagctggccaacggataagtgcggggcacccgccacccgcgcggacccaggagcacctcccctaccgcatccccctcctccccacccccaggttccctcggctcgcggccctccgcgtcccgggctcccgccccagaacctgtgggcagatgtttcctccacgcagtaccctcccggggctctgcctccaggctcgcgtcccagcaccctaggcagaggtttcccccactctgtcctctcccggggctctacctccaagctcccgtccctgcccctgggcacagctttcccctactctgccctctccaggagcgctatctccaggctcccaccccaaccccccgggcagaggtttcccccatggccccccttccggggctctaccccaggttccggtccctcactcccgaacactccgggtgccctcacccagccaacccttgacgcgcttccacataccacgtgatccacacagctcactttgatctctcggggtgaccaagcttaagtttccttatctgaaaagtagggacactagtctccatctcgtttactcgggatgggacaagacgaccaaaaaagagaggattcctcatcaggtttattactcgttgccattcttgcaatgattaccgcccccgttgctgtggttgggggaggcgagcaaagggcagcggctgcgagcgcccgcccccgccccaccctcccagccccggacagcgcaggctgcggcttttcgtcctccactgagtcctgccggtggcccgagcccggtggcctcccggcgaccctcggcgcgaggcgacatggcaagcggccacagcctcctgctggagaacgcgcagcaagtggtgctggtgtgcgcccgcggcgagcgcttcctggcgcgggatgcgctgc

SEQ ID NO: 10233 - DNA, 2300 bp, Homo sapien
aatgttttcatcccttaattaaaaataaaccagtcaagctgggcgtggtggttcacgcctgtaatctcagcactgggaggccaaaccaggtggatggcttgagcccaggagttcaagaccagcctgggcaacacagtgagacattgtctctacaaaaaatacaaaaattagcctggcgtggtggcgtgcacctgtagtcccagctgcttgtcaagctgaggtgggaggatggcttgagcctgggaggtggagatcgcagttgagcctgggaggtggagccaagatcatgccactgcactccaacctgggcaacagagctagaccctgtctcaaaaaaacaaaaaataggctgggcgcagtggctcatgcgtctcaaaaataaataaataaataaataaataaataaataaataaataaataaaattaaaccaacccacagtcccttaaaagctgggctcttgcacaaccctaaactgcctcagataagccgtggtcagtttgtgagactcattgatcgtgtgcaattgtggtcccatggcacgctttggattcaaattctcatccaacttcccttgctaccccaggtcgccctcaaactttgttcttttattcatatctggcaggaagctcagatgagtaagagaaatatcttgttttctgatggtcaaatcttgatttattatcactcagggccattatcgtctaaatgttctccgtggttctaaagctttagtgtacgagatcacgaggatgtgaaaggtacttttgaaaaattcaggtctcagaactccagccccagtgatgctgattctaaaattctagggatagggagtgggggacgcaggtggaatcagaaatctgccgtaagaataaaataaccacaggccaccctgacaaaggtggtcttctggcctccctttaagaagcactggggaggacctcaaccccttctgatggttggacagtgatattttaccagcagaggcaggaccctgatgcgttccaatggggtgttcctctctgagctctttggacggaatgacaaccccaagcagcagagcgtgttagcaacaggtaccccaaaggctggcttgcccgtgtatctctgtgcagggacgctttcacggcgttgtttccctccagagtgcacagtgagaggaagagcggccagctccgcccgtggcggtccccaccctgcgcgcccggccacttacttgcccaccaccaggctggcgccttccagcaccgccaggctgcgcagcgcatcccgcgccaggaagcgctcgccgcgggcgcacaccagcaccacttgctgcgcgttctccagcaggaggctgtggccgcttgccatgtcgcctcgcgccgagggtcgccgggaggccaccgggctcgggccaccggcaggactcagtggaggacgaaaagccgcagcctgcgctgtccggggctgggagggtggggcgggggcgggcgctcgcagccgctgccctttgctcgcctcccccaaccacagcaacgggggcggtaatcattgcaagaatggcaacgagtaataaacctgatgaggaatcctctcttttttggtcgtcttgtcccatcccgagtaaacgagatggagactagtgtccctacttttcagataaggaaacttaagcttggtcaccccgagagatcaaagtgagctgtgtggatcacgtggtatgtggaagcgcgtcaagggttggctgggtgagggcacccggagtgttcgggagtgagggaccggaacctggggtagagccccggaaggggggccatgggggaaacctctgcccggggggttggggtgggagcctggagatagcgctcctggagagggcagagtaggggaaagctgtgcccaggggcagggacgggagcttggaggtagagccccgggagaggacagagtgggggaaacctctgcctagggtgctgggacgcgagcctggaggcagagccccgggagggtactgcgtggaggaaacatctgcccacaggttctggggcgggagcccgggacgcggagggccgcgagccgagggaacctgggggtggggaggagggggatgcggtaggggaggtgctcctgggtccgcgcgggtggcgggtgccccgcacttatccgttggccagctgcgttccgggatcagctaccagacggtccctgagatgaccgggaaccgggctgggggaggatagagccgagactggaggatcgattggcacctccgcccacttttcccacaacgccttcccgaacgataggttggaaaggctc

SEQ ID NO: 10234 - DNA, 2300 bp, Homo sapien
ccctcactagtctgatgcctgggctgaaattactcagaagctggtctcggcagtgacagtcaactggagcatgcagtagtttgggttgttttgcagcatgaagatagttagacctcttattagtcatctttatacagctttatccatcaccagacagtaagcctcatgaatgtagagcgtgtttgttatttatttcatccccagcacctcgcatagagcttgttacataacaggtgttgaaaaaatatttgttaaatgagtcaaggaatgaatgggggggggtggggcagaaggttaaggtggttcacatgtgcagtcctcagttttctcacagatgtaggaagtaaggtctccttctgagaattagaggtggatgtcgagaaggtcctggcagaggggtcaaagttttggaaagtcactgtgggctggatggaataaaagggcaataccatcaaactatgtgatcacaggactttctctatcagtgtcttctgcctgggtgaacagatatgacagtttcttttaattttaaacagggtcttgctctcacccaggctggagtacagtggtataatcataactcattgcagcattgactgcctaggcttaagcaatccttccaagagatggctgttttttgtgatgactaaggggatgggtgttattccaagtgtagacataagtttagggatgcaaaggaatctcagagtgcttaagaaagagtggtccagtgagcgactagggaccagcttcctaggatagtaagtgaggatgctggtgggaagtggagggatgaagagactgactggaggtcaggtccaaggctggcagtgactagagtaaaagggcagctggaaggttgtggtcagaaggtggaatattggaatttcagatttcttaagtgtgtcaaattcaggtcgtgacagattccagggtgatttcttaagtgtgtcaaattcaggtcatgacaaattccagggtgcagtcatggtgtgggtatctgaagagcaagtttcaataaggctcaaggaagggtagctatttgtacgcttcctgggaagctgtcagcagatgagagggactctgggtatgagtataggtgtttttcttgagcaaccatgtctctcttcccaacagaagtctgatttagtggaaacagacttttcaggatttttctagtgcaataatcaaatctctaaaaattggcttacgatgaaagtgctgcttagtcaaaatagcatctgcatatctttgatgccgtaatcatgctatccagagttccttaataccaatggtaataaggcgggtgcagggagcagttatctgtggtgaagaagcttaattgggtgagggatatccatgtgccaagatgaaagagcatttatggaactttatagctttatgattcatacagaacatttataaagcattatagttacatggagtattggtgtccagatactagtaatcacagacacttctataatatttccactatgccaggtgttgtgttgagggctttacatatatgaactgacttcatcctcccaatagccctttgacatatatactatcatcattaccattatcttcattttacagatgaggcaactgaggcccagagaagtcaaatcacttgcccacaagtcatacacttagcaaatggcagagccaggatttgatcacaggtaaatcctgcacatactggaaggaggcagttagcccctaggccttctgataaggaaatacagggtaatactcacctaatcaaggctaataagtagtagagctggactctcatccacggctgtctgagcccctaatctccaagtcagagtggttcatttgcccagatgacgacctttagttgtgaaaatgatctctggcctttgcagtcttccctggtggaaagaaagcttcagaaaaccttactggtgacaggaagtagttgctcaatacatgtttgtggaataaacaaatgagtgacgattgccacactcccagtgtcacagttggcccacagaacacgttttacagttgagtaatctcagataaagacaggaacatggtgtttataagctgcccttaatggcagagaacacagacagaaacgagggaagagagagaaattggggaccctgaagaaagggggccagcagcaggtaggtgccatcagggacaagaacagcacctcccagggtgggagaccccaggcctttctggcagcaggtctggatggaaagtggacaggaggctcacccgtctgcatcccctgctcctgcccctgctcggctacaaaa

SEQ ID NO: 10235 - DNA, 2300 bp, Homo sapien
agattagacaaaattatatatctaaggacttacaagtttaaatttttttttgacaggaaagggcattctattgtaaactgtgaattcttactattcataggttgatgttctcaatcaagttgattggaatgcctggctctactctcctggactgcctcccataaagcccaagtaagtacttgcctgctaatgctttccttctcattctcctaactcctagagagcctcaaaatatctgaaagaatagtatgccttcctgaaactgttactagtaaatgatgaaagcagagttcttaggtgttttggccttaaccctgaggccaaaagaataatttctgcagtttacaaatatggtttttcacttcaagtaattgagtgcctcctttctgcacaaggatggtgagggatttagacaataagctattgtatcttccttcaaacttctgcaataaaaatattttataagtattatgttaattacaacactgttataagttattatccccatttcccaaggaggtaagttaggtttagctaggtaaagtgtcttgccctaggttgcacagctagtgagtagtaaaagttgagattcaaaccctggcagtcttattgcctccaatatactgctttcttccttctttttttttagaaacagggtctcactctgtggctcagcctggcgtgcagtgatgtgatcttagctcactgcaccctctgccttccaggctcaagtgatcctcctacctcagccttacaagtagctgggaccacagatgcgcactaccacacccggctgtttttgtacttttgctagaggcagggtttcaccatattgcccaggctggtctcgaactcctgagctcaaacaatccacctgcctttgtctcccagagtgttgggattacaggcgtgagccaccgtgcccggcctcaatatactgctttttatactgaaccccctccttcaatcggacctgaaccctggtctttcacgagttgtgtgaggacactgaccatggcatgttccatggcatgttctcttgttgcctttcttttggatcaccaaaattgcctaccagcttctcttacactaaacaggccagtttaattgatgttcagggagcagcaggagagaagctaagaaacaagatgaggcctggtcatgtttgtttgtaaagcactttaaacagccaggccgagaagtgtttggttgagaagttactgggagttctgagtatggaacaaatgtggtcagagcgccccactaactgggcagtcctggttatcataggctgtggtgggaaacaggagctcaggtagggaggggtgattacgatagaatgtttcgaattttgtgttggaaacaggtggcacaaatcatcagtaaacccttttaacgtctaaaaaaggtatcagcaaaaataatactttagatttttttcctagcacttcattaagaagtgccatacattatctcgttaatttttacaacagccttgctagagattatgaggacctgaagtcatacaaaggcagtggaaaagaaaggagtaactgagagaagagacgtttgggggctagaatctattggcaactgattggctgtggtgagaaaagaagaaattaaaaatgactgagcagagatgtaataaagattcagctcaatccagcacacatttattgtcaggcactaatatgatgaataaggaactcacagagcaaatatgtatgtatcaagtaattataatacaatgaaaagtattttttttaaaatattaagtgttgtgggtgaggaaactattaattttaatggtgatggatttggacatcgtcttggagatgacttacaaaggagaatacaagaagtaaactgtagaaccttagaggatcttcattttagagctaggacagaggaaaggtagcaaaataaatggaaaactaaaaagatttcaaaggttcattgttaagaaagctgtgggaagaaataatttaaaagtggtacggagagtggtcagcagtctggtgtgctgtagaattatgaggagcctgagaataaaagcatagaatttggagtttggagtctttcaaagactctaacttcaggggcctgatatagccaaaagacagttccaggaagtttaggagtggagaaggctttgcccattgcttttaaaattggggaaatctgggtggaaaattagttcttcaaaagtgtttctttgatatcaccgctgctaagggatcctttttgggcgttggttcattctagatcccttaagattgctttcaagtaataccaaa

SEQ ID NO: 10236 - DNA, 2300 bp, Homo sapien
ctcaatgctgcattcctctctagcttcccctttatcttcccttctcacattggccaagcaacttgacagtggtttatgcttcacctccctcttctcttcattgctcaatccactactctctggcttccatcttcaaccaaatcacgacagtcaacaaaatcaccaccttccccattctcaccccactgccaaatctagagaattttcacttcttacttcggtggtcctcgggactgcatctggcattgttggttggctctttctggtttatttcatgggtttctcttcctctagccctttttaaaacaataaattctggtgttctctcagcttccaacctgttttcattacccttctctttacacactcttcttgggttgagcttacccactgtcataatttcatccaccacgttatgtgacgtggtcatgtctacctggcacttccccagagctgtggacttaaatatccaagtgactcatggacatctccacttccactcccataggttctcaaatttcatatgtccaaaattgaatttagcatcttccccttaaatctgtctgatttagtttgaatatatgtccctaccaaatctcatgttgaattataatctccagtgttggaggtagggcctggtgggaggtgtttgggtcacgggggcagagccctcatggcctggtgctgtcctcgccacagtgtcttgtgggatctgattgtttaagtgtgtggcaccggccccgcaatctcttgctcttgctcgggccatgtagaggcctgccccttcttcaccttctgccatgattgtaagcttcctgaggcctacctggaagcatactggagctatgcttcctgtacagcctgcgtaactgtaaaccaattaaaccccttttcttcccagtctcaggtatttatagcaatgcaagtacagcctaacatactgtcctcttcatatagactactacctctggttaatgactagccagccactgaagccgaaagcctgggccaccttcgtctcctctcaatctgtgaatccacttatataagtattccttctattcattccttcctctctatcctaacttactacttacctatgtcaggcccccagcatcttctgattgagccattttaatagtttcctaaatctcctgctaatggttttgataccgcattttataacatgagtctgaccatgctttatcagtcgcctgctgaaaactcttcagtgggtcccccattaatgcacccaggattaaaaggccacctatttaaggtccttcgaaacctagcctcttccaatttttccagttttaattttgaggccccaccctaaaggcaaggcatccttcaatcctccttcacctgccacaaaggccccagagctgagctagatgtcccagctctgtactcccattgcgaccagtgcataacttttatagaaattcattagtttctaagatgggaatgttggctttctccgtttgagagatgcaggttctggggatatacataataaacactgaaactgacaaaacaactgtttaaaccttgaattacttacagctaaaaacaaaaaacaattactgtgcctccccgtcggggaatcgaaccccggtctcccgcgtgacaggcggggatactcaccactatactaacgaggaaccgcacgaaagaaagccttctgataggccttttctacgtttttgctccgccccgccctcgctatatgcaaacaccaatgaacctgattttcttacgtttgccaccacagcttccacgaaagttgaacagagccaaaatggtagtgttcagttttatctccccctccattctcatcatttcccttcggccacccttctaactgcccctactcccctcctcttcttcagctccaggagcacgcttggtccccctcaacatccctaacacacacgctcccaggtagccaagcgcccgcttgccgcgcggcaccatggaacttgtagttccttcacccatcccccaacgctcgtctgactttaagaaacttcctttcccggcgtgcaccgcgaatccctcctcctcttctttacctctctccctcctcctcaggttctctatcgacgagtctggtagctgagcgttgggctgtaggtcgctgtgctgtgtgatcccccagagccatgcccgagatagtggatacctgttcgttggcctctccggcttccgtctgccggaccaagcacctgcacctgcgctgcagcgtcgactttactcgccggacgctgaccgggactgctgctctcacggtccag

SEQ ID NO: 10237 - DNA, 2300 bp, Homo sapien
gtgcttctttcattttggccttcccagctgcccaaaccttgggtttttgtttttttttttttttttttgagatggagccttgctctgtcaccaggctgtagtgcagcggtgcgatctcggctcactgcaatctctgcctcctgggttcaagtgattctcctgccttagcctcccaaatagctggaactacaggtgtgcgccaccacgcccggctaatttttatatttttagtagcgatgggttttcaccatgttggccaacatgctcctgatctcctgacctggtgatctgcccaccttggcctcccaaagtgctgggattacaggcatgagctgccgcacccagtcccaaaccttttcttgacatgcagaacagactggagatgtgactataaatatagaattcatgcgcatggctgcacaaggaagaagaaatttcacagaagatggagaaactggtcaggattgcctcaactatgttgtaaggtgaacattaaaaatgtggctaaaatcatttcttctatttgctcacacactgaagggaggaagagaagggtgtcacatgcaccttgttctcttagcaagggagattctactagactctagcccagactggagggtggtggggggcagagtcctgaaggggaggaggagagccctgccaaggttgcgggaagagtgggagtgggaagggcatgcaggctcaaggaagggccagagagtgcagagagcttgaacaccttggttcagcatggctgacgcagggtgtatcgagccactcaagtggaagctgcagagccccgcggggccagtggtagacactatgaagtccacaggaagtcagcaagggctgtttttgtttgtggtttgggattccagtgacctttattttttttcatatcaataaataaccttttgactgggaaatatattcacattaaaattcaaaaggcttacaagattattcagttgaaatatctacttttcacctctgttctttggccttccttctctgtccacacaggcaaacaataccatgagtttcttgagcatccctccagaagtattttatgtagatatgaacaaatttttagaataaattctcttccccctttttacacaaaacagtgagtcatccatagtcagaatttcatcaggctccctgaccacactgctcctttatttttccagatgtcacttgtcatccaagacacggacttccttggttttccttcttcatcgaggccattcctttccagtctccatagctagcgtctcttcttccccctgtgccatccacatgctgaactcccaaatgtgtatctccagcccagttccagcttttcttctggactcatactcatatgtccaactgcctactcagcacctccactcgaatcacagacacctcagattgaatatgtgaaagattgagttgggcacagtggctcactcctgtaatcccaccactttgagaggctgaggcaggaggatggtttgaggccaggagttcatgaccagcctgggcaacatagcaagaccgctgtctctaaataaataagtaaataaaattaaggggaaaaaaaggattggactcctgaatttaccctcgcccactccagtctgcttctcccacaatctctccttctcagctaatcctactacattttcctggtttatcaggtcaaaagtcttggcattatctttgactcctccctttccctcatactccatatctaaactgccaagaaatcctagtaggtctgccttcaaaatttatgctgaatttgatcacttcttaccaattctactgctgattcctgggtccaagccaccatcatctctcacctgagaattgctgcagcgcctacttttattctctctccagtctgttttcctataataatcaccaataaaactctctaaatggaaaagaactacatgtttgtctttttttttttttttttttttttgagacggagtctcgctgtcgcccaggctggagtgcagtggctcgatctcagctcactgcagactccgccccccggggttcacgccattctcctgcctcagcctcccgagtagctgggactacaggcgcatgtttgtcttttaaagcaacaagggaagagggcaagaggatgcatgggcttgggagtttattttctctcctcctgtctacacctcctctaatctgtctcccatgctgccacagagaaatctttctaaaagacaagtaccgaccatgcatatcccagttaagactcgtcgacttcttgcagccttaaaggtaagttccaa

SEQ ID NO: 10238 - DNA, 2300 bp, Homo sapien
gaggccgaggcgggcagataacccgaggttgggagttcgagaccagcctgaccaacatggagaaaccccgtctctactaaaaatacaaaattagccaggcatggtggtgcatgcctgtaatcccagctactcgggaggctgagacaggagaattgcttgaacccaggaggcggaggttgccgtgagccaagatctctccattgcactccagcctgggcaacaagagtgaaactctgtctcaaaaaaaaaaaaaagaaagaaaagaaagaaaaagaagaaagaaagaaagaaggaaagaaagaaaaagaaaaagaagaaagaaagagaaagaaagaaagaaagaaagaaagaaagaaagaaagaaagaaagaaagaaagaaagaaagaaagaaaaagaaaagaaagaaagaaagtagtgaaaatgcctaccttatagggttggtgtgaggataggtgagttcatatacagaaaacactgtcacatagaaggtactgccagagagtttgccatcattattattatggtcaccattgttattgttttctgccctgggaaacctcttgaatagggaatctgttagagcctgaatgcactttacatgagccccaaagaaggtctaaggacccagggaaaataaaattgagaagaagtagaaggagagtaaagctcctatgcagattttcttggacagattttcactgtttttgaaagcttttcacactattccaccacattctaccttacctgtaacccttatcaaaatgccctgacccattgaaccaggctgcttccaagcacattcaaaccctgcctttagcccaatattttgaagcaacattggctacaacaacatttggcccttctctctcttagttattgtgggtttttctcagaatattttagatgattttagatttagatttagattttagatgtgcccttccttttggcatatgacagggttacacctctcgcccaccttggggggttggttggggttaagtgactagttctggccaatgagttgtgaaagccagtgaagtgtatcacttgcaggctgaagcatttaatggccggtgcagttggagagggcaacagttccatcagcctgcatccctcagtggctttcataattgaatggtatatgtggtatgactctgtttatgttactaaatatatattatattcataaaacttctggaaggatattcactaagcccatagtagtggctctgtctatgggggtaagattgccggggtgcagggaggaactcttccactttctagtgtcttgctggacttcttataagaagcattcattatctgtgtgatagtagtagtaatggctattgttcattgagcacttacgaagtgccaaggatgccgctaagttcatgtgacaatcttcacaatgtaacaccaggaagaagggttttttttgtttgcttgtttgtttttgttttttgttttttatcatccctatttaatgaagagaaaatggaagaacagagaggttaagtaatttgtcccaagtcacagagctacgaagtgtcagactcgggatttgaacccagttagtttagctacatgatgcgtgctcttagtcactgcactacaatctaaataatactgattctttttttttttttttttctagacggagttttgctcttgttgcccaggctggagtgcaatggcacgatctcggctcactgcaatctccgcttcctgggttcaagcaattctcatgcctcagcctcccgagtagctgggattatgggcatgcgccaccacacccagctaattttgtatttttactagagactggatttctccatgttggtcaggctggtctcaaattcccgacctcaggtgatctgcctgccttggcctcccaaagtgctgggattacaggcgtgagccactgtgcccggccaataataatgatgattttttttttatttaatttaattttattattattattattttatttttttttttattggtcattcttgggtgtttctcgaagagggggatttggcagggtcacaggacaatagtggagggaaggtcagcagataaacaagtgaacaaaggtctctggttttcctaggcagaggaccctgcggccttccgcagtgtttatgtccctgggtacttgagattagggagtggtgatgactcttaaggagcatgctgccttcaagcatctgtttaacaaagcacatcttgcaccgcccttaatccattcaaccctgagtggatacagcacatgtttcagagagcacagggttgg

SEQ ID NO: 10239 - DNA, 2300 bp, Homo sapien
tctgtgctcctcctgtccacccctccctccctgctaacccctgacaaccactgatcttttgtactatctccatagtgccttttacaaaatgtcatatagtttggaatcatacagaacatagccttttcagaccggtttctttcaggcatatatctcctaaagcaaagcaacatgagttcttaactgtgtggattttttttttttccctgaggataataagtttacattctctcagtccaacagctggatcatatagggacaccataggtgttctactgagtgacagaagaagatgactggggattaaaacaataataccctaattggaaaattagctgtgggaaatcaggggttgataagcagccctcttttccatatcttctccttctgccccactctcctaccgtgcccccaccctacaccccacgggtttcccactccttctcagaggtctggagggcattctcccaccctttccagtggactacccacaggagccctgaagcaaatgcccgaaggaaattcctatcacctgtgtgctctgataggcacttggagctgggatgtggtactaatcagtaaaacataccccgtgccctttagcagctcacagttgatggcagtgagaaatttgtaaacaaaataatctttcaggagagactgcaaaactagaaacaaacgtagtggaggaactcttagaatgtggtccttttgaaaggactcacacccggcccccagagaatctgacttaattggcctgggttgagtatattgttggagagtgtcaaaacactccccaggtgattctgacattagccggggcccggaaccacccccgacctactgaatctgggactccaggagaggcccagccactagtggtttaacaagccccttgggtcaagtttgaaaaccaggggtctgggctgctaagtggcggcatgggaatggaaggttctggaaggtgagcagtgaggttggggcgcaggcctgggaagggagaggctcttcaacagccatcccccccaaccttgtctcagcctagggcaatgggcaggctctcccatcagagcctggcctgagccctcagaggcaggacctccttgagggatgtggaggtgtgaagaccagttctgagaccacagaggctcccttcaagcctcagtctctgaccctgcgggcattatttccatgacttccagtgttgtggctccttatcctttccccacaggctcgccccccaactgagggctggcttttttatttttttgagacggagtttcgctggttgcccaggttggagtgcaatggggcgatctcagctcactgcaacctctgcctcccaggttcaagcgattctctcgcctcagcctgccaagtagctgggattatagggacccaccaccacacctggctgtttttgttgttgttgttttggtatttttagtacagacggggattcgccgtgttggccaggctggtctcgaactcctgaccttaggtgatccatccgccttggcctcccaaagtgctcagattacaggcgtgagccagcacgcccggccgagggctggcttttaaaacaccgaaaacccagacaggaacggtgtccatctccaaccccagacggaaactgtgcccgcacccacaagaaaagcagtcctttgcccagagcaaccaaaccctgaaccccactctcgattcccctctgccccccaactcttccatcccagcggatgggaaacagcgagtccagccgcctccccacctcgggacccccctcccgggccaactgcgcagggcacgaccccgtcgtggtgccccgcgcgctcgacccccaggggttgaggtgaggagggatccccggtgtcccgggaagcgcggcggcttctgcgggttgcgggcggacccccctccccgtggggaggggctgcggccgcgcggagtcgccgcgggtcggaggctcctccccggggtggccgcgcaggaagcggggcgggtgggggcggtgcggggcgcgcacggggccggggcggcgggggaggcgcgggcctgggcggccagccccggcgcacagccgcggccggggcgcgcggcgcggggcggaaaagcctgtttacacagactgcacaccgcctggggaataatgcagtaaaggaagtgagccggctcggcctgactgctccaacttcctgctctcacacacaccagaggggaaaaaaaaagaggagcgagagaaagaaaaaaagggggaaaaatcaggatctcattacaagagccacagaccgtctgcagacgcc

SEQ ID NO: 10240 - DNA, 2300 bp, Homo sapien
cctgtaatcccagctacttgggaggctgaggcaggagaatcgcttgaacctgggaggcggatgttgtagtcagctgagaccacgcaactgcactccagcctgggcaacaagagcaaaattctgtcttaaaaaaaaaaaagaaataacaaaccaatcaatcaaataatcacctaagttttcattatgaattcgtcttttttttttctttttgagacggtgtctcactctgtcacccaggttggcgtgcagtggcagaatctcagctcaccgcaaactccgcctcccaggcttaatggatcctcccacctcagcctcccaattacgaattctttgttatgctaatgaaagatgtagaaagaggagagggtgctttggatgagacagaataatctttttatttctcatggagtaatgttaatctaatgatatgaaggtataagtattaatgctgaaactcagaatgccatttcatagactcccttttttggtgattttttgatatttactaaagtactaatttagatgaggcaagtatatgaaaatcctttcatataaataggccttgtataaatatcagtgtttctctttaacttaaaaagaactctgaaaatgatgctacatcttgctatattataaagttccaagtttgacttggacaaatctaaaaagcctcattaacagtgcttttaaacaaagcgcacttgttctaacggaaagcttgttatgtatatttgcattcttggttggtaaacaagtgttaaatacgcgtagagcataattgttgctaatttacgggtcctggtaattttagaggcatgggaaaagcctgattgacacgtacgatcgttggatataactgtagatgcatttaactttgccaaacaaaataagagaaagatgtcagcatgcagcatttttaagggggaaaggattcatccctaaatccaaaaagataattccccgaagttcttagcacataatgtgatttgaaacttcaaagcagcttctacttccgggtgttaacatgggaaaaaaaatttatctcacttcacaggacttttatgtgggtttttttttcttgtttatgttgtctacatccggtccctactctcttctttcaatcctctcattatctccctctaggggtttaagtttgttttaactttatgcttttatccttattagtggaaaaaagtgggtcagtattactttagtttgtcttcactgccactctgctgttcattcctgaactagcttttagcctctgggaaaggagaaagtaaaaacagttgcagaaactgggccaacctctcgcggcccgcctcccccaagaaaacaaaacctaacccgtgcaacagtagtcctttctgttttcatagcaccttgtatttctccgctcataacgttcagatttttatgatagttattgatcatctttcatcccagctagactctccgtccttagaggactcagcatattgccgggcacatgataatatatacaaaacactgtactgtagtttaaatgaatagatgccgtgtgtgtgagagactgcggcactagtacccacgtacccacacacaacaaaggagaaaagttgcagccatcaacatctttcagtgtgggtcctttgacatggactctctagaaagtcagtggagaactgtggcatggacaccttgtacagtaattacttgtataactgaagcacgagttttggtttggtagcgggaagttgaggggcagggggatgttggaggggctgaattattcacataatttctcccccagtcgctgcggacaggcactcattccggtggggtcccctggccccctccgccgctcccccgacgcccgcatttcggagcgggcagtttcccggggacacccgccccgccctgcaggccccgcccccggccgccggccccgcccccgcctccgccgccgccggcaggggtcgcgctgcccccggcgagccgctcaggcgggggtggggtaagctcccgcggccggtcgcttttctccgccgccgctggttggatcgtttcaataaaagtgttttttctcttgcactcgctctcctccggggaacaggcggaggcgtcaatccgcagccgccgagtgtgaaagcgacgcacacgcaaggagcgaacgcggccgcccgcagtctcctgagctccccgcgggccgccgcagagccgcggagaaggagccagcgcccggccagacagtctcagcccgccgtcggcgcccgccgcgctcgcgcccggctgctccgaggggattagtgggccgtccg

SEQ ID NO: 10241 - DNA, 2300 bp, Homo sapien
ttgtttgtgacagtagccagattagaaggaaaaacaccactttgtcttttatttttttctttccttttctgtgaccactttaattaattttatcctgctgtttcactttcatcaatataatagatagcactcagtggcaaattacaccagtttttgatctgcaatggacaagtctgccatgttagagcaagaaaaagatgagaaaaaagagaatttaccaagccgacttttaaaaatgtctattaatatttttgtaaatgcccagtgattatttctctaggactacattctttaaagccttacaatttttgttgttcacttagagaacaagataaaatctttgttgatcaaaggatgatatctacatcctgattagagaattggactcctacagtgaggtgtcattgcgtctcactgcttgccaggaagtttctctggctataattaactgtgccgatgagcaaaattattttccttcaaagaatattagggtacagtagacatgacatattaggccagcctcacaaattagcacaggcccacagagcctgcataaaattaggtcagacttgaaagatatcaggctgtggtccaataagcttcttagtctgaaatggaaaattgggttcacagggtgttagggtcactgtctttatttaagtgtgatagaactggtaacaattttcagggttaaagactgatttttctaagccaccaaatatttctggttcttctcttagataatttattgtgttgcataatttatagaaaagaaggttctccattttctcaatactcatactttaataaatttaactctgacttttgcctataatacacaggctaagaataaactccccaagtatttccctggaggtctgtagtttccccatcagaagtaaagtctcctaaaagccctgtttaaaatgcaaagtattttgagagttaacacttcaggccactagtatgtattaatgtcctatggttaaggttgagcaaaatgcacattaatttagaatacagagataattaaagtaaggctggaatgtgcataaatagatgtaatcataattattagaggcatagacatcatgtccacagttacagacctcaaggtacaaatagaggaaagagaatggatcagctgcatattcagtactccctggctatctgtgggggactagttccatgacacccgcagataccaaaatctgtggatgctcaagcctctgatatgaaatgctgtagtatttgcatataatttgtgcacatccttcaggatgttttaaatcatctctagataactagtaatacctaatacagtataaatgccatgtaaatagttgtattttgtgttatttttattgttgtattgttatttctaattttgttctgaatatttacaatctggagttgcttgaatccacagatgaagaacccgagatttggagggccaactgtatttgattcttaaactgcttgtcagatatttctctaatttcaatttgattaataagctttgttttggggagtgatcaatacagcctattcattttgagcacaggctttggagtcacaagttccctttggaggacctggtcgctgacactacggttgtacgctgacttttgtcaaatgacttaacctccttgagctttggtttcctaaactgtgagatggatatactaatagtatcctaagttgtaaagtagttatgatgattaaatgagataaatgaaagtacatgtttcaaatgcttaatgcctgacacacgttaatggtcatggtcgtcatcattatcgttattaagtggccaacatggataaagagtatagtctggatttgtgaccttaaatttttggctctaatattcgccagcgctctgctcagaacattctctgttcgcatttcatacagcggtgccagcgcacaaccaggcaacgccctcaggagcatcattgttttctggacctggttctttctcgctctgccctccaggggccgctgtgtttctcggaatgcgcgcgggatgcccggttgccacgagaccgtcgccaggcaaccgcgtgtacacatactccaggcgggccggggcgcgtcaatatggcggcgcagggctccccctcgagctctccgtcagacgactctaccacctcggggtctctgccagaactgccgccgacctccaccgcgacttcgaggtcgcccccagagtcgaaggggagctcccggagctcgctgcttcagtggacctgccccgaggactcattgcccctagccgtgttttatgggccgctgga

SEQ ID NO: 10242 - DNA, 2300 bp, Homo sapien
gagccgagatcttgccattgcactccagcctgagtgacagagtgaggccctgtttcaaaaaaaaaaggagtgaggactctggagctagactacttaggtttgaatccctcccatctgccactctttagtcatttcatgttgggaaaaatcacttaatctccttgtgtttcagtttgctcctctgtaaaatggggaggatcatactaggactcctctcatagggtcattatgaagattcaacatgttagtatttgtaaagctcttagagtgtttctcagcacacagtaaatgttatatacatgtattttattattcctactcatttaccttctcacttttgtttttaggatgttcaacctgataaagaaattgttgtggacacgataatgttcctatggcagaaatgcaaattaggaattcagcggctcaatatatccagaaatgactatgcaaaattcacccagaaaatcagtactaacaaagtattcctttcgcattccctttcacgtgttttttttgctattgcttattcaagttgccacacacatttcaaatctaaatttttcctatttttcacctggttaatgactttcatttgcatatatacatatataaagaagatattctttctagcgctgagtgaccctttcttttaatgtgtgttccctgcactcctgttctaattttgtttgttgtgaggagcgaagaggtgtttcaggcctttttttttttggcagagtcttgctctgtcctggaggctgcagtagtatggtaccatgatcttggctcactgcaacctctgcctcctgggctcaagtgatcctccacagctcagcctccctagtagctgggactacaggcatacaccaccatgcccagcaattttgttttattttttgtagagatggggttttaccacattgcccaggctggtcacaaactcccaggttcaagcaatctgctcatctcagcctcccaaagtgtttggattattataggcatgagccaccacgcccggccttttcaggtttttttttttttgtttttgtttttgagatggagtcttgctctgtcactcagtctggagtgcattggctaactgcaacctctgcctgccgggttcaagcgattctcctgcctcagcttctggagtagctgcgattacgggcatccaccaccacggccggctaatttttgtatttttagtagagatggggtttcaccatcttggccaggctggtcttgaactcctgacctcgtgatctacctgctttggtctctcaaagtgctgggattacaaatgtgagcccctgcgcccggcttcaagcttttaagtgaagaataaatatagtatgggccaggcacaggggctgacacctgtaatcccagacctttgggaggctgaggcaggtggatcacccgaggtcaggagtttgagaccagcctggtcaacatggtgaaaaccccgtctctactaaaaatacaaaaattagctggacatggtggtgtgtgcctgcagtcccagctactcagtaggctgaggcaggaggattgcttgaacccaggaggtggaggttgcagtgagccgagatcacaccactgcactctagcctggacaacagagtgaaactctgtctcaaaaaaaataaataaaaataaaaaataaatataatgtatctgaggtcatatgagcttggatcaattcaaaaagaagattaataatagagaatacagagacgtaagagtgtcagattttctccccctgcaataatatatttagaccatttaaaagagctactttataggagggagaagggtgagcatttgaatattataacctggaaacttaggagaaaaaatttaataataacaaatattatagctttggtaatttggaagctgcataagattagctacattagtatgcataggtgtgatttttatcatgtactctgttaagtaataatgtgagtacataaataccgttttataatctcaggtcccaaaatgtgatagttggttttatgtgctaagctttggggatacaggcatgaaagacaatttctttctttctctttttttttgagacagagactcgctcttttgcccaggctggagtgcagaggcacgatcctggcccactgcaatccccacctcccgggttcaagcgattctcctgcctcaggcttcagagtagctgggattacaggtgtgcgccaatacgctggctattttttgtatttttaatagagacagggtttcaccatataggccaggctagtctcgaactcctgacctcg

SEQ ID NO: 10243 - DNA, 2300 bp, Homo sapien
aggatgcaagtctctgtttgatggtagtaatgaacaagaagaaatgccagaggaggtaattgtttttgtttctcatttttaaacctacgtttagtttgcatcttttaggggtaatgtagtattattaaacatattagaaaattggtaagttttacatttgttatatttacatataagtaaagtattatagtaaagagcttttgggtttgttttttttttttttttttttttttttttttttagttatggtcaagaaaatgaaaaaggaatctctgctagcatgctgaatagtccccatcaccagtcccgaccatcagttaatgatgatagagagcttcttacacccagttggacactggacttaaaagctctctaaagtctcttccaaatctaagattttattgttctgggtggatcattgaatgtggcaaatacatgtcagagtttttttactttgtgttcaaagtagatttctgaaactctttgtgacacccgtgttctcttctttatgagactgctaatttttgagattaacttttaatatctgccttccaagcatgagtcttacaagaacttatgcttattgcctttccttgaaactatgtagttttgtagatcaagttttgaaatgttacttagttcactggcctgcctgcccgcccgccctccctccctctctctctctctctctctctttctttcttgacacagtctcactctatagtctaagctggagtgcagtgatgcaatcttgcctcaccgtagcctccacctcctcagttcaagtgattcttctgcctcagcctctgagtagctaggattataggtgtatgacaccacacctggctaatttttgtatttttagtagagatggggtttcaccatgttggccaggctggtcctgaactcctgacctcaggtgatcctcccaccttggcctcccaaagttctgggattacaggtgtgagccacagtgcctggccagttcattgggtttctgagggcactagaaattacttgaagtcccttccatggcttgggtgggagtagagactctcatccctgactctgtctaagttagagtagctccatttctatctctgtgatatcttgaatttccaagtaagcatttgtttgccaaaaaaacttttaaaaatcaccactgttttactggatgactttttaagctataatacttttttttttcctagttggaaggatgttttgtctagagggatttttgattaagctggaagcaatatgagggttttgtttgtttgtttgtttgtttttgtgccatgcagtgtctactctcagagtctatcagcccctttatgtcacccaggctttgactcagggccttccacatcatggtaggacaggcctcatgcctctcttcttgaagctttcagtccagcagaaggttgtgattcttccatccaagattgtagagattgttaatttataggagtcagaaattattagagctactcaaggttcctttaagcctaaaggggcttggaagtttttttttttgaacaagagacattaacaggtcagttctcaggctcagacagagaaaacatggtagtgagcctgagtgggcagacaggctgattcttaatccactaattgctgatccccttaagtttcaatgaaaggcaaagtaacaaaggcaattagcttagttgtaaagaagctccttctgggaaaaagaaagggaaaaaagaataaagggatacatttctgagggcaggctgggaattgtcttttcaagatttttagagacatagcctcagctgctttgagaatgcaggttttggagggggctggttaggtaggtggaagttactgggagaaagggagagagaaaagaagcagcattttggtcaatctccgtgaaacacagcactatgtctacatttaattagagcacaataactgttattattcattgttgttaattaatattgttatgtagatcatagttttatctaccaagtgtgaaagtatgaaaacataatttaaagaatgttgtttgaaaaggacagttgttgcaacacgttaaagtacattttgacgtttaaccaatgtttttaggattcttctaagaagtctttaaagactaagaagccacagcagatactactgcctgaaaagataaatgaacagctggccttgttggagacacacctactcaaactgacaaagcaatgtaatcatttgttttctgtatacttccatttagcattaagttttttaaaacgagaaactattttgttcaaaggattaagatgaga

SEQ ID NO: 10244 - DNA, 2300 bp, Homo sapien
gctgggaaaacttgctagccatatttagaaagttgaaactggatcccttccttacaccttatacaaaaattaattcaagatggattaaagacttaaattttagacctaaaaccataaaaaccctagaagaaaacctaggcaataccattcaggacataggcatgggcaaggacttcatgtctaaaacaccaaaagcaatggcaagaaaagccaaaattgacaaatgggatctaattaaactaaagagcttctgcacagcaaaaagaaactaccatcagagtgaacaggcaacctacagaatgggagaaaatttttgcaatctactcatctgacaaagggctaatatccagaatctacaatgaactcaaacaaatttacaagaaaaaaacaaccccatcaacaagtgggtgaaggatatgaacagacatttcacaaaagaatacatttatgcagccaaaagacacatgaaaaaatgctcatcatcactggccatcagaaaaatgcaaatcaaaaccacaatgagataccatctcacaccagttagaatggcgatcattaaaaagtcaggaaacaagaggtgctggagaggatgtggagaaataggaacacttttacacggttggtgggactgtatgtaaactagttcaacctttgtggaagtcagtgtggcgattcctcagggatctagaactagaaataccatttgacccagccatcccattactgggtatatacccaaaggattataaatcatgctgctataaagacacatgcacaaatatgtttatcacagcactattcacaatagcaaagacttggaaccaagccaagtgtccaacaatgatagactggattaagaaaatgtggcacgtatacaccatggaatactatgcagccataaaaaatgatgagttcatgtcctttgtagggacatggatgaagctggaaactatcattctcagcaaactatcgcaaggacgaaaaatcaaacaccgcatgttctcactcataggtgggaattgaacaatgagaacacatggacacaggaaggggaacatcacacaccggggcctgttatggggtggtgggagtggggaggtatagcattaggagatatacctaatgttaaatgacgagttaatgggtgcagcacaccaacatggcacatgtatacgtatgtaacaaacctgcacattgtgcacatgtaccctaaaacttaaagtataataataaaaaaagaataatgaatataaactatttattttttttgatgcaagactgttcaatgcctagaccttattttaaaaaagaaatgagggctgcgtgcagtggctcacacctgtaatcccagtactttgggaggccgaggtgggcggatcatgaggtcaggagatcgagaccatcctggctaacacgctgaaacactgcctctactaaaaatacaaaaacttagccaggcgtggtggtgggcgcctgtagtcccagctactctggagtctgaggcaggagaatggcgtgaacccaggaggcagagcttgcagtgagccgatatcgcgccactgcactccagtctgggcgacagagcgagactctgtcccaaaaaaaaaaaaaaaaaaaaaaaagaaatgccattgattatggacacattactatatatagtaagcattgtcattgagttctgttcaaatcaggtggttttaagttgaaataaattatcgtttcagagctcacagagccggcacagatatttttattcccattttcaagagccctttcagagaaatatatattgatgttaaaattcctaagagcaaaattacattgcataattttaaaagttagtgaaaaaatgttgggctttgattaagtgacaaaacccttcatgatttaaaatttgggagtactcacaaatgttttaaaaataaaaatagattgcatttgacagatttaattcaattttgcttatattgttttttaatatgatttttccccccttgcagtttccgatcatgtgatcctaacatgttttcactgtataattcaggaacagtattaccaacaagaaaattgactgtagaaaattataaagcaatgcttgatttccttcttacagccaaaaaaagaaaggccaacttaccatcaggtaaaataaacatgttagtttattattaaattacctctagatttttattcactaaacaacacagcacacatacacattgtggacacacaaatgtatacacccagttttccaaaggaccagcaatttagttgagttttgatattttgtaggagattct

SEQ ID NO: 10245 - DNA, 2300 bp, Homo sapien
gtgtatttgaaaagaatgtttatcctgcagtagttggctatagtgttctataaatgtcagttaaaatagttgataagtgtacagatcttccacatcttttctgatttgtttttcttatctggatgttctatgaattactgagaaaattctgtcagtctccaacaatgactatgggtatgcttttttcctcctttagctttgatacttattcttcatatatttcaaaattctcttacgttcacctatacacttaaaattgataatggcttgtggttatttaccattttatcattatgaaatatttctctttgtctctagaaatattctttgttgtgatggctacttttggaaatctgtatatgtttatataattcatatattagcaaggcttctaacatttggcatctattgttcgttaaactattatacagaactgaggaaacagtgtatacataggcacagaggcacggacaaaaatgacaggactgtttcagggccagtaagatttgatgaggccgcagcatcagtgaggacagaggaatggaggtttccatttggccctatacgctgtgttatggctcttgactgtatagcataaaggtctgggacagtctttgcagtctcatggtcccaggtttaacttctgaatctaccatttattaaacttgtaaccttggacaagttacttaacctctatttcctcatatgtaaaatggggacaaataatagcacatacttcatgtgtttttagaaagatgaaattatatatatattgcatacatacacattacgtctatatacacaaatacagtgcttagtaaagtgttcaataaatatctatttttatatgtataactagtattatatcatataatatgtatatattatattacatgtattattatatatattttcatatagtctagtctcaattttcctgctggcttcaattttcagagatttaattaattgccctttttgtttgaagttttcttttctccatttgctcccattctccctgcccccactcccttaccgtactttcttagttcccaactttctgggcctcctccctgcccaaattggatttcatagcctcaagaactgcagactgtacaattaaggtagttgctgcttgctatctttctccttttgccactcccccatgaacctcagtaacttggctacgatttcaatttctgctctgaaaaaatgcacttattagaattttccaattatctgcaatatgaatgcagataactggggctgatgtacctagttcagaaacacaccccatgtagttgtgatgaaagaataacactttttgcagaagaaatgctctatatttatgataaatattcttagcaaaaattgtcagtagagctataaaaggacctttggaaggggcacttgaaaactcggctcagcaacttccttttccaccttgaagtatccccttcaaaagaattcccaaacagatgatgtttgatgttccggacctcgcagcatgatgcgaaagaaagatcatgggttttgaagtaggttagtgcagacgcctactctttgggttatttctcagcctgagcgcgtttcctggcttgtaaatcgcatgtaggaatcctttcctaaatccacatccacaatagtttcccttattatgggtcttcgtgcatcttatacctttcattatcatagtttcactttccatttaagcatctaataacgtcagcttcctatagtgcattgtaagctccacaaggccaaggaccacgagaattcactgtacccctgtatccccaggctaaaccatcactgtacactcaagagtctagcacagtgcctggcacacagtaaacagcaagtgaatgacaagcagttggcagtggccggagctccgtcgctggggcgtggagagggccgccccggcccgcagttcccgccctgacactgggataacttcccccgcggctgcccagcgccgccctgaccagaccctctgtaccccgacttctgtccggccagaagccacagccgcacgcagcgcctcgccccgtgacgtcactcggggcgggacttccggccgccgaagtttaacagtccaggcgggagccggaagcccagcgcggagccggccgcggccccctgttgtgttgctgcggagaggtgaggttccggaggccctgaggtcagcgggcccccgcccgccgcgtccgcgcaccctcccgatcctaagacccgctccgtccccctcagagggcggggcggcggtccttgggctttgcgcgcccggagcggttgct

SEQ ID NO: 10246 - DNA, 2300 bp, Homo sapien
tatctgtctactctcttgaagaaggacacggctttgatcatatttgttcaggcttgacttggccggaggttttaggttcttagtctcaagtcagcagtctctctctctctctctctctctctctctctctctctctctgaaacacacacacacagagacgcacacacacacaagcacacacatacacaagcgcaaatcctctctttctctttctctcatttcccgtcataggttctatgcaggcagatgagtgtcacagctgtaactgaggcacagagcagtacacacagtggagccgatttccgcgatggcgagagggggcaccggaggtgacaacaataacaagactgtccttcggacaagttttaggtaagaaaatatttatgccctgattcttgtatttctgcactttgtgtctgcaacattgggatagaaagcaactctggatagggaaatatctttgtgagggtatcatctgtgctgtcacttgcctgcaaacctgtgttctccgggctttgtgttactggaatcgtcggaggtgaagtgtgagcggagctgagtggaagggtgagctgctttttgtgtctgtctggtgatattcagcacgctgtttaaatttatatctggaaaaaaattctgtttgatgatagttagcaatgttttgtgcaacgtagaagagcatatggccatgcagaattcaagggatgctctttcattcttaatttgtaattatttttacactcaactgtactgaggtcagagagtttcaaaaattaatgagattccctgtggagttcaaatagtaatatctacgtgagctgtcacaaaaagataagattatgatggtatgttttcaacatagatttaactgtcttatttggaacatactccatttgaaatatatatgaaatgtacaatagtttatggaagcctatatgtttttggaaattagttggttttttttaatgatgaggagaaattgactcaaaattagactgtagaggatgaacactttgtgtagagatattactaaaacttaatagacattgttatggcaatagagaatatcttatactttcgaggaaataagaaataatgaatgagtcgcacgctaaaaagaaatctgcaaatgtgttttcatttcaagtaatacaaaaaaactcagcagatatttatagtgaaacattgctggcatgaacaaagaagcaagtgtacacatagatgagaattctttgtcacaaaaatgagtccaggacatcgatttaggaggttaagtgatttttatgttcttagtgccccacaaaagggagtctattgggatgagtccagacatttaaaaatgtaccaaaaactttcatttcccacaatttaaaagcattgtttatgttcctgatacaacacattgtttaaatgagggggaccgaaaagcagtctgaatatgcagtaatcggggctaaagatggtttttatccccaggtccccatttacaagatccattcggagcttcctgtgatatattgttatgtaaatactgttcagccagggaaagcagtactatggagattcaatttactttgaaagttgttcattatagcagggatgaatgttatttatttgatgtgattcaaaggctggaaatgactttttcattgtggcaccttttgtaatgggtgcagggtgatctaatctttttaattttggctttcacaccagtggagatgaaaagagatctgaactcatttatcggttgctaggtccttctggaggcccaagtcctgttggtggttgctatggccagtctgacctcaatctccgtggttttggggacttagcagtctttttttcttattgaggagcatgtaccttgatttatgtccaaaatcgtggctgaacgtctttgtctgcaagtgataaatggtgccgagcaattcatcagttcttacaagtaaacactgctgtcccactaaaaatatgttttgttctgagttaatggtatggaacaaggcagcctccacaaacagctatcttttattgtggaggggccactgaaacttggagcaaagtggaggagattggcattcattttcttgtacattagcatttcatttgtgattcggatgatgcagctctaggtggattgactatgaaagggtgagccttccatctccttaccttctctctagttggggtgcctgtgaaaccggcaggctctctccaaatgcctggattctgctgggggagtaagaagtcaggagtagtttgtctgatggtattgggatctgctttgcaattgccaagcg

SEQ ID NO: 10247 - DNA, 2300 bp, Homo sapien
cagcactggattgtaaggttaacctttgtgaagtaaatcttattcttccattctttcttgatggatttcagattcatcaccacatcaatgagaagatgccacagatcattgagcaaatatgcagatgtagatataacctgctattctcaacaagttttattgtgaacaaagtaaaacaaaacaattaccaaagactctgttacggaaatcacagccatagttttgtttactgtgtgtgatgatgaaagctttacctttttcacccttgaagaaaaggtttgattcccaactgaggccttctctgattcatgtctttaagccccaagtgtaccctaaaatttattatcaggtacatcacaatgtaatcccaacactttgggaggctgaggcaggagaattgcttgagcccaggaattaaagacaacctctgagcaacatagtgagaccctgtctctacaaaaaataaattagaaaaaaattatccggttgtagtgttatgcccatagtctcagctacttgggaggctgaggtgggaggatagcttgagccccggagatcgaggctgcagtgagctgtgattgcactactacactccagcctaggaaacagagagagacgctgtcaaacaaacaaacaaaaacagtgtcaatcaacctgcactgttgctatttttaaacctgtcaattaccccagtttgactattaactcttcaaatgcatggtccaagtgttacacatccttatttatacagcacggaatttaatgcttgtgttctccaaccaaacagatcctagagttttgtttgctcttctcttttcctgaagtactctaattaaataataaactattggagaaaagaaactttttttccactatggttgctaagcaataagacattactacctaaagaaaaactgagaataaagccaacaaaaaaagcaggtgtcagaggtaaagaaacagattcttgatttgaacagctggattgagctattcctgaagctaatgtacccgtagacacttcactttcattatctaatacatgctcttgtttatttaagatggtttatatttagtttattttgttcggagccaaataaacttgatgagcacagtcatttgcaagtcatccatatgttagttttgttattattcacctgcttagaggactacctagttccttcttctgtgatctgtcaatgtggctacatttgctccctccaaaggcacatcacatctcctcagcccattgcccacaaccatctctggctgatatggctgatagaacctgtcctgaagtgcttgctctgcccagtctttggtgcctgctaagccatagttccgacataacaatctctcagatgcaaagcaatatagcatattggttatgcacggaaacttcagtgcactctacatgaatatgaatgttagctctactacttactagccgtataacctcatgcaaatcatttaactgtgactcagtttcctcatctgcaaatctagaataataacattgcctatttcacgtggttgtaaatgggataatgtatgcaaagtagttagaataggctctggcaagtaggaagtatgcaatacacatggcagttataattttcactgtgatagaaccagccctccaatgacataccagaagaatgaaaagattttatatcatatcatgtgttttataaagctcaattgaaagcaggactctgctgtcttttttttgaccaatcttcctccctgactagataatgagcaacttttggtagggtaagagctatgctttgactttctgtattttcagtccagtgatgatgataagagtagacattaacatgtgcttaaattgttaatatccaataagcaataataattattaatatcaataaacacaaactctgttaatggtgaatcagggtggctagcgattactctttttttctctcttccccagtgagtttaaattccaggggacacacccactcttcctagataagcttatgccctaagtatttatctgcttttcttccctgggaaactgactggccctgaggaagaaacatgaatgatgtatttatttttctcccttaagatatgaagactggagtgagccctcatcagccagatggactgtttcatctcttccgaaatagaaacctccaacctactcagcccttttgaggccaaaaagatacccatgggccctcaaaaaccaacagtctctacaccagactaaaacaagtttcctaaaagcattttccttttgggctcatttttattacctctccatccca

SEQ ID NO: 10248 - DNA, 2300 bp, Homo sapien
caattttatctgtgttgttaaatctcggtccccatacagaccctgaaaggtggtgtagtttatcaacaaacagtaaaacaaaaagaatttacacgttgatcaatttataacaaggaaaatacttatgttatttgcataagagagtgttgccctttgttgaaattgtaatgcatgatggtgaggatggaatcaactaggatgttaaaaccaggcaccaattctgatttggactagtgtcaagaaatgaattccaggggcagccaaagttagaaatgtaaagtcagctacaaatgaggaagtgttcagatttctggagtcttggtgacttgccatccctgagggcactcttgaagagatctaacccgcttctgaaacagaacaagattttttttttttttttttaaacaaagccaggcaagtggctgccatcaggaaagtttcaggtcataatatgagatttctagtcattagtcatcggttcaaggagcaggacaccatagctctcaggaagacacaaatgtgaaaggacaatggtatataatcagtcattagagcaggacacaaagtccaaactaaaggcatgttgaggaagacacaatgaggcccagagagaggtactagacttattcaaatcccttagtcccaagcctgaattgattccaagggcaaggatgtctccatttgtgagaaaaaaaagagcaagagaaacgaaaccaagaagtgcttgacatcctgagcaattcccggatgctgctttgccagagagtaggatgccaaatatttcgagaaagcctttctggacttgaaaaggaaaaatgagagccagtcttgtcgtgtcatttgacttttaaatcatctcctggaggaaggttatatgggagatcttcagcatgagatgattctttataaggctaaattaaagcaaggattttccctagccaataaccttagaaatgcatgagctagaatatttcaagcccaaaacaaaatatgccaagaagcactgaaatcatgacgcaatgctggaaatgatatgagaaacttgggtctcaaataatatttggaagtgagtgcagataaatgcaagctgtaacaaataacttcctgttgagtgatttatgttaaagtacatatgaaaataaaaaattgaggactcagattctgagaaacaaccactcaaaaggctaaaaatctgtttccctaacggtcacatggcaatgactacacacaattttaatgccatgattcctgaattgtttttctcccatgtagaggaataaaccttaggagaagagaggttttgaactgaaaggaaattctaagctggaaaagtgcttgcatttttacaggagagacactaagtgacttggctaaagctgaacagttaatcttataatttcaaaaatttctactaccccgaagtagaatcttaaagtccaagccatgtcataaattctcctgtttctaaaggggtatttgtctttctttccttagagttaaagtcatttagaatggcttaatagatggttttagaagatgttaactcatcctttatacttcgggggaaggtgggctctggagcctggccccactcacctgccctgtgtgttgcaaccagaagctctgctttaatcctctgtactgggtatctagggatcccccagggtccgtaagagttcaagttctcaacttgctatgaggaagggatttagcaataggaggctttggattattatctgtggaatgaacagaaaccctgcctttggagagtcacttccataatttcaagacaaaaagaaaaactcaggaggaaaacaagtgctatgttgcttaccataaaaattaaaccttttctagtatttgcttcatgttcaaataactccaatccttttgggaccctgatgacctccatgtttgattcagctttgactgttctaagatttaacataattaagaatgaaaagtaacttaactgtccaagatgaggacagtgagattgccataagtgcttcttgccaaagaaggcaggctggttgtgattacaccacctcctcctcattgtcctattcttatcgtgtgctgcagtcagcgtctttgacctatatttgattccctcttgcaatatgtgcttttgatcatgaaactgctgagaaaaggctccttctaaaccacaaaacaaggtaagctgtttcttatttgtttgaatatataggaagctggtgacaaccaatttttttcctctacatctaagaaatcgaaaggtcaggtgctaggagggattatggagagtttatgaggca

SEQ ID NO: 10249 - DNA, 2300 bp, Homo sapien
tgggcgtggtggcacgtgcctgtaatcccagctacttgggaggctgaagcaagagaattacttgaacccaggaggtgcaggttgcagtgagccgagatggcgccattgcactccagcctgggcaacaagagcaaaactccatctccataactaaaattaaaaaacaaaataaagtgaggtataaaattttgttacaccagttgcaaatattttatgtaataattcagttacttctcgactttttgtaccttctgtcatacgtgaatgcatttggctctctgttttgttaagatagctttctccctccaaggttttaaatatattttctcacattttttctgttattcttttttttttttttgagacagagtttcgctctttttgcccaggctggagtgcaatggtgccatctcggctcactgcaacctccgcttccagggttcaagtgattctcctgcttcggcctcctgagtagctaggattacaggcacccgtcaccatgcccggctaaattttatttttgtatttttttattttattattattattatactttaagttttagggtacatgtgcacaatgtgcaggttacatatgtatatatgtgccatgctggtgtgctgcacccattaacttgtcatttagcattaggtatatctcctaaagctatccctcccctctccgctccccccacaacagtccccagagtgtgatgttccccttcctgtgtccatgtgttctcattgttcaattcccacctatgagtgagaatatgcagtgtttggttttttgttcttgtgatagtttactgagaaagatgatttccaatttcatccatgtccctacaaaggacatgaactcatcattttttatggctgcatagtatcccatggtgtatatgtgccacattttcttaatccagtctatcattgttggacatttgggttggttccaagtctttgctattgtgaatagtgccacactaaacatatgtgtgcatgtgtctttatagcagcatgatttatagtcctttgggtatatacccagtaatgggatggctgggtcaaatggtatttctagttctagatccctgaggaatcgccacactaacttccacaagggttgaactagtttacagtcccaccaacagtgtaaaagtgttcctatttctccacatcctctccagcacctgttgtctcctgactttttaatgatggccattctaactggtgtgagatggtatctcattgtggttttgatttgcatttctctgatggccagtgatggtgagcattttttcatgtgttttttggctgcataaatgtcttcttttgagaagtgtctgttcatgtcctttgcccactttttgatggggttgtttgtttttttcttgtaaatttgtttgagttcattgtagattctggatattagccctttgtcagatgagtaggttgcgaaaattttctcccattctgtaggttgcctgttcactctgatggtagtttcttttgctgtgcagaagctcttgagtttaattagatcccatttgtcaattttggattttgttgccattgcttttggtgttttagacatgaagtccttgcccatgcctatgtcctgaatggtaatgcctaggttttcttctagggtttttatggttttaggtccaacatttaagactttaatccatcttgaattaatttttgtataaggtgtaaggaagggatccagtttcagctttctacatatggctagccagttttctcaacaccatttattaaatagggaatcctttcccattttttttttttttttttttttttttttttgtattttcagtggagacgggggtttcctcatgttggccaggctggtcttgatctcctgacctcaggtgatccacccccctcactctcccaaagtgctaggattacaggcgtgggccactgctcccggccttggttattcttctaaaaactacattttaaatacaattggaggcgctgctctgggcccagtcccggcccggcgcgagtaggaggaggagctgcggtggctgcggccactcgcgcaggtcggcggtgctgctggtccccgggcagaggaggcgtgggcggctccgggaccacggagcctggtgacgcggcgctcccctgcccgggtcgggttgcccaggcgccgccgcggcggctgctgctgctgctgccgctgctgctgggtaggggacttcgagtaacggccgaggcctcggcctcctcctctggggcggcggtcgagaacagcagcgccatggaggagct

SEQ ID NO: 10250 - DNA, 2300 bp, Homo sapien
gtagcttggaccaatcatgttaactcatttggacaaaaccatatttttgtgatgtagatggagaggttgtatcaccttgttatagcctcatacaacccaatgtggagttactgtccactgttttagcacccccataccactctgttcatgttactttcatggttcttaccaagtaacatgaacttaccccaacacattatggcgtttggtggcttaacatatctgtctcctgatgctcaaaaaaacccatttttactcagtgtatcctcatccttagtacttagcacagtatcaggctcatcagagttgacagtccataaatacccgttgaaatggatgatctaattttaatccaaacaggagagggaagaacaaaccacaccatgtgcaaatataatttccaggtatactgctacattaggttgaatcaaaagaaattagtgtttggtattttcaaaatactaagcagaaaacctcaggaattttacaaaacatatcatcaaaatctaaaactattaatttctcatagtcttgctattcattttctgttcaacaaatatttgacacttacgtgtagggcactatttagtactaagagtcctggagcttgcaaatgtgaacgagcaagctttgcttcctgctattaaagagattaatagtcaaaagtggtgactagtcatcactcgcataatcggtgaaaacataaaaggcgcccagtccaacagcttttcccacattcctccccgccacccacctccagaaggagtcttgcttggtcacccaggctcactgcaacctccgcctcccgggttcaatcaattcttctgcctcagcctccggagtagctgggattacaggtgcaccccaccatgcccagctaatttttgtattttcagtagaaatggggtttcaccatgttggtcaggctggtcttgaactcctgacctcgtgatccacccactttggccttccaaagtgctaggattacaggtgtaagccactgagcctggcagtcacacattctttcaactgtttgtttccacctttattataaagtatttataaagagggatccagagtccctcacctggttcagaatcttgggtgacccttggcaggtcactaaccctgtgagccacagccacatttgtaaaagtgggataatagtcacacattgtgaggttgttcacagtgttggcacatggtaagggctaagacacttgattagcataatattcaaaattagaaattgtacactattgtactctctttcaaaaggcaaacagcctaaaactgtttggaaaaaacagcttgtacagtatattgtacacttcctgtgatagactagtggactgatacacccactaatgcacagcagtaatagtccacctctttacacattatgcatgttaagtgacaaaaaaactcactttaaaaggccaaatgataaaaacatcagccttgaggctcttcgatatagagtaaatcatatcttcctgcaaaccaaggattagtatcataatacctgaaagaggaaaacttaattctaacattcaagaaaattggcggcaggaatacacctcggcttctagtagtcggtagtttaaaatacaggaggaaaaaaaaaaagtttgaccccgacgtgattcgaacacgcagccttctgatctggagtcagacgcgctaccgttgcgccacgaggtcctgctgggctgtggctcgcgcagtttcttaggacaccagtaaatggcgtttcttccaggggtaccagtctttctcttccatttactctctgcccctccacccagtatctgtcggaccaggagaccgattccttcagcgtccaaactttcctgactgctagtcctctaaccaaggctgggacgtaaccagcggaagcgggagaacggggcttcccgtttagtcgggtctccaggatcaaaggaaattggcccttccttttctttaccaaatgatttccgttcttacccgccctgcccccgccccgttagtcgcgagactccgccctctctcccctcccccaacaggttccgcgcgctgagttcgcgacctcgagttgtaatctggcggggcgccactaagccggcgcaggccttcgcaagatggcggctggaggcaagggcagaggccttcagagcgttttctttttccctttcctcccttcctgcaaacaatgtaaggcattttctctcaggggaggctttcacttcatggtgggcattaaggttaaaagtcaccattttgaagacagggttgtgcacttaagggagctggtttag

SEQ ID NO: 10251 - DNA, 2300 bp, Homo sapien
aaactgagatttcaactgatgacaaggttcagaatctgactgataccgaagtggttaagacgcaagagaggaacaaattgttggagatgaagaggtcagaggtctaagaggccaagtgttggtgttgcatgggtcacctacaagcatgctgaattcagatagaatgtagacaagagggatggtgaggaaaacctacggcaagcagctctataatttctggaaagtgaccaggaggctcgtggatgatggcaggaaggagagtagaaagtgatttagccagaagatatgaacttcaaatatttttgaagcagaaaagagcagaaatggtttggaagtagcaatcaggaccaaagagaccacccaaactcaatagcccaacctcttagccttagggtacgcagaatctgaaaagtgtaatctcaattttggagctctacagcagtaaatctgcaagtaaccacctgtagctaatgtccagggattaaaaaaaagataatgaaaatgtttttgcccaggaaacattaatttcaggcgtatctagaatgcagttcttgcattatacgtactgggttaccagtcattgcaaagtcatggtcctttgcctctcagctcagttccccttctgaagataaaaacatttgcctatgtgtccagggaagctgtgaggacaaaaaaccaagcaacttttacaagggatcataaaaacctacctaacaacttgctaattaaaacctgatttttaatttgcattattgagcttaataccattgcttaaatgtatgtgaatactgagatttttataaaggaattagttacctctaggaaaataattatcactaaaagaaataatatcgcaatttgaataaaagtaagtcgcttaaatcataggaaacatttttagtgaaggcgtttgttttaaatgtattctaacctagcaatgtagaaagcaggcaaacatttaaaaaaaatttaaccagtttctaaaacatagtttggagctcagattctggggaaatgattaacacaccctacatccaaggtctcctttcctttctagaaagaaagcatctttaaacatacatattcatcagaaatacaaatatttgtcatcagtgatactaatttccaggcaaacattttaattgcagtcaatgtattagattctaccaggttttaatttggatcggtaatacgggtttgattagggttctaggcctaattataggtcactagtcttcctttaggattatgcaccatctgttattttaaattgaccattgagggggttcccaagggttctccttcgttttgttatcaaacgttaggtttaggattcttgcgggtggtgggatccaaagccagagacggtttcaacaaaaatgcaagcgcgaatttgtcttgcgtctgaacgcactgttcaaattaaacaatttagacatgccccaactatgacactaagaagtgaatggtatagtacacttttgtcacaaattcaagggtaatttaagtgcccgattgtagaggtctggcttcccctgggtttctggaacaaaagaagcgttcgcgaggagaggggtaactccccgccctccccctcccaaagtaaatcaaatcaaggaatatgagtgcctgcagacaagcctcgcttcttttcttccccttcagggctagcgtttggggaaggcaaggctgcggctactcttggagcttcagtgtcccgggaggaagaaaggcccagccaagggtcctcacactggcgtggaattcggcgcgttcgtaggcgatcgaccccagagacgaaagctgcttctcaagctgggggagggagaggaaacggcgcacaaaagcagtacgacctgtcccttatcggcgtctaaggggaagggtggagaaaacgaaaacagaagcgggccgggagcctcggctcccgccccagcgccttttaaactgcgtttctacctcctctcgctcagcgcggcggctaatggaacccgcgcgagccgtctcgccaatcaccgccgcgcttcctcccgtcgcccgccaatggcggcgcgcgttcttggggcgtgggcgaagcaggctgctcgcctcctgcctgtagtgtgtgggctggggttggtgcgagcttccagcttggccgcagttggttcgtagttcggctctggggtcttttgtgtccgggtctggcttggctttgtgtccgcgagtttttgttccgctccgcagcgctcttcccgggcaggagccgtgaggctcggaggcggcagcgcggtccccggccaggagcaagcgcgccggcg

SEQ ID NO: 10252 - DNA, 2300 bp, Homo sapien
aaaacttcacggtttaatacttttgcacagaggaccaatgaagggttctatagaaaattaggttttttataaagtgtgctgatttaaatattattttcaaacaacttttttttttttttttttttgagacgaagtctcgctcttgtcccccaggctggagtgcgatggcgcgatctcggctcactgcaacctccgcctcccgggttcaagcgattctcctgcctcggccgccgccaccaggcacggctaatttttgtattttttttctttagtagaaacggggtttcaccatatgggccaggctggtctagaactcctgacctcaggtgatccacccgcctgggcctcccaaagtgcggggcttacaggcgtgagccaccgcgcccggcctcaaccaactctacttaaagagtttaaatactaccttctttttcagagcagggaaacataacgggtaagcgggtacgcttttatttcaaaagtaaatttgtttattaagaaattaaagaagctttccgcaaaacaagatgtttaaacaataaggtgtgattggtcttttatttattgtacaaatatttggcactactatgtgccagacaccggactgaagacgtttggtaaaactttcaacttctctgaagccgagaataagattttcaattaaatttacatgtgtctattacatttgtctttcatttctgcctgagtagccgggaaaacacattagacaggttccttaaaaactaaagtaaaatttgaaggaaggaataatttcggtttaaactagtgatcattcccaacaactccaaacaccacattcactgtctcttacaaggcattttatgttacaccaattactagttttagcttcatcctattacgatttgaagcctggtaactcggcaggcataagcaaacccacaaaaagcatattaaaatccacaggtaaaaaagcaaactattctgaaacaaaacatgctttgctggagccgatttgagatttaaccaggatcagacattccaaattgcaatactgatgcaccagaatgtcatgaaataaatttttcctgaatcctaagtctttcgtttcctcaagcaaaatttaccaatatgtggggaaaacgcaatccaaactgcaattttcaaatatttgtttgcagggccgggcccggtggctcacgcctgttatcccagcactttgtgaggccgaggcgggaggaccacctgaggtcaggagttcgagaccagcctgaccaacttggagaaaccccgtctctactaaaaaatacacaaatcagccgggcgtggcggcgcatgcctgtaatcccagctactcgggaggctgaggcaggagaatcgcttgaacccgggaggtggaggttgcggtgagccgagatctcgccattgcactccagcctgggcaacaagtgcgacactccatctaaaaaaataaataaataaaaactaaaaaattataataggcgcctaaaaatatagtttaaaatgctccttttaattcggcatgaacctgttccgccaaaagatggcctgttgctgggaaaaattaaaacaaactagaaaacataaacggttcaaaaagccctccacacgcaaaagtataaaaaggcgggaatttcctcatttcaaattttggttagaaattagagtgtcatcagttgccctccagggagcgctctgagactctgctgcgagtcatttcagttaataaagcgggaaaacgctcgaacttaacctatagcattttggggccacccctccagagctttcgaaagggcacggaagtccccgtctaaacgcccgctgcaggcggctggtggtccagggaagcggcgtcgactgcgtgcaaaacaaccgccgccaacgcaactccacacctcccagacccacacgtcaaagaacgcgaaccccgcggccccaacttctggcctctccgctccggcgcctgcagccccgcggggaaggggcgacgcgagggggcgcagggacagccccgcacctgggaggcccgagggggcgcccgggagggaggggctgcaaacggcggcgagcgcgcgcggcaaccgccaaacgcccgcctttgtagccccggccccgcgtccttaccctgccgacggctgctcggctccggcccgcggcggcggccccagagccgaggaccggggtgggctcgcgctcttcgtcactggagaagtccgggggccccttgctgttggtgccggcggggagcggcggccggttgcgagccgtgaggtgctgcaggtagagctggacgtacacgt

SEQ ID NO: 10253 - DNA, 2300 bp, Homo sapien
ttgacctcaggtgatccacctgcctcagcctcccaaagagctggaattacaggcatgagccaccacgtccagctttgcctggggatcttttaaaaatggcagattccaggacacttcatcagccttagtaaaacagaatcttttgaagcctaaaaccatctgtgtcttggcaggcgctttaatgagaaatcagatttgggaaccttcacttgtgatggccatgcctcactcaaaagctctcttaaccttatggattataatcactgagtgactaaagttgccacatatgcatataccttctgtagggactattttagggtctgccatatctagagatgcttccccactagcggacaaacactattctatgactgcaatggcagaaagaagatttcaagatattaagaaggaagaaactgggcaaaagaattcacatgcctattatttcctataaaatacaatgtccgctgggtgctgtggctcatgcctgtaatccagcactttaggaagctgagctgggtggatcacctgaggtcaggagttcaagaccaacctggccaacatggcaaaaccccatctctactaaaaatacaaaaaattagccagccatggtggtgggtgcctgtaatcccagctactcaggaggttgaggcaggaaaatcgcttgaactcgggaggcagaggttgcagtgagccgagatcatgccactgcactccagcctggacaaaaggagtgaaactccatctcaaaacaaaacaaaataaaataaataaaaaatacaatgtccctgaatatgcaagaataacttcattgctttcaaccccttgcacaaacatggatgaattcaagagtctgaacctcagccccagagctgggtctgctctcaaggctgaacttaggatacccttcaaaaaaaggataggggcattttgtctttctaacactgtccagaatggaaattatggccccattaaaaagaaaaaaaaaaaaaaaaaaaggctgggctcagtggctgacgcctgtaatcccagcattttgggaggccaaggcaggcagatcacctgaggtaaggagttcaagaccagcctggccaacatggctaaaccctgtctctactaaaaatacaaaattagccgggcatgttggcacatgcctatgatcccagctactcgggaggctgaggcaggagaatcgcttgaacctgggggcggaggttgcagtgagccaagatcgtgccacttcactccagcctcagcgaaagagcaaaattccatctcaaaaaacaaacaaacaaacaaacaaaaaacaggccgaacacggtctctcatgactgtaatcccagcacttttggaggccgaggagggtggatcacttgagctcaggagttcgagagcagcctagccaacatggtgaaaccccatctctactagaaatacaaaaaattagctgggtgtggtagcccacgcttgtaatcccagctacttgggaggctgaggcaggagaatcccttgaacctaggaggtagaggttgcagtgagctgagattaccccattgcactccagcctgggtgacagagcgagactcagtctcaaaaaaaaaaaaaaaaaaaaaaaacaccaagattcctaatcaaaaaagacaataaccaaggtgttagtggatattactcattttttctctcagggtagatatgaaaagggttatcatgaggggctttggtctaccttgcataatttactagagctataccaggaattatttaaggattttcttgttattctccatgttagaaatgatccttatatctacaagtgtggccgagcgcagtggctcatgcttgtaattccagcactttgggaggtggaggtgggtggatcacctgaggtcaggagttcgagaccagcctggccaatatggtgaaaccctgtctctactaaaaatacaaaaattagccgagcgtggtggtgcatgcctgtaattccagctactcgggaggctgagagaggagaatcacttgaacccaggaggcagaggttgcagtgagccgagattgcaccattgcactccagcctgggcaacaagggtagaaactccgtctgaaaaaaaaaaaaaatctacaagtgcatccttgacctctagctctaagtttacacgtctgttggcaaagttccacttgaatgtcctaacatctcaaattctaacaaccttgactttatctctcaaatatgattcttggttaggattagccacaagggaaatctgtgaagataggaaaggcagaagtgaagcagcagccat

SEQ ID NO: 10254 - DNA, 2300 bp, Homo sapien
accagctgttccagctgaaaaaatgtgcagcaaagggtcacggtattacccggtgctgggggaagggaataggaagattcactacagtcatatatttttacataatatttgactttttcatgacaaaggatttttaaattagaaaagcaccataaagttgaattaaccaaaaaagagagagagaaagtccagacccttcagtgactacctctgtctacataagatcagactcctcagtctggtatgtgaggccctggacaatcaggtgctagtgtacttttttaactttatctgtcactacttcccttcctgtgccctccactctggaattcttcctgggactgtaggactttagttgggccagaagggctgggtctgggatagggttgcttagagagtgccgtgatgccgcagcctcaatgctaacttttgtttttttgtttttttttttttttgagacggagtcttgctctgtcgcccaggctggagtgcagtggcatgatctcggctcactgcaagctctgcctcctgggttcacgccattctcctgcctcagtctcctcagtagctgggactacaggcgcccgccacctcgcccggctaattttttgtatttttagtagagacggggtttcaccgtgttagccaggatggtctcgatctcctgaccccgtgatctgcccgcctcggcctcccaaagtgctgggattacaggcgtgagccacctcgcccggccaatgctaactttttttaggtaacatcttctgtagacttttagacattatctcattgagttctcatagactctgcaaggtaagtattactcccatccagaaccagacacctgatttgcagggtccagtgcaaactaaaaaaagcgtggccccttgttcatacatgtattaagaatttcaagccgggcatggtggctcaggcctgtaatcccagcacattgggaggccgaggtgggcggatcacctgagctcaggagttcgagaccagactggccaacgtgacgaaactctgtctctactaaaaatagaaaacttagccgggcgtggttgtgcacgcctgtagtcccagctactccgggggctgagacaggagaatcgcttgaacccgggaggcggaggttgcggtgagctgagatcgccccactgcactccagcctgggcgacagagcaagactccatctcaaaagaaaaaaaaaaaaaatcaaaatgacagcagagcattaaatgaagtgtaaggccatgtgtgactgtaccagtgtgaacctatgaggccagtcccacccctatcttacatctagggaacaggtacacagagatgaagtaaattcccaaggttactttgtcaagagcttggaaaatataagagtcagaagtctaacaggttgaatccctattaaactctccccaactaaactacgcccctccctgttgagctgaatctaatgaaagcttcctaaatgtattaaccacacacacgcacaatctgctatcagtcactttcagtagttcatcgctgtaacatctcaggagttcaatgtttcaacgtgttctgtagattactgtgataacgcggcaagctgtcgtaagacttcttgctgcacatttctttttaaaatattctccaggagtctgatgaaaaatacagacatacctatgtttaatgtcaatggatggaacttattttaaaaagtactgtaatggcagaagttgtgacacaaagtactgcagtgatgttgtaactccaacacctaaatatattatcaagcattcgcgttttgttttgttttttaagtgactactagatactgtgattcacttaagtgaagcgaactgaagcccgtggtcaaggagagacacctgaaggtgaagggacaaagcgagcagggtaagagctcgagcccgacccctctcaaaaaatatagacccggaacgcgcgcctgcgcagaacgaatcctcccgcgcacaagccgggcggaagagctggggcgggcaggggcgggaataaggttgctaggagaacgcgatgacgctacgggctcggcgctcttctccaccaatgggcgacgcgtacttgcagtggcgcgctgtgtgcgtcacgccgacgacgcgcgaagggcacacatcttaggacccggaggacgtccggcctctgtgagccgcaacctttccaagggagtggttgtgtgatcgccatcttagggagtgagtgtggccgggccttctcctgtggcgggtgtggggagcggagcccagagctcctgtggggccgctgctttggcggtgggc

SEQ ID NO: 10255 - DNA, 2300 bp, Homo sapien
cctcagtctcctcagtagctgggactacaggcgcccgccacctcgcccggctaattttttgtatttttagtagagacggggtttcaccgtgttagccaggatggtctcgatctcctgaccccgtgatctgcccgcctcggcctcccaaagtgctgggattacaggcgtgagccacctcgcccggccaatgctaactttttttaggtaacatcttctgtagacttttagacattatctcattgagttctcatagactctgcaaggtaagtattactcccatccagaaccagacacctgatttgcagggtccagtgcaaactaaaaaaagcgtggccccttgttcatacatgtattaagaatttcaagccgggcatggtggctcaggcctgtaatcccagcacattgggaggccgaggtgggcggatcacctgagctcaggagttcgagaccagactggccaacgtgacgaaactctgtctctactaaaaatagaaaacttagccgggcgtggttgtgcacgcctgtagtcccagctactccgggggctgagacaggagaatcgcttgaacccgggaggcggaggttgcggtgagctgagatcgccccactgcactccagcctgggcgacagagcaagactccatctcaaaagaaaaaaaaaaaaaatcaaaatgacagcagagcattaaatgaagtgtaaggccatgtgtgactgtaccagtgtgaacctatgaggccagtcccacccctatcttacatctagggaacaggtacacagagatgaagtaaattcccaaggttactttgtcaagagcttggaaaatataagagtcagaagtctaacaggttgaatccctattaaactctccccaactaaactacgcccctccctgttgagctgaatctaatgaaagcttcctaaatgtattaaccacacacacgcacaatctgctatcagtcactttcagtagttcatcgctgtaacatctcaggagttcaatgtttcaacgtgttctgtagattactgtgataacgcggcaagctgtcgtaagacttcttgctgcacatttctttttaaaatattctccaggagtctgatgaaaaatacagacatacctatgtttaatgtcaatggatggaacttattttaaaaagtactgtaatggcagaagttgtgacacaaagtactgcagtgatgttgtaactccaacacctaaatatattatcaagcattcgcgttttgttttgttttttaagtgactactagatactgtgattcacttaagtgaagcgaactgaagcccgtggtcaaggagagacacctgaaggtgaagggacaaagcgagcagggtaagagctcgagcccgacccctctcaaaaaatatagacccggaacgcgcgcctgcgcagaacgaatcctcccgcgcacaagccgggcggaagagctggggcgggcaggggcgggaataaggttgctaggagaacgcgatgacgctacgggctcggcgctcttctccaccaatgggcgacgcgtacttgcagtggcgcgctgtgtgcgtcacgccgacgacgcgcgaagggcacacatcttaggacccggaggacgtccggcctctgtgagccgcaacctttccaagggagtggttgtgtgatcgccatcttagggagtgagtgtggccgggccttctcctgtggcgggtgtggggagcggagcccagagctcctgtggggccgctgctttggcggtgggcccagccgggagcagcctctttcgaaggccgccgtgacctcttcaagggcgtggagacgggaaggaaaaggccccggttggggttccagggcgccggtaacgttaaccggcgccttgcctgtcctctaaccgtcgctccctcctcccctagaaagatgttctcgtccgtggcgcacctggcgcgggcgaaccccttcaacacgccacatctgcagctggtgcacgatggtctcggggacctccgcagcagctccccagggcccacgggccagccccgccgccctcgcaacctggcagccgccgccgtggaaggtgagatcagaccctgcccaatacagtcgtgtggtctacttgtgggccgcccagcctttgaggcctggacccggcttggaggacagggaaggacgagtccagcccgctgcaccgtaggacggcgcccagttgcttgccctggggtatcggccttttccaccataggcgggtgtcagatccttggccttccctcaagggcgtggaagcgctgaggccctgtgtcccttcgtgacctccgt

SEQ ID NO: 10256 - DNA, 2300 bp, Homo sapien
agctttaaaatagttggaaagaatgaagtatataagttaaggaaaaaatacaaaactgaccatgaccattgttggttgaatattccagttgctattcagaaattgtcatatgtctcaagttttatcacacaaagttcctgtatttctagggaagcagactttaaatttctaaaaacttgatttaattatagttaaatatgtgtagtcatttgtggttattttggcaagtaaatgtcagtgtatacttacatttttgcagcatgtactacaccttttttatgttggtgagtttgctaatccttatttgtaagacaaggtaaaccaaattaggctgattcttagaatgacagtaaaggaccaaagtgattgacagctgaaaacaattttcaggtacactaattctctttacacagatctgactttttttttttttgagacggagtttcactcttgttgcccagacgagtgtagtgtcgcgatctcgcctcacggcaacctctgcctcccaggttcaagcgattgttctgcctcagcctcccaagtagctgggatttcaggcatgtgccaccacgcccagctaattttgtatttttagtagagacggggtttccctgtgttggtcaggctggtctcgaacttccaacctcaggtgatccgcccgcctcagcctcccaaactgctgggattataggcatgagccaccgtgcccggctctgactttttacagaaaattgaactattttcagtctggtattttaagaaaggtactgcttgacagctgaactatatgaatgccactggggaaaaagcattccatcatacttagatacgagattggattgtaggtttaagcccatttttaaagagctcctagaaagtgaattagtttttgtgtttagattccccttaagtttgattaggaagtgtataaaagttcaatcttttgtaatgacagcccaccactggaaaaaaaacgaaaaacctagtgtaatatataacatgctgtttttcaaacactagattttacctagagtccttatgtgtaatacgtgggttggttaacagtccctacgtaaagcgtacagatggcctggagagaaaaactttttcagagattggagagaaatgttactacaaactcatggtaaggtcagtgaactcaatttagaagccagtgcagctagttgcatgttaacttctttatatcatcattgcctgaacttgttaaaggttccaacattttacctgtgctgcaggaaaaaaggaaaagttgtaggtacaaatttggaccaaactttaaaaaggtaaagtaggatgtcttctgaacccaaccaagtggtggctgtggtgcttagcagtatcaactgtatattatttcttgctatgttagcaaagcatccaaagatcaatggtgtatgataagcttttctgtgggtgaagaactcgggagtatcagactcttctggttctgagtctcatgaagcttttcacttctgagctgaaaggatgctctttgtgcttttcactattagtggtatagtctttcccgaaaatctctagcatggtggcttcagggcagctggacttaggtggtattttggggctccaggagagcttggcagagttggctttttaggacttatccttcaatgtcacataacatcacttttaccatgctcttggttacaacagtgatgtctcagaaaccaagtcccagattgaggaaaaaaggaacatagtctctacctcttcctgagaggaaagtcagtcaacgtgtaagaggagcagtagaaacgcattagtccagccaacgtgaaagtggaccgtagatctaaaacattttgggtatgcagttcagccagcccttactgaggcagttctgccaatcaggattcaagttttatttcctaagagttataataggttttatttgtgggcattgatacaaaatacgctgtgttcaagctatggagcctgccactgtagttactagagttacggttcaaagctatttctgagagaaagccacttcatcctcaaaacccaagaggcccacttaaagtgatgcgaattctcatttcaggtttttaaattatactaaaagattctagtaagaaaattttaatatgtatgtattggtgttctttttacatttcatttaatgaaatgtctactgtcaatacgataaagcagaacccagtggagtaagaatacacgaaactgccaggcacagtgggtcatgcctgtaaacccagcattctgggaggccgaggcgggtggatcacctgaggtcgggagtt

SEQ ID NO: 10257 - DNA, 2300 bp, Homo sapien
ctcggcctcccaaagtgctgggattacaggtgtgagccaccgcgcccagccgtaacaaatcttttaactctgaaaaatacactatttgggatgagtcaccagtaaagtataattccatatgtagtagcataaaaaatgtctagatgtccagggtctcttctaaaattctatcactctggaagattaacaacagtcttactaaataactttacacatgaatgaaaaatggagaaaaattctattaagatgccaatcttattaaaatgaaatgggctattccctcctcccgccagaaaaaaaaaggctgggaaaataaaattcacaagttggtttttttcttttttctttttttacgagttggttttaaggttatttctaatattcatttttcctaatgacaccaatatatcgccatttacctgattttaaaactgcaactggttagttttaagtgaacacaagtgctatgtttttgtagctttaccatattcaatctgtaacttacttaataaaagaccttaaattcataatgcatgcacggtgatcaaaatatgagcactcctccaagctctgctactataacgtttgctcctttgggagcataatgatatggttttcttttttttttttttttgagacggagtctcgctcggtcgcccaggctggagtgcagtgatgcgatcttggctcatagcaacctccgcctcccgggttcaagcgattctcctgcctcagcctccggaggaactgggactacaggcgcccgccaccacgcccggctgattattcgtatttttggtagagatggggtttcaccatgttggccaggctagtctcgaactcctgacctcaagtgatccacctgcctcggtctccaaacataatgatctgttttaaggttgcaagtatttccattaggtatttatggggtgagtagggtggggcagatgtgtcccggaatggggcacagcggacaggaagtaacggtttataacaacgtgaacgcttctgacgtgtagcgggagcttcagaaagcgtggccgaatctgcagctcttaacaaatggctcgttcccaaaccttagcctcaactccttctgagcgataggggcatgctaccagcacggggggaaatgagatacaagaaacgcccgaaagggaaaaacaaggctgggctgtttccttcctttggggtcaagacagaggcacagaaggcccaggtctgggaggttggatcacctccggctggatgttgagccgggtgggagcccaaacagcagggggcccacaggaggccggcccaggcagcctcgcgtccacttaccaggccaggcccaggcacgtccccagcgacagcaggctcaggcacgttcgggggtctgcccagcccccgcctccgctgctccgggccacgggggtcttcccgccctcgctccgcttcccgggctccgcagcaggggctcccttgggccccgacttcttccggctcttcacctcagacatgtctggagaccctaggacgacaagcccagggcagcttcttcaccagggggagcaggacgtggccgccttggcgttcgtgggaaccctgggcggtgaccgcgccccctcacagacttggcaccgcccagagcccagccccttccctctccccggcatcctcgttgcttcactgagtctttcagctgccagctccatagttcccctaggagaggtgggcggcgacctcaacccacagcgccttccactgcgatattgctccaaatccgaggaaattcaaactcccgggcgcgcgcaggccgacgggacccgaggaggaggggcaggacgaaggggtcgcgcgcgccacgtcgggcgcgccgccgctgcccgagtccggcattggtgggaacgcggcgcgtccctgaggcttagccacgccccgtccgcggggtaggcgggcacttctacgcgcgcgggcatgagccgtggcaggagtgcgcggcggcagcggtggccgccccttggggcttggggtgtgtttatttgcataagcgggcgcgcgccgtccgggctgggtggatccggcgggatttgactgctccgctgtccagaggcggagaagaagaggtagcgagtggacgtgactgctctatcccgggcaaaagggatagaaccagaggtggggagtctgggcagtcggcgacccgcgaagacttgaggtgccgcagcggcatccggagtagcgccgggctccctccggggtgcagccgccgtcgggggaagggcgccacaggccgggaagacctcctccctttgtgt

SEQ ID NO: 10258 - DNA, 2300 bp, Homo sapien
aatagtgattacattgaagtcctaatattaagagacttcttgttttccttatcaaacataagagtgaatagagcattgttactattgagtattagttctcgttcaaggaggatgtcagctctaggtcctccttgctaaacacatttcccacaaagcaacaggaaacactttctgatgtgatttctcagaccaggaggacatgaggaaagaataacagcctttatagtaaaatacttgacgtttctagcaactttatttcaaatataatgcaaatttttccatgggcataaaacccagttcacaatatctgcaagttttcaaaacattaacagaactttacacaatgtatagagtgaaagagtctaaacgggtttatcaattcattcattcaatacacatttgtgcccctccctatatgtcagacaccaagactacagaaaagattgagtcatttgcctgaaataattcacagtctactcaaagaagaaaaagagagagagagtgggaatgtgaatgcccgaagtgcaaaaacagagcacaagtaacttggagctcacagaagggggcaataattatcaagcttcaatgactgtttttgaagtcaccaaatgtagcacttggaaaaacagggacggacgtagggcatttgcctatgcttgtcaaggcttacaaaatgcccagcaggggcacaaaactgataaaaagttattgattcgaatcaaaactctcattttttaaaatgttaataacgtttttgtcctcttaaacataaaatgttccttaatttatagtaatgaaattcgatgtgaaaaaacaagaatgaatgaattttttaggtgatgtccaatagctaagcaaataagacactctggttttctgaaactaatttccaatttcacctagtcctgttaaactaaaatatgcaaatcttaaatacgttttaaaactgcacaacttatctgaactaagtctcaaaaccttttgtaacccacaacaaaatggaaagccaaaactcttcatggacgtaaaacagaaaacagcgcacgtttatccacgaaaaccccaagtttactacttcctcattacagaatttctcttcctggtacaggagcaggatggttatcaaatattccatgtcctcaaattctcagtccctgaaatcagctaccaagcctccaaagaacctggctcggggagaaaagcgaggaggtcaacttacccaagcctttgcgcctaggtcttagtggggagggcggcactgccgggacaagactgggagactccaggccggtggagggaaacggcaacaggagttttccaccgggaattaggggtgcagggctctgtctcgccacatacccttcgccccggggcaggtccgggcctcacaggcgcctcccctggatctctgcagccccggggcgcacgaagacccccagggacctccgaaggttggcgaggtgggcgtccacccaacgcagcctgaccccacagtcccggagcgccgcggtgaggcccggcccacgggccgccctccggtggaccccactactggacacaaagggaggaggtcttcccggcctgtggcgcccttcccccgacggcggctgcaccccggagggagcccggcgctactccggatgccgctgcggcacctcaagtcttcgcgggtcgccgactgcccagactccccacctctggttctatcccttttgcccgggatagagcagtcacgtccactcgctacctcttcttctccgcctctggacagcggagcagtcaaatcccgccggatccacccagcccggacggcgcgcgcccgcttatgcaaataaacacaccccaagccccaaggggcggccaccgctgccgccgcgcactcctgccacggctcatgcccgcgcgcgtagaagtgcccgcctaccccgcggacggggcgtggctaagcctcagggacgcgccgcgttcccaccaatgccggactcgggcagcggcggcgcgcccgacgtggcgcgcgcgaccccttcgtcctgcccctcctcctcgggtcccgtcggcctgcgcgcgcccgggagtttgaatttcctcggatttggagcaatatcgcagtggaaggcgctgtgggttgaggtcgccgcccacctctcctaggggaactatggagctggcagctgaaagactcagtgaagcaacgaggatgccggggagagggaaggggctgggctctgggcggtgccaagtctgtgagggggcgcggtcaccgcccagggttcccacgaacgccaaggcggccacgtcct

SEQ ID NO: 10259 - DNA, 2300 bp, Homo sapien
gtctggattgcagagtaagacacagaactaaatagcctcacttccaaacccattgaaagtttgctaatgtcataaacaaagatagtcaaacatgcctccatcaagtaatcaggtcccatttatcaaagagtacaccagtcaagatgcaggtcttttttattttacatgttacatgtatagcaagtgaattagacatctagtctgagcttatgtcctggccctgccgcttgctaaaagggcggtttcaggtatactattatcctgaccctcacagaagcagacagtggcacaaaggtggacaaaacagagggcatttagagtttcctgtttaaggaaaagaatgttcttccaaaactaccagttgcagatctaagccttttttttaatctgtaaagtgaggataatataatgaaaccttcatagagttgtaagaattaaatgagataatgcacagatgcctggaaaatcgtaagtgctcagtaaatgttacctattatttaataattcattcatatttctattttagagcctgaatgttgcagttggtcaaaatcttcatttgctttgctttcaaggcagtaaatgcctagccttaaagtttagcaagtgaatgtctcctgaacaacagggttgattattagtactgctggaagttcctcataatgttaaccatttctttatacttttacttaaagtaccgccattccaacctattcatagaccattgggttggtattaccttgttttaagacactgattcttctctgtgggaatctgcggttgttaccccagactaagtgagcaactcacacttacggatggaacttgtaagcaacaaagaactgaagcctgtgggttacctgacatgctcattaaaatgttgtggtattaagcagcctgtaagccacaagttatttttatttatttatggcaaggggaaaaaaatgggattttaaacatgagagaaaagccttgtcatttaaggtcggatttaattggcataatttttggggggaaaaacaaacaaacaaaaacacaaaacctttgccaaagtaaatttccacaactgttggtagtagtacaatggtaactttggtggaaaccggaggcaggagtgaggagtatttgaaccttatcaaaatctcacccgtgaccctccaagtctactggaggccgatcatacccgctctgagaacagctggaacgcaagtcccacaggagagggccaccggcgcacacaagttgaggactgccgaggcgtctcctgcgaggtaaacacgaagtcgcttggttagtgagaagaaacccgaggtggcctctggggcagacagagcaggacctgcttctgccccttgccctcctcgtcctcctctctccagcggcggcgaccgcagtaacagcggcagtggcggctgctgccactgctctgccgctgccgagccggtcacctgggcacccgcggagccgcgccgctgctaccgccccggcggcctcccggagtgcgcggagggggcggcggaggagcgagatatccatagtaaccgaggatgcgaggggcgcccagcagcagcgagtgcctgggagccaggaggaggcccccgcgcgccggcaacccccagtgctaggcgccctgcagcccccgcgcgccgcgcctgggcccgcatcgctctcgcagtgagggtccgcccgagcggtaagccctccccggcggccaagccgacacctcccccccgcctcgccgcccaccccgggcagcagccgcggaacaatggagagcgcagccagcagccctggagacggcgttcgggggaggacgcgccgccgccgccgccgctgccgccagggcaggcgcgcgccgcgtggagccgggcgggtgcgagggcgcgcggcggggggtggggggcacgcgccgcgcggggggcgggggcagtggggggcgcgcgcgcgggcccggggagctcgcggggagagcccggcgctcggcgcagcgcggcgcggccaagctccgcgcctctcccgcccttcctcggcgcgctcgccctcgcctcgccgctcgcattcgctgggggcgcccagaaagatgcacagaggcaacggctaggggagcggaggttcaagccacatgtctgcgtcctcgggggccagagcccgccagccctcgcggatcccggctcgcggccagcccgagcggctcgggtgagtagcggcacagcggccccctcgctccgcggcccccgctcgccgagacgtggctccaagaagtggtgccgcagccggggcagaggcggaggaagccgagt

SEQ ID NO: 10260 - DNA, 2300 bp, Homo sapien
caccgattttttcctctttatttttgaaacccaattcccctttgaaacatctgttgtcaagctacagagaaagagaaggaatttaagtaaccaggtatttatttgttaaagtatcgagcaggatttggtgatatcataaattataaatgtaattcacttgagatgtgttcatgtaggttttagaattatgtgtatttgtaaaagagtgcaaaataatttatacagtaatttgtactgcctttggtcaaaaattttatagctatgagagaaggagcctattcttcatttttaaggatgctaacccagagctccttcaagtaagaagaaaagttgatgtgaacaaaacttttttgtatgctcttacttctctccagatgcatatatctgtataaatataaagctgatgaatacctactgtcttccttcaactttcacactgatagcagttggtgttcattagtgtaaagtaaatagcacacttactgtgtcaggcactgttctaaataccttccatatattactttatttaattctcacaataactcctatgaggtaggtagcttgttcccatagctgataggagactttctcaagacttaccctatactacctctagcaggaatcatgcaggagataaaaggttgagttaaaaaaacatggttagatccacaccatttatatttttacttcagagtcatctgaaattcacatttgaaagcgagtgttccaatgcatttatgtttgatttcacagtaccgaagcaacaatgaaccctctctatggaagagaacttggagagctgtctggcctaatcttccctgctttgctccagtcctttctgttcactgaatcctggaatcaggcttggcagggacctggggggtttctagtttctagtctaaacgttccctaactacccacaaagcttcaacttctcttttgaagtgtggtgtctcactgggttgacaccatccccagagaggtagggaggatattaaatgctttaaatggtctttcccagcagctgagtctgagcagggggtgcggctggggttggggtggcacctctgtcctactcttttagctcccactgtggtacagaccaagtgttgcaggagagctatctgaagaagaacgtgccagaagcggagatgaaaggaaaacagttagcagctgtcctgtgtccttttgtaatcacaagctgtgaagctgaaaaaaaaaaaaaaaaaaaacttccttgggtaggctgtacataatcttggcagatatctgagtgttgttcttctgtctaatatgctgaacgtttcccagtgcctcacaagagaaaagtgagacagggttaggtgagtttggacaccttgctccgaacaggcagggaacatggcgcccttgtacgttcatcaagctcttgcaaatgccctgtcactgtagatgctgatgcagagctccaaaaggaagggctcctctgcaggagaagcaaaaagaatttgctcctgggtattcccaacacagccacatataatgacgcagaaagaagtacctaaaaagattaccagccattacattcactgtgtagcaggtacttcacccaccttatttataaaccttacagcactcttgtaacataggtggtattattttcatcttatagaggaggaaactgagtctcagagatgtgacactatggagtcaagttcacaagataagtataggatggatctgggatctgtgttttatttggtcagactctgatgctgatgcttccttcactacataaaaagaaccaaatgtttagtaggggacattttctggatggagattccggtccatagatatgtaacgttaccaagaagttactcccatgaccctattttcacacacacaagcttacatctatatttacagaccatagggagtgactgccagagtttctccaacacattgaatttcacataaattatttatcttctgaaaggtcaactggttagttctccttctaaactaccttagtgtattccagaaccaaacatgttaatcaaagtgacccaaggtgtttgtggctaaagcactaactaacttgccatgtttcctgctgtgaggcaggaagtatcagcatggcattaggttgttgtgagagattcagctcttctgcagtgccttgtcaaacgacctgactggtcaactgggaaaatgaagttctcagggccaacatcgtatttgggtgtttttcttttaggtctgtatcaaagccagatttaagaaggagggtgtctacaaatgaacgaaagcagaggatgtct

SEQ ID NO: 10261 - DNA, 2300 bp, Homo sapien
aatctgtttaaaaaacaagttatcttattttaaataaataatttagagacttgggatagagttaaaactttttttaaatttgaaaatagaattttttgtactttggatcatgaaattacattattttgtttagcaggtatgtactgaatctttactatgtgaaatattagcaaagcatattgcctgctttcaaaaaataagtcagacacaaacaactaaaattgaaggcagaaaatatctgttacaatagagggtctaaaaatgccatttaagacagagaagaaagagatttattcgtggtagagaagattagaagaggtttcataatggaaatagcaactgattcaaagccaacaaatggacagaaatgtggggacataataaaaccaaccaaagcccattatgggctgcctttagagaccagcaagtaatcctgcctgtctggggcagtggaaaagtggaaataaagttagatgaactgcagtcaatcatgaagaccccaaaatgtcatcagaggagttgggagttgattttgaagacaacagaaaaccacagaagggttttgagacagggagtagtaatcaaaactgtgtcttaaagggattattctgacaccatgcataaaattgattttttaaatattagaggtagaaagatcaatatagaagtcgttgtttcactaggctaggtgggcctgaactatgagaacaaaatcaatgtaggtggcagttctgtaaacttaaaacaggaaatagaatcaagggaatggatcacactgggaagagggatgatagaatttggggactgatttcagtagtgaaagaggagtagaagatgttttgaggtttaatgtctgtgtgccaggaaagttgacaatgcccttaaaaagagaaaggaaacagagaaagatgaggtttgaggaaaaaagaaaagcgatgtttcatttattcaataaatttgtattaggcacttactatgtgccaggcggctgctctggggggatgagagagttatctttaaattttaaagctctttatgtggaagaggcactgttctcaatctgtgcttctccgaaggcagagctggagcagtgagtagaagcaaggtaggaagtgaaatatctttctaataaattgaggcttcgtgagaagtagtaagagctctgttacaggcagtattcaagtagaagttggaagatattcctctaggaacattttagccagggatgcctacgttaggaagaaggttagactaacctttctgcaagttctctcccaatcttaagagtctgtttcttctgatgatctagtcctgtgggttctattcttaatccctggtttctcccaattattaaataaattactcagtctatctgccattcagtaaaactcacacatttacatctgttattcttgaattattttgggttagggctcatcttctttattaaaaaaaaaatctatccagttaatgttacctttatagctaatttagaatggtaaccctggtagattgggttataaatatcagaggggaaaaaggatttcttgtgcctaataatacttttgtttggaagaaaccatgcaaacaagaaataaattatcttgacttcaagattgcgatgcagtttctgtattttgcagtatttcaaaaaagaaaaaaatatatatctcggagaggcttattttgctatagcatggtaaagaaacagaataattattctccaaacactgcaaagcttcagatcagaaacgtttatctgtgctccatttaaaaaggaagaagaaaagacaggaaagaaaggaaaaggagaaagggaacctgtcgtgagctctgttataagctatagttcaagcttcgcatttcctggtgtcttttgaaacgtaaaattccacaacaaatagctctgtaacgtataaccagtatgaagattcaattcagatttaagcactttggtttgcttttgaatcttgctattttctgcatttgttttgactgctctcatcattcaagattgacgcttggatgggtgtgtaggaggaagcagcagcagcaggcttacagcttgcagacaaaaaaaatctgccttatctgatggctattattgaaaatgcgaggtgtagcctgggctgggtaatgaaggggagcgagcgagggggagcaaggagcatggagctgcatactgatgagtgtaggagtacttgataaaaaagaattctggctgccggccgtgcattgctcattgtggagtactccaacaatcacatagaacgcagaccagcccaagctgacagcttgat

SEQ ID NO: 10262 - DNA, 2300 bp, Homo sapien
tagaaagtgatgaggttttatcgttctgttttgtttttgtgagaagacagtgagtataatagtagtagatggatgcagattgttgcatttgtagattcatgtgtcttggatctctcttcctgtcactcttctttcttcaatctcaggatgctggtatgatagctgggcaggcaaacatcttctctttggaaaaatcaagcaggaaccagggtgaagtctagagatacatagctaggaatatacctgctttcaccagttcccaggcggagagcagtatagacacctggggccaatcttcactataaagagcagatgtgcctgtagcatcttctgagccaatgtctaataagatttattatggttgccaatttcttaaaaatgtgagaattcgatattttggccatctcgttccatcacaaaatcataattattattaataatcacttcataggattgttatgggtgtcaaatgagatgatataattcctcattcagtgcctagtaaataacacttacccattaaatgttacttgttaatttataaaaatgttagtgtttggggtttatggtaataattaacttactgaaagtacgaatcagcacatcaactttggatttgttgtcattatgtaccacatttactatactttagttctttgcaacagtgagttatgggcttatcaggtaatttaaattttcatcttggcaatatttagctattgatatgaattaaaatgaacactgaaaaaaaggacacttcctttctttgctaaattctttggccaggtttttacacagtatgtctttgaaagacaaattaagtcgcaaaaagcatggtgtattttaaatctcagagaaaatgtgtgttttatcttagaaaaaaatccaaaggaataaaaattatcattcatcattggtttcttttctgcattacatcttcaaagatctgaagaaattagaaaatagctaatgccgtttcagagaagaaagaaaaagctacctttgtgttcatagctaaacattagtttcttatattggagtctctctttttctgatactgcgttgtttgcctttgttaagtctgaacaaattttttttgtctaaattatgtaatctgcatagaattattttaaatttatatttaaggtaatatcaggattattaaacttcaattacttttaataataccttttttcaaaatttggtttttgaatttatttgctgggaggagggcagagggttgtcattatatatgaccttgacttacctgcctagtgttctacttcacgatgattcatttactgtgagagtttagatgtgtgtgttctactttaagaaaacccaattttgttcattggctataaaacatacaccctgggttcaagggagaagtgaatgaagtcattcaattaatacacaattcatacttttgaaatgaactctaaggtatatcagaaagaatgattcacacatgcatacacacgcacacacactcatacattcattctatacatggcactgtggggtcaggggtatttcataaagtgaaggtattgctatgtagcagtaaatgaaatgtttggatagcccacatgttcataagggcactgctattatatcgtggctttcagaacctttataaaccctgatatcccttccttccttttgcagatgacctctcccgacaggatgacaatgatcccccaaaagaatatgatcctgggcaatttgcaggcctgctccatggatcctctccagcctgtgagtcccctgaaaatccatttcatctctatgggaaaagagaacaatgtgaaaaaggacaagatgaagtcagtttggcaaacagtcctttgcctttcaagcagtctccaatagaaaataactcagaacctttggtaaagaaaattaaacccaaagtggtcagtagaacaatttttcacaaaaaaagcaaccaactcgaaaaccataccattgttggcacaagatcaaccaggagtggatctcggaatggggaccagtgggttatgaacgcagggggatttgtggagagagcctgtactctggggagaataaggtcattgcctaaagccttgatcgacatgcatttgtcaaaaagtgtctctaaatctgattctgatctcattgcctatccttccaatgagaaaacatcaagagttaactggagtgaatcttccactgctgaacacagttctaaagggaattctgaaagaacaccatccttcacatcggaatgggaagaagtaagctttgttcttcttgctgttcatcctataaggctt

SEQ ID NO: 10263 - DNA, 2300 bp, Homo sapien
gcattttcataaaaggaatttcttaatctcaagttcaggtagttttttatttagctatctgagcttctcaagtcttgaggcaaatgctaaaaaggtagttttctaaacagctagaggaatttcagacaaaccccatcaaattcataaaaataggtatttgccagaatgctacataggatggttatcaagccaaatgaaagaggttccaccgttgtcagtctactgactggtgtggaaaatccaaacatctataggctctataagtaatgtagtttctggcttccttggagaccagcgctctaatggaactctaagacaaatatcttgtcatatatgtgtatagcaaaaaagtacttttaagaaaatcagtaaaaaaaaaaaaaaaaggcacttaaattaaattttgctgtgtccaatactaccaatcctgttatcccttatgaaaaacatcagaaccacttggacacttttaaaacgttattttactaaatgtgtatttggtttcttggttttgccaattacaagataagtaacatagacttgaagtggaagttaagatataaagactttaggaagggcagtaaaaagtgctattgatatgtgaataggcatctcaataaataaaataaaaatactccaagtatccaaaataatcaaacatttcaatatgaaaggaagaaattatgtttgcattgacttatgcaactaaagactcaagtgggctgggcacggtggctcacacctgtaatcccagcacttggggggccaaggcgggcgaatcacgaggtcaggagttcgagaccagcctgagcaatatggtgaaaccccatctctactaaaaatacaaattagccgggcgtggtggcacacgcctgtagtcccagctactaggaaagctgatgcaggagaatcacttgaacccaggaggcggaggttgcagtgagccaagatcacgccactgattccagcccgggtgacagagtgagactccatctcaaaaaaaaaaaaaaaaaaaaaaaaaaagactcaactatggctatggctctgtgtgtgtgtgtgtgtttgtgttcacatgggttatcatgtgtactgtcatttcaataaagatattataatcttattgaattgaaaatatttgcaatacctagcaaaattctttacagcttttttttttctcaatacaatctgatggtaaagaatagagcataaatgtgatgtttaaggctcttttcattccatagccagggtatgaatgtctaggtaaaactcaaaaattgcatcaacagtttgagggtgagtcaaaacataaaatttatcatggctatagaaacagaaaaaaaaaaatacattgccaataaaatagttatttcccctggtaacagaaataaatttcctaataaaaatagaagttaaaaagaaaatgaaaattatacctaagcactttaaacatttcactgaacataattccatatccacaaacacatacacgtggtcttacataaattgaatctcacctatactatgagtttgaaatcagtttttctcttattctttaagaaaaaaaaaggtcagggatatcttttcatgtcaataaataggaaaactacgtaatcatttttagggctgcagactgtcccgtcacagaagctccataatttatttaagcaatcccctattgtaagacactaatgctgtttataattttttactctacaacaaacattgataaacatcctgtaccaatctgtttaccaatttatccaattctctctttaaaataaatgtctacaactagaggagctggataaatgagtatacagagaatgtatattaaactcttgccttgcacagaaaatttacctctaacccttttgaaagcaatttgccagaatgcattaaggtccctagatggtaggttggtggcggggtagtggtctgctgagctgtggagggcggtggggctgagggtggggtggagagggcggtgcccctgctctgaggcagggactactgggtgacagagacaaaggggtgtgtgatggggcaggtcacaatgggtaggggaggataaaagtggtcctgcggggtggtttagcagcagtggatggttcaggttgggaagaagagcagtgggattgccagttaaggttgtggaatcaaagagcaaaggctgttgtgaagtggaatatcaggctcaaatggaggtccctcccgaatgagcactgacacctgtgtgcccggacatccacgagggccccaacacctgtgctcctgacagctccatgcactaagcagggcac

SEQ ID NO: 10264 - DNA, 2300 bp, Homo sapien
agagtttgaagctgaaaaattggctttgattatcatatgtcagtagaatgcccgaactgtggaactgattcttagagtaaatcattactaatggttttcccattgggggtgggggctgcatgatttcgataagatgactcggggcctgcggtcaccaactcatccatgattaaatgttgcttgtgaaaactgtgggtgattttcagttctgaccaattgaatacttacagtatattctgggaaaggtgtgttttgcttaggtggcaacattaggaaaaaggaagaaggatttccctatgccattttcaaaatgaatgtgatggctccttatctcgtttctttcattggtctgctagtcccattatgtcagggattatattattataacatagattatcttattaaaacagattctaacacagaaaacaaaatcaaaatgaattaaaaaactacactagccaaaatctacatacttcaggaaacctccaataaatagccataatttacctaatattttgaatcattgaaatgaaatctcagaacacaatgaattccataaaaatgttttaatatactcttgttatttatctctaaatgccttttaagtttcccccagttatttattgaaaatctttgcctacagcagacagtgccggatttgagccttggctcagttactttctatccctattatcttgcgggtaatcagtttcttcatctccaaaatagagatgaaaatggtcctatctcatgcgattgttgcaaggcttaatgagaacatggaaagcacttagcatagtgtctggtatgtagcaactactcatcaaatgcatgcaataattattgtctgtccatttcgcttttccatggggggcaggaacgtatattgggaagcacatggtgtctggagtgagtctgttctggggtctagttctgagtcagccacttactccatgtggcatcttgagaaatttaattaaccatttgagccctatttcctcatttctaaaatggatataataatatccagttcactgggttgttgtaagcacagtgcctattaagtcctcttcttaccaatcaattatcaacaagtgaacatttatgaagtctattccaaggacaatgcaaagcacaaggtgtaacaggaagttttaatagaaaataaacgcgcgttctccaccacggccaaggagagcatctaacaagtcatgccaaccatgcacaatgaattgctgatgatatatgcaaattaaagtggatctctaatccatgcccatttatatttttcgagtgtagatgtggataaattttcaatgagagcctttttcctggtattcttacaagtcagcagatctccaaagcccaactaaaatatgggctgattaaagactccagaaaaactgaaacagtcgcaaactgctcggtggccagtgccacagaaactaggacgaaacgagcctcttctttctaaccaagggcagatctcaggctctcttggggaggtaaagcggaagggtgaaatgccggtcaagttgcctagactctgatggaagcggtggccaaagggcccctccccagtgtcaccagcctccccattcctgtcacggaggattttcctcaggcgtcgtgacagacccgaggcgtgttgccggggcccgccgggccgaggaggagccgacgcggcccggggaactccagtcctcacacggttaacgctcttccaaggagagtggaggagggagggtccccgcccacgagaacgaagagaatctcagggccgaagccccgcctcagccggcccggcccctccccgccagcccgccacccaactcgggccgcaccaggggccgcacctgcccgcgcgcacacgccccccgcgcgccaggcctcgccgccgccgccgccctcggcacgcgcccgctgcggctgccccccaccgccctgcctcggcgcgggccacagcgcacgagccgccgccgccgccgccgcgctcctccccgccgcggacgccgcccccgcgtaaccgccgaggaagccgaggcgagcccgggtcgggcgcgagggcgcgcgggccgctgctgccaccgcgggtgttccctgcgctcccgctccagctaggactctctctgccgcctcctcctcctcctccgacctcagtcctcaccaccctcctcccgctcctcaaaagcacccccgagtccccaccccctcacgccgcacccgcgggaacgaggccttgggaattcaggggagtggctgtgggggcgcgtcgcggctcccagctcggccagcccctc

SEQ ID NO: 10265 - DNA, 2300 bp, Homo sapien
gtcaggagtttgagacctgcctggtcaacatggtgaaaccctctctctactaaaaatagaaaaaattagctgaatgtggtggtgagggacctgtaatcccagctactcaggaggctgaggcaggagaatcacttgaacctgggaggtggaggttgcagtgagccaagatcatgccactgcactccagcctgggcgacagcaggattccatctcaaaaaacaacaaaacaaaaacactccaactaaaatagatacacagtataatcagagcaggggattttgaaattactgaacaagtcaagtataaggaaatatgttgaacaaaattccaataattaaacacttgtgaaagatctataataattcacttggcatgtgcatcatttgaattaaaacctaaagcatgttggttgtggtggctcacacccaaaattccagcgctttggaaggctgagacaggaggattgcttgagcccaggagtttgcacccagcctgggcaacatagaccttgtctttactaaaaatttaaaaaattagctgggcatggtggcacaggcctgcagtcctacctactcaggaggctgaggtagaaggatcgcttgagcccaggtattcaaggctgcagtgagctatgattgtgccactgcactccagcctgggcaacagtgagaccctgtctctggaaaacaacagtaacaacaacaacaacaacaaaaaaccctaaagcaaataaattggcacatacagaaattcttcaatttaatgtaaaaaaaatggcatatgcaatttaatttttcattaaatgatatacccacaagggtatatctattggaatcttatggttccaatttgacatgaaaagtgagtctggactctcactgctatcattataccaataatgttggggcaatttagtgtttatttgaattcagtatagttactttataatttattatcataattggcatagctatggtagccatatttgttgcttttttccaccagtttatttttactccatttcttgcagttgaacaagagatttttcaatcaagactttggaactacgaagatggaagagatttgaagagggatatagaatgagtaaattaagcaactttttaatatcctatttctataaatatccagaatttaaaacattcctgtattataatatctaaaaacatgctaaggctaagtatatctttattttaaatgttaagtttttcctagcaaagatatttgagaattactatattcatatatgtaatccttttctgtaaatcttattgggggcgcagttaacactttgcaatttttatgtgtatcaatacttctaccccctcctttttttctttttttgccttcaggaacaattgagtttcttgttagtactctttactgagtatccttcaattttgattttctggggtagttccataaatatgtccagaggctattatagtgccaccaattttagagattgaagcatgaataatatatacactggcaattttatacttccaatcatccctccatgtccatgggagatttgttctagggtccccttggataccaaaatccaagcatctttaagtcagggagttggttctttggatcaacagatttcatatcttcatttggttgtggatatggaactcgtggatatgcatggctgactgtattaattgaaaaaaaaattgcgtgtgagtgaacttgtgcagttcaagccaatgttgtgcaagggtgaactgtactcttcctccctgcttgtacaattattgcagtacatgtcacgaagtcagataaaattatggcatcttaagggttggaaggaaacagaagttctgttgctcagcctcacaccaaagcaaatccagaatgctcacaacagggagtcaccaaattacagctgaagttcttaacaagaaaacatactaccccataaacctttctgttttaagtagttctagtttgaccttttttctcctatttgtgaattaatgtagctccccattaccacacttggtcctaggtttttcattcacattacagaagagctgttatatctcatgccaagtcttcttttttctagactttacatccataatcctttattcctcaaaagacatggtttccaaagccttcaccattatttgccatttagatgtgccccaatttgctaaagttccgcttaaaatgtggtcacttgcataagttagcatgcttctgtctacaagtaaaggaaaagccaactaaaagtgttaccctattcacataaggaaacatctggcgatggg

SEQ ID NO: 10266 - DNA, 2300 bp, Homo sapien
aaaaagattctcttcttagtggtcatgtaagtcccctttactcaatttaataagatttgaggggaagagttagtgttttacgtcttaataggaaagtagtattttgggggaaaggtcaagaaaaagaatttctgagctaagtcatgttcttttatcttcaagatgtatggatttgccagttggatgagattaatttttcttctcttctagtttgtcattccttctgaagtgaaatctgaatgtcatcaagatcagccacgtgcaatttctattcagagttctgaaatgattgccacaaatacaaggcactgtccaaactgtcgacattctgacctagaagctttgtttcaagactttaaagattgtgatttttttagtaaaacatataccagcttccccaaatcttgtgacaattttaatcttctacatccaattttccagagacatgctcatgaacaagataccaaaatgcatgaaatttataaaggaaatattactccccaattgaataaaaacactcttaaaacttctgctgccacggatgtttgggctgtgtacttttctcaattttggatagattatgaagggatgaaaagtggaaaaggacggccaataagttttgtagactcattccctctttccatttggatttgtcaaccaacaagatatgcagagtcacaaaaagagccgcagacttgtaatcaggtatctctaaatacatcacaaagtgaatctagtgatctggctggccgattgaagcggaagaagctcttgaaggagtattatagtacagagtctgagcctttgacaaatggtggtcagaagccttcttcatcagatacatttttcagattttccccttcctcgtcagaggcagatattcatctcctagttcatgttcataaacatgtcagtatgcagattaatcactaccagtatctgcttctacttttcctgcatgagtcacttatcctgctttcagagaacttaaggaaagatgtagaagctgtaactggcagtcctgctagtcagacatccatttgtattggaattttacttagaagtgcagaactggctcttttgctccatccagtggatcaagcaaatactcttaagtctcctgtttctgaaagtgtgagcccagtggtacctgattatttgcctacagaaaatggggattttttgtcttcaaaaagaaaacaaattagtagggatataaatagaattagaagtgtaactgttaatcatatgtcagacaacagatctatgagtgttgaccttagccatatccctttaaaggatcctttgctttttaaatcagctagtgatacaaatctgcaaaaaggcatttcttttatggactatttatcagataaacatttagggaaaataagtgaagatgaaagtagtggacttgtttacaaaagtggctcaggagaaattggatcagaaacaagtgacaaaaaggattcattttatacagattcaagtagtatcttaaactacagagaagattcgaatatactttcatttgatagtgatggtaatcaaaacatactttcaagtactttaactagtaaaggaaatgaaaccatagagtccatctttaaagctgaagatttgcttccagaagcagcttcactctctgaaaacctggatatcagtaaagaagagacccccccagttagaacacttaaatcacagtcatctttaaggtaacaacattttattggcctttttaaaaattaatttattttgtggagcgtgtgtgcctatgagtgtattttgttttgaggcagaaaagctcatgacaaaatatggcattgttaacatgtagaagagtagatgtttcaaaatatgaaaacactttgagcttatacgtttaaatataatttcagctatggatgctatatacatattttaattctcttagaagtattttttagatagaattcttttctctatatgtaataattttctaataattttgttaacagtggaaagcctaaggaacgttgcccacccaacctggctcctctctgtgtttcttataagaatatgaaaagaagctcttcacaaatgtcattggataccatttcacttgacagcatgatattggaagaacagttattagaaagtgatggaagtgatagccatatgtttttggaaaaaggtaaagttatgatacggcttaagaattcatattacgtacatacaccttaggagaaaagggatgcttttagttatattcagtaattgttaactgtacccatgctttttaaagttactgaacataacta

SEQ ID NO: 10267 - DNA, 2300 bp, Homo sapien
taagtttacctaaagtatttaaaataatgcctgacatatggggaggccttgtcaatataaaagttgtgctagtatcatctgtgaactctaccagggcagggattctgctattcttatattcttaccttttatcctggtgccttacaaatgaggggggctcagtaaatactcattggattgaattatatttcctaaaatccttaatgtgccgtcataaaagagagacagttattactatttggactccaagtatgctaaaatttttctgtggtaaattaaatctttctgataattgacttaatatttccccccccccctttttttttcccagagtcaaacagacgtattactggaggggcaatgcaactctcttttacacagctaactatagattattatccttatcataaagcaggtgtgtataacagcatctttaaaagatataaatgttgttttcaaattatatagctaatttatttagtttagttttatcttgcttttatttgttaacaagaaatgagatgaagagattggtatttttctcctggcagtatttcattaagaaagtagaattgccatggaatatagtcatacagtgtatattgacatttatatagatttttagaaatcataatttttagaaattgacagttttccaaataaccaatttaaaacttaaaaaaaaatcagggtacagaggacatgtgtttgtgctgttttgttagttgtgaccaaaacaagttattaatgttttaaatttttaaatgatttatatatttaaaaattagaaaagagtatgaagctaggaatgaaaagagtatgaagctaagaataagagtatgtttagctaaattataggattccagatttcataggctcttaacaatctggtattggtagattctttctcccaaataatgaaaagaaaaaaaaagtatgattattgtgaccaaattaatttgactttataccgtttttgccttctgttagtatttagcattcacacaagtgagaaaaaccaaactagagatcatagagttttccaggacatttaaaaaatggtaaagtttttctgttcacacatttttgtttacacgttttttaaccaatgtttgtcatttctatgttggtacctgattaaatttaaaagttgtatgatttttttttcattttaaattttcattgccaacattcaatataataattctcttttgaaggattttgtcttatatactatcgtcctgactcataaattaacttacaaatgcataaaatttttaactagatatttatttttgaagaggtgtgaaacattcatagagtaaattttcttttttttttttgatccaaggcctcacgagtgcagtggtgtgatcactgctcactacagcctcgaccttctgcctcagcctcccaaagtgctgggattgattacagatgtgagccactgcgcctggcctgattttattgtcttaacccttttatgtgcatttttcttagttgctacagagaagcctaatgattctgattatatatttttcttccaaaaactaactatggctgagtacatcttgagaagttttattggtttcttaaatgttttaatcatcatcatcttatcatttttgtggtttaggtttttgttagttaacttgataacacatctttgaagaaaggattctatttatttgataatattttctgggattcagtttaatgcaggtttaccaggtaattgagcatccagtgaagggtgacgagtcatatggctttaaattgaatcttagtgattttctactaagaatgggtactagatagaaactcctccagatgatttgcttttgacattctttccctctgtttcaaatgttttactcatatttcgaaattacatgtaggtgaagcctgtaaatttttcagatatcaaagtctttcttgaataaacgactaaatctcattggaagcattactataatataataaatgaaagttgtacatttttcaatgaaatacctgttgttcattttacaggagatagttgtaatcattggatgtattttagtgatgcaaccaaaacaaaaaatggatgggccaatgagttattgcatgaatttgagtgcaacgttgaaatgcttaaacaggctgtgaaggatcataatgtaggttcacctcctaaatccccaacacatgcctctccccagcacacacaaacaggtattttacctataatagcattcccctaatattaagagtgtttgcactctgtgtgtgtgtgtgtgtgtgtgtgtgtgtgtgtgtgt

SEQ ID NO: 10268 - DNA, 2300 bp, Homo sapien
aaggattattcatgaggcagagagcttatagtggcccattttttttcttccagaaatagcatcccaaaacctgactttaccatagtattaagaaaaaggtttgtaggtagataaatgtttatatttttatttttatcagtatttatcttgataagagagaaaacataatgaaagaagtaccggagagtattttaaatagcaccatcatagacataaatacagtcttgttatagctttgaaaatgggaaaagcaggagaaaaagtgtttgatatcagtttaacaattaattaataaaaagttttctggagtctatagtatttaacgttttacagctatatttcactttgtttctttacttaccttgggctgcaatcattttcatgaagagattctcatttactaagtatactttgcagttcttttacagtatgatcatagttcttcatagatgtaatatgtgtaaatatatatacatgcaaaatacatatactttgattttctttaattatctttagttaataacttgttctaaatttgaacattgttaatttttaaagtggaaaatttggtcttataattattataaaaattcatctacagttttgtggctcatatgtcagataatcttacattatagttatgtatacaaaataattttaggctattagaggttcatatttatttttatatatcaacagggttctatactatttctcttcagggagaaaaatatttgaactcacaacctatttataaatcctgtctcctttctggcttctttagttattcaagttcaaaggacataccacatcttttaggagaggcaccagagcacttagagtactaaataatatcacaggggcttctacaaagatgtgctttatttctataggatatcatattagtcccttttcacgctgctgataaagacatacccgagacagggcaatctacttacagttccatgtggctggggaagcctcgtaatcgtggtgaaaggcaaggaggatcaagtcccattttacatggatggcagcagtcaaagaaacaatgaggaagctgcaaaagcagaaacccctgataaaccatcagatctcgtgagacttatttactaccaccagaacagtatgggggaagccacccccatgattgaattatctcccaccaggtctctcccacaacacgtgggaattgtgggactaccattcaagatgagatttgggtggggacacagggccaaaccatatcagatatataacagtgtatacagggcccacatttgttttgtttttaatatatataatattcaaataaactgcctttaagagttaactacattttctaaaacaagggctataaatatgttaaatataacttcagatatttactgagatatattgggttcatatttgatttgtgtatagttttacagtttttttgtttgtttttttgtttttgtttttgtttttttgagatggagtctcgctctgttacccaggctggagtgcagtggcacggtctcagctcactgcagcctctgtctcccgggttcaagtgattctcctgcctcagcctcccaagtagctgggattacaggcatgcggcaccacgcccagctaattttttatatttttagtagaaatggggtttcagcatgttagcgaggctggtcttgaactcctgacctcagatgattcgcctgcctcggcctcccaaagtgttgtgattacaggcatgagcctagttttaccgtttttaaattttagttttattcttaggtaattcagaaaatattttagggaaaatatattattgatgaaaaataagatgtactatggttatttttcatgactttcgactgaaaatacttagatttttgtgtgaaatttccagtatttaaattggcagtgataaggcagtttcgaatctttttagagctctacagtagtcgcatctgcccagcaagtgaagacaacgcaaacttcaaatgctcctgatgtaaatgatgcaattgtgaaactattcaatgattttgatgttaaggaaacctcccatcatttagtgatttctcatctagatctacacatatgtgatgacattcatgctaaagaaaaaggtaaaataacttgcttatttcaaactattttggtttttctagaattgactacaaaactggattgtttattaaatctgttgtgtaggatgtcctgtaagataatttgtcataattgtgttcatatgaatatatagatgaaaggcacaactggaagcatatattggtatgaaattttattttgct

SEQ ID NO: 10269 - DNA, 2300 bp, Homo sapien
tattttaaataattttatgcaaagtataaatgaatttttatatctacctctagtaaaaacgtaactaaatattataaaattatacacctacgaagctatttccttggaaacagtgttatacatctcagatatatagcttgttggtgatccagctttgtacatgggaatggcatacatttaggctttattttttgaaacagtctccctttagcccaacctggagttcactggcacaatctcagctcactgcaacctccacctcccaggttcaagcaatttttgtgcctcagccccccgcgtagctgggactacaggcaagtgccacctcgctgagctaatttgttttgtaattttgttagagatggagtttcgctgtgttggccatgctggtcccgaactcctggcctcaagtgatctgcccgccttggcctcccaaaatgctgggattacaggtgtgagccaccatgcccggcctaggctttcaatgaatatcacattggcattatctattgcctgcctactatttcctaaggtgcaggggtaggggtaaacactgatgtaaaaatgaatatcatctgaccctggcctgaaggacctcagagaataatggtgagtcaaatatgaaacaaatctttataagtaggggacaggggctcatgtctataatcccagtactttgggaggctgaggcaggaggtttactagaggccaataattcaggaccagcctgggcaatatattgagtcccatctctacaaaaaatttaaaaatcacccaagtgtggtggtggtggcatatacctgcagtccttagctacttgggagactgaagcatgaagattgtttgaacccaggaggtcaagccattgcacccctgcacttcagcctgcgtaacagagtgagatctgtttccaaaagaaaaaaggaaaacaaacaaatccccaaatcattgtagttcaacataaatgttagcatgaagaagtaagggaaagggttctgtgtagggactacagaaacacagagaggttttaattaattgcttgcagggtgtggaaaggtttcacaaagaggttaataaaattacgtcttagaaatgagtagcagttcacaggcagacatagggaaaaggcatttcagaagagacaatagaatctgcagaaatatagtatttttaaagatcatgatattttctggtaaagataagaaatttggtgttactagagtagcgtttttaggagtgaggttcaaatgcctcacgatatattacaattttccaagttttatattttaaagaaattgagttccacacattccaccttgatgtgtattctttcttaaacttgatctgccagagaatatggttgcattaagatgtcaggctggttttccctttccataatgactctaatcctactttataaatgaaagacattattactcatcctcagtcttactaggatggatttgaacaggaagggggtaaaaactcctctgggaaacaagatagagtggcaatttgaaatattgctattcatgttggaaattgcaagccagatgatttttagttattttcaacacatgtgaaggaagatcaaataattgtcagctattagagattattaaagtaatttttttatagtagatcactttgtgaatcctggcaggtaactcgaaagaatcgagtcacatggctaaaacaaaactgctttccttccaatctgtctatttatgtgaacaaggtcttctagagcctgtagccataaaaacaaataaacagatatagaattgaaggtaaactctgtattattctaccaataaattattcatccatgaggcatctgcagaattctctgggggacctgattttaaacgtttggcaaacagaccactgggccctaacatagaatagttttcctggactggtagcccgagttgaaacaaaagtttgcagtgactgtatatgaaacatgttgtataatgtattgaagaatttggacattttcctatgggcatttgggagccagtggaagtttttaagtaagttgaggataaggaagagagaaaagttcagaactttagaatgacagttggtagtaccgttagccaataagggaaggcagaaggaagtagatttaagggaggtgagggtaagaaaagtcattttgaagctgaaaaagtataaggaaagaagtacaggagactattttgcaatattaccatcatagacataaatactattctgttaagacttgcaaggaagattttggtagcttaggttgtgattggtaacagagatggcag

SEQ ID NO: 10270 - DNA, 2300 bp, Homo sapien
ggcggaggtcgcagcgagccaagatcgtgctgctgcattccagcctgagcgatggagtaagactgtctcaaaaataaaataaaaataaaatgaaatgttgagtgtagtcaacttacacgtctatcctttccattcttcaaaaagggccagcttattggactatgtgtaaactacttcccacccaactcccaagatgtacaaccacacatcttgctaatacatccctcaggggtggtacaatttcttttcctgttttagatatcactagtgttaaaagaaaaacttcagccaaattaaatttaaaggagtttaacaatgaacgattcctgagtctggcagcccccataatcacagcagattcagagagactccagcacagccacatgctgggagcagatttctggccagcaaaaggaaagtgaggtctagaaaatggaagtgaggtacagaaacaactggattgcttacagctcagtgtttgccttatttgaacacagtctgaacagttggctacatctggccaaaactcagtgattggcacaggtgtgggctatggtcggtttatacctctgcttattttcataagttcatgatgtacagaaaaacctttaggctgaactcaattacgtaaggaggcagtgttaggctaaacttgacttaacactgagtaattttttttttttttgagacagtcttgctctgtcgcccaggctggagtgcagtggcttgatctcagctcactgcaacatttgcctcccgggttcaagcaattctcctgcctcagcctcctgagtagctgggattacaggcgcccgccactatgcccagctaatttttgtattttttttttgtagacacagagtttcaccatgttggtcaggctggtcttgaactcctgacctcaagtgatctgcctgcctcggcctcccaaagtgctgggatgacagaagtcgtcattttaatctctgaaaatgttagctctgtttgggattgggtggggtggaggtgtagaattgtaacagttttccctagttcaacaatttccttccttccttacagaacttttcatatgatatttacacctttaggttcaacctagtgaagtgggtaaggctgatgattaatctatttcacagatgattaaaatgaaactaatagtaaagaaattattttccccaggataacacagctagaaaataccagagccaggacttgaattatacaccttctaattcctaggtcctagactactaggaaccattgtcaacctttacttcccttagaatagcaataaccaaaggaaacattaaattgccacatttaggtaagggaaaggcaggacaccttaacaaaagaaaaaaaaaaaacaccaaaaacaaaaacctaaggaagaatatgaagaaaggtgagtaggtcaagagagcaaagcaagcacaggagttaatggccgattcttaaaacattctaaggaggccgggtgcagtggctcacgcctgtaatgtcagcactttgggaggctaggagggtggatcacgaggtgagaagttcgagacctactggccaatatggtgaaacctcgtctctaataatacaaaaattagccggccgtggtggtgcgcacctgtaatcccagctactcaggaggctgaagcaggagaatcgcttgaaccctggaggtggaggttgcaatgagccgagatcgtaccactggactccagcctgtgtgacagagcaagacttgtctcaaaaaaaaaaacaaacaagcaaaaaaataaaaaacattctgaggaaatgaataagggaagtaggacgtggaagtaaaaatcagcgacgggtcagcgatggaggcgggaacaccagcagagggaaggagggaggattaaggccaagaaggatggtgtattgagagtcaagggccctgtgtcgcgagggctaagaaccctggcgccaatgccacaaacctcccgcccccgcccagagcccagccagagcccagccagagcccgcccagagcccgcccagagccggcgttggccccgccccgcctcgtgccggccccgcctggagccgccccgcccccgccctccaccgagtctcttaggtgatgctgcagccaagatggcgcccgcggcggccgtggcggcctgagcgtgatgctccgggttctcggcggcggctgtggccttggccggggccttgggtctctcccggtcgtgagcgatcagcgcctctccgccggccgggctagccgggacagagaggagacggccacgaagagaggaggcagtgagcaacaggac

SEQ ID NO: 10271 - DNA, 2300 bp, Homo sapien
atcaatattgaaaggtcagcttgccgatttcattggaaagtgcttcctcaaggaatgctaaacagtgctgccatgtgtcagtatcatgtaaatcaagctttgttccccagtagaaaagaatttcctcattgcaaggttattcattttatggatgatattctactagcagccccagtggagccagtgcttttaagtttatatacctctgtcataaagaatgcacagctaagtggtttaatcattgcacctgaaaaagcacaaatgtcctctccttggaagtatcttgggtacatacttcctggtcagtaagacctcaaaaggttaaattaaatactagcaacttacacaccttaaatgattatcagaaattactaggtaattttaactggcttcaccccaccttgggcattcctacttataagctgcaaaacctgttttctatcttaaagggtaacacagccctggattctcccagatatttaacccctgcagcaaaaaaaaaaaaaaaaaaaaaaaaaagatggaagaaatagaacaggctatttctcaaagacaactaaatctcatagatccagaatattctgttcaattgtttatttttattttccccactaaacactcccctacagggttaataggacaaatggccccagagctatgctttctagaatggattttttgctcacataccgagaccaaaacactatctccctatatccagttaatcagtaaagtcatatattcaggccaccgatagttcactcccccatacctaatgctttaacactgtttacggatggttctagtaaacatggaaaagtggcagtctggtggagaccacataattccatcaatcgatctggatttactaacactcagagagctgagggtggggccttgatattggctttggaaactttttccactcagcccctcaatattgttagttacttggcttactctgtttatttactgcagaaccttgagacagccctaattaagtccactctggagcccaccctgtgtgctctttgacttcagcaattgctagatcagtgtacacatcctatttttattatattcagggccacagctgactgcctggcccactggcttatggcaatgatgaagcagaccttcaggttatgacatcagtgcttgaccaagccacacaatcgcatcaatttttccaccaaaactggagaaacttgtctaaacaatttcaacttacccagaggctggctaaacaaattatcctgcaatgccgagattgccagctcacaggcacataccctccttcaaccctagaggatgggaacctaataagttatggcaaacagacgttacacacatccctgaatttggaaaacttagatacgtacatgtatccattgatttaattagtgcaaatgcccttcctggagagtctactggatatgtcactaaacatcttcttttaacttttgcatttatggggcaacccacaaaaattaaaactaataatgatctagcttatgccagctcacaatttcaacaattttgtcacatgtggaacatccaacattccacaggcatcccgtataacccccaaggacaagccatagtagaatgtgcccactccacccttaaaaatatgctcaaaaaacaaaaaaggggagtatgggtaaggaccctgcagcattattggcacaagccttatttacccttaatttttaaaatttagatgacaaatttcagtccattgtagaaaagcactttgctaaaacctctcaagacataaaactgcagttttatggaaatatgtgaacagtaatgtatgatgtggtccaaatgaattgttaacttggggaagaggatatgcttgtgttcacaccccctcaggtcctctttggattccagcacgacgcatcaaaccataccatgacgtgactaggacccaacctagaaatgaaggaactgaccctacaggactcacaaccctggataatgcagtgtcctcggacggcaacaagctctggacattacctgggggatgctgaaggcggcaactgaggaggctgaatgaatcctgctccagacacagacaccattcactccagataatttgttgcttgctatgctctctgttgtacattgcaactcgcatagggtattgatacttcatatgctcttgctttgtctgcaacctgtacctggtgcactctattgggctcatattttagatccacctttctttcaccctgtcacctgggcagacacctccttctcagcctttaataacataactgcttggctaggag

SEQ ID NO: 10272 - DNA, 2300 bp, Homo sapien
aaacaaaggtgaaaagaactgcacagtcaataagtcagtaagtcattgatgcccgctcggaatttccaagtttggcggggattgttcaggctagggtttcatcatgggacaacagttatcagctcaacaggaacagtatataaaagtattgaagcagctgcttaaaactagtggagcctcattttcacaggctcaattaagggacctaatgcaaactgttgtctcacataacccatagttcccagaaaaaggaacgctagacgtagagctctgggaacaagtggggagaaatcttaatcagcatcatgtgcaagggcaatgggtcccagtatcatctttaatgctatgggccttagtcagggcagccctggctccattatacacagaagagcctaaaaaggggaaggaggaggaaccgtcacctgctttaccacctccttttccctcagccccaatatcgccaggccaaaataacaaagaggaaatggaggttttgcctgagccccctcctccaataaataggaaaaaagacaagagctatgctacagctatgggaccctttcttaggcaagaggcattaagtggggagctcttagcctgcctggtaatacaagattgacagggcaattgggtatataaacccatttcttttaacatttataaaaagttaagaaaaagcattagaggctgaaaccgcgtggccaaatgggtggtaggcagaaggaaatacttggcagcaaaggaagctcgcagacctggagccagcaagtgcttccaggaactcagcctgcacagaggcagcagtgacaaggagccaggcgcagcacaccagagctggcctgatagggaggggcaggaggcgtgcacgaaggtccgcccagcggcagcagggtgagggagcagcacagacaaaaggtggcacagacaaaaagcagcgcctgagcaagcgcaacatgaccgccgccccgggacccgccggctagactctctggctccgcgggtggcccatggcaaaatttcatgtgttccttgtatacaagcgacatcccagattataattctctgctaagatttaagtacaatttaagaatttaaaacacctctttctaataatggccactgttgcttttacactattcccctggcaaagcaagacagaaaaatttgcatttacaataccagctatcaatattgaaaggtcagcttgccgatttcattggaaagtgcttcctcaaggaatgctaaacagtgctgccatgtgtcagtatcatgtaaatcaagctttgttccccagtagaaaagaatttcctcattgcaaggttattcattttatggatgatattctactagcagccccagtggagccagtgcttttaagtttatatacctctgtcataaagaatgcacagctaagtggtttaatcattgcacctgaaaaagcacaaatgtcctctccttggaagtatcttgggtacatacttcctggtcagtaagacctcaaaaggttaaattaaatactagcaacttacacaccttaaatgattatcagaaattactaggtaattttaactggcttcaccccaccttgggcattcctacttataagctgcaaaacctgttttctatcttaaagggtaacacagccctggattctcccagatatttaacccctgcagcaaaaaaaaaaaaaaaaaaaaaaaaaagatggaagaaatagaacaggctatttctcaaagacaactaaatctcatagatccagaatattctgttcaattgtttatttttattttccccactaaacactcccctacagggttaataggacaaatggccccagagctatgctttctagaatggattttttgctcacataccgagaccaaaacactatctccctatatccagttaatcagtaaagtcatatattcaggccaccgatagttcactcccccatacctaatgctttaacactgtttacggatggttctagtaaacatggaaaagtggcagtctggtggagaccacataattccatcaatcgatctggatttactaacactcagagagctgagggtggggccttgatattggctttggaaactttttccactcagcccctcaatattgttagttacttggcttactctgtttatttactgcagaaccttgagacagccctaattaagtccactctggagcccaccctgtgtgctctttgacttcagcaattgctagatcagtgtacacatcctatttttattatattcagggccacagctgactgcctggcccactggctt

SEQ ID NO: 10273 - DNA, 2300 bp, Homo sapien
ccatgttttttgttgacacaatagaggtaataatagtagttgtctcacatggtggttgtgaggattaaatgggattgttagcatggtggctggtgaagcactcaataaaggttcaaaccgtggtagtaataacggtaaaacaatagcaatattacgtaatccctctgggcctctgttagccagctgtaaattcaatctctttccctgtcccttcacgcttactaagttcttttaaaaacaaatgagactgactgggcgcggtggctcatacttggaatcccgcactttgggaggcctaggcgggcgaatcatgaggtcaggagtttgagactagcctggccaacacagtgaaaccctatctctactaaaaatacaaaaattagctgggtgtggtggtgggcacctgtaaattccagctactcaggaggctgaggcaggagaatcgcttgaacctgggaggccgaggttgcagtgagctgagatcatgacactgcatttccacctaggtgacggagctggactccatctcaaaacaaacaaacaaacaacaacaaaaaaaaaaacaaatgagaccatgggcttggaaatgccttgaaaaaatgtcaagtgtgattcagagtgaggaagtattactgtggaatagttactgtagctattgttaccggtcggccaactgctcctctgcctgctatatcctgacttaaccttggtctgtatttgccgtacaacaaggagttaaccaaagagagagacgccctcaggctggagttatacaagaacaggtagcatgggggaaggtgggatgggaggtctgggggcccttagcatgggtgatgtgctgggaggttggggggtacaggtaagcatggtgaggtggtcatacaggtttgcatatgtgcacagttaagctgtagtgctggtgactcatggtgtagccttgggcaactcatgccttctcttgggcctgccatctgtgactttggattcctagggttccttccaatgccgcggttctgtgttggttaggcaagggtgcagggttgatcactaaagcagtcctttctgttcttagttcattcctttctctactgcttctggccataaccgaagcaatgaggacctgaagcaggagaaatcagaattggaagagaagcttcaagtcctggtgactgagaaggctggcatgcagcttattttagaagagccgcaaaagaaattacaaatgatggcactcctgcttcaacaggctagggggtgcggctccgggggtggttggagccccatccagctggggccatggtctagggatcatgtggggtatggggaggctctagccaagcgttggaaaatttgggtccttgttctgatcctaccatagaatcctctagagagtgctaaaaatctacaaattggggccctaccatagtcctgggtaatcagaatctcagggttagggcttaaaaaaaaatttttttttaaagcatcatagatgaaaaccattattttataaattacatttgtatggctagctaatgagtctgtatacttccatctgacgttcaagccaacactttcactattccatgggtaataatagagagtagagattttttttatttgaaatggggtctctctctgtcacccaggctgcagtgcagtggtgtgatctcggctcactgtagtctctacctctcaggctcaagcgctcctcctgcctcagcttctcaagtagctgggaccataggtgcacaccaccacgcctggttaatttttgtatttgtagagatggggcttcaccatgttgcccaggctggttttgaactcctgagctcaagtgatccacctccctcagcctcccaaagtgttgggattcaggcgtgagccaccatgcccagcctgagatctttttaaaattatttaattttttatttctaaagcaaagaaacttgacagcagagtcgtattgactgagttgtacattaagcctagccctagcccttttaaggtgcactgtgtggaacggcccaggctccccaaatctaaacttctcactcttcaccatccagttttcaaggcactgtgaagcccctgatgcgaaacagcagttaccgcaggccatggaggagcgggcacagctgaaagcacatctagggcaggtgaagctttgcaggggagggatgtggaaggaagatgaccccaggtggccaggagcaggtgaggaccagtgacagccctttgtaacttttgtacccattctttaaggtaatggagtcagttagataactacaaacggagagaga

SEQ ID NO: 10274 - DNA, 2300 bp, Homo sapien
cccagactggagtgcagtggcatgatcatagctactgcagcctcaaactcttgggctcaagggattttcccgcctcagcctcccaagtagctaggactacaggtgtgtgccaccacgctctgctaatttttaaaattttctgtagagatatgaattcgctatgctgcccaggctggtcttgaactcctgagttcaagtaatcctcccaccttggcttgccaaagtgctgggattacatgtgtgaactactgctcctggttgagagtttacttttgtttgctagtggtgttcttggtatcttttcacatttgaggctttggtgctagtgctgaagtattacactcaccatctaaggtttacagggcttgtgttttaatatcgaacagatgaaactgttctgcatctttgcaggtatacaaaatgtgcctaccaggactctcctttgtatccattgaaagcaagaagtaatagagtaaaattttgcctggctagaggctttgaaagaatggagtattctggtttaattctattaacttagaattatgaaggtgaaaaaatttcaaaacttttaatttcatgttgaatgcaatttgaaaatataaccaatgattccattttttttctaataagtttggacattcagatctacttgatcttttattatagaactcctactgtgcctgagacttacattgtgaagatccttttctaaaactttagatgtaagaggatgtaaatggtattgtgtgagatcaggctggatgagaactgttacctgtaaatacactttttagactaaatctctgattgccacttgttttctaatttaactcataaaaataaaacacattggatggagggtggaagtaggaaggagatttatgtcttttaattgcatgtcattgtttcatatcaagacagaacatatagcatccctggctttggacctacagaaggaaacacatttttctacctgctgtatgccagaggttcttgaacacctggagggtttattgaagcacagattgctgggccctactccagagtttctgattcatcacttctagggtggggcctgataatttgcatttgtaaaaagttcttagctgctgctggtccagagactacatttttgagaaccactcttgtacactaactaactacaaattgtagaactctagaaaaaagcttagtttggtttgggataagaagcacaaaggttatggatcaaatcatgaaagcttcaaccattgataccaacctagtgtggaattcacataacaagcaatacacaatgacataacacagttcttggttttcatgattgtaagtcatagccaactattgagtgagaaattcagattcatttacaaggtttagagattccaggtgattctagaaaaatagaatttagtgattaaccccatgagagtaggagttatttatgtcctttttctctcccctatcacttagcatttagccttactttagaagggccctgtatttgctttaaactgttaaggagctttgaatgcttattaaattgaaagctttgtttatttatttatttatttatttatttaatttatttttgtgagttggagtcttgctctgtcacccaggctgaagtgcagtggcgcgatctcggttcactgcaacctctgccgcccgggttcaagtgattctcctgcctcagcctcccatgtagctggaattacaggtgcccaccccaccacacctggctattttttgtatattttgtagagacagggtttcaccatgtcagccaggctgatctcgaactcctgacctcaggtgatccacctgcctcagtgtcctaaagtgctggaattacagacgtgagccaccatgcccagcccaaaagctttatgtttttaaagatattagacatgtttcttgtgtaaaaaaaaatcttaacaataatgtaggagaataagagaaactttttccaaaaaagagaaatcactatgattattttgtctcattggaatgttggataacgtagtctgcttcattaatcatcaagcgtgctatggatttttccatttttacaggatttgtacctcaattgatggaatattggtaattcttctactccatttgaagatgaaaaataaaggccaaaatcataggcctggcacagaagctggataatgaagacagctccggaggaacacatagatacacacacatatagacacacacatatataaagtacacagacatattatttttaaagtttattttttaaagttttaaagtttctaaaatgaaagctg

SEQ ID NO: 10275 - DNA, 2300 bp, Homo sapien
gaaattcacctgacatggggacagtccatgtatacactgaggaagagcctctacctttggcaaaggtcttccaccggggtcattcccatgtttatacaggcgcaaagtaagcctgagtaggactgcaaccctggctggcttccttcggggaaacaggctgtctgcacccacttacagacaggacagaggagcccgagagaacatgggaatcagatcctgcttgaattggcaaaagctgagtcgacaaagctctgagaacatctccgggggcagctgcagctgttagcagctctgggggtctgaggaacagtcctgtgctcataaggccaagagcctgcctactctgctctccgcgtggccagctttgagagtgctttcatacatcccagcccaaccctgctgccctggagaaagccgagcctgcagcgcggaagaggaatgagagagaaggtggaggttcacaggagccaggcagggagcacagcctggagaaaggatactgggctccaggcctgggcccagatccctctatgtgctcgaagcaggtggacccctcggaggtgacagagtctagcccgctaaggactcccaaggaaaggggaggcctctcagcaccaggactcctcactctactctcctgcttctgcattatttttcccattatgtctcttcgctggaggattaaaagagcctcaaagagcaaggcctaactggctgaagtgaccccctcccacctctcctggacaaaacaaggagcaagaaaagagggtctgccacttactggctgtgtgaccttagctggagcatccctgcccactctcggaggaaatgtagtggaatatctctaagggccctgccatttctgactctttttgtctatagtgctaaatgcactgtggctcacgtctggaatcccaggaagatgggtggggaggatggtttgagcccaggagttcgagactagcctgagcaacatagcgagacccccatctacacacacacacacacacacacacacacacacacacacacacacacacaaaaaccattttttaaattagccaggcgtgggcctgcacctgtggtcccggatacttgggaggctcaggtgggaggctcaggtgggaggatcacttgagcccaggcatgaggctgcagttagctgaaatcacaccactgcacttcagtctgcacaacagagcgagatcctatggcaaaaagaacaaataaataaaaataaaataaatgtactaacatttactgagcagtttagagtataattagtttaatctcaacaccccatgatatagatactactgctatctcattttagaggacgctgaagggcagagcggttaactgatgtaccaaggtcctagcagagttctaaaggaggcccctggggcagaagcctacggttatgaatgcttgggagggctgcaccggacatccacgggatgctgggggtgagaagacactagagaggggtcagagggaaggagcagagggagataatgggtcaaagtgtctgaggaaggagactgggctgggtagccccagccacccgggcctaagcccaggtggaggggaggagataggaacgaggacgggatgtggagaagtggggaaaggcaggccgacgttggcagggtgcgaggaggccttggagaaaggagggtggatggggcaggcccccaggggaggcaaggagcgccgacagaagggcccaggcgcttgcagggcgcgagttcccacctcaagcaccgtggcggctcccgcgctgcgcacctggaagtgcgcaggctgctccgccgcctcgtcggcgcgctggtagctgaagcaggcttctgctatgtccaggtggccgaggggcagcgggtcgtgggggttcttgaagtagcagaggcagcagcggcgcccgtccaacacgaaccgacggctgcggtagccacgcagtcgcgctggttcccgcgcggtacccgccccgggctctgcagcctccccatcgccgtcgctgccctcctctgcccgggttccggccccggtatggctgcctgcgcgccaaccgtttgttccccggcccccgcgccttcgcgctgcggctgctgcgctccctgcccccgcggtgcccccttcccgccgccccgctcctctctcaggcgctcaaagtggcctggaatttgtagaacgcccccctccaagcccgttggcagttgtcctagcccgctggcccttgcccccgcccgctggccgttgcccccgcgacgccccggaagccaggtcctgcctcccgcacctgc

SEQ ID NO: 10276 - DNA, 2300 bp, Homo sapien
gaggatggtttgagcccaggagttcgagactagcctgagcaacatagcgagacccccatctacacacacacacacacacacacacacacacacacacacacacacacacaaaaaccattttttaaattagccaggcgtgggcctgcacctgtggtcccggatacttgggaggctcaggtgggaggctcaggtgggaggatcacttgagcccaggcatgaggctgcagttagctgaaatcacaccactgcacttcagtctgcacaacagagcgagatcctatggcaaaaagaacaaataaataaaaataaaataaatgtactaacatttactgagcagtttagagtataattagtttaatctcaacaccccatgatatagatactactgctatctcattttagaggacgctgaagggcagagcggttaactgatgtaccaaggtcctagcagagttctaaaggaggcccctggggcagaagcctacggttatgaatgcttgggagggctgcaccggacatccacgggatgctgggggtgagaagacactagagaggggtcagagggaaggagcagagggagataatgggtcaaagtgtctgaggaaggagactgggctgggtagccccagccacccgggcctaagcccaggtggaggggaggagataggaacgaggacgggatgtggagaagtggggaaaggcaggccgacgttggcagggtgcgaggaggccttggagaaaggagggtggatggggcaggcccccaggggaggcaaggagcgccgacagaagggcccaggcgcttgcagggcgcgagttcccacctcaagcaccgtggcggctcccgcgctgcgcacctggaagtgcgcaggctgctccgccgcctcgtcggcgcgctggtagctgaagcaggcttctgctatgtccaggtggccgaggggcagcgggtcgtgggggttcttgaagtagcagaggcagcagcggcgcccgtccaacacgaaccgacggctgcggtagccacgcagtcgcgctggttcccgcgcggtacccgccccgggctctgcagcctccccatcgccgtcgctgccctcctctgcccgggttccggccccggtatggctgcctgcgcgccaaccgtttgttccccggcccccgcgccttcgcgctgcggctgctgcgctccctgcccccgcggtgcccccttcccgccgccccgctcctctctcaggcgctcaaagtggcctggaatttgtagaacgcccccctccaagcccgttggcagttgtcctagcccgctggcccttgcccccgcccgctggccgttgcccccgcgacgccccggaagccaggtcctgcctcccgcacctgccaagtccccgccctgccggagtctcgctctgtcgcccaggctggagtgtagtggagccatctcggctcactgcaacctccgcctccccggttcaagcaattctcccgcctcagcctcccgagtacttgggattacaggcgcccgccacctcgcccggctactttttgtatttttaatagagacggggtttcgccgtgttggtcaggctggtctcaagctcctgacctcaagtgatctgcttgccttggtctcctaaagtgctgggattacaggcgtgagccaccgcgtccggcccaaaagccttttttggatgagaaagactcactcagcttcgtcctgaagagcaagtgggctggggaagaggagagtatgaatgtgagtccaagagcaagttttgcacttttttcttcaaagaatgtcaccgtctgaagaatgcgattggaagacacacacacacacacacacacacacacacacgcagccggttctctacaggattagaaaaaacttgcgcgaattaatctgcgtagttaaaaacaaatacgaaatgagcgagaaagcacatagtagtcaaatctcgccaccacataaacaggttaagtttggaagcacagcccctaacattcggtgctgcttagcatctccgacttccggcgtcctccgttgctaaggtgaccagaggcgcgtcctaacgctccgcccaacaaaccatagagtaccggaaaaagctcgagcagaggggtcggaaagggaaaacaactacggctgcggtgtggttggtggtgagatgacgaccttagtgctggataatggagcttacaacgccaaaatcggttacagccatgaaaatgtgtcgtaagtactttctttctccgagggacaagatatatacgcctagtggtttcatgtgctacgtttcatctccggacat

SEQ ID NO: 10277 - DNA, 2300 bp, Homo sapien
tcgcatgaactcaggatttcaagactagcttgggcaacacagggagactctataaaaaatacaaaaaattagtggggcatggtggcgtgctcctatagtcccagctgctcaggaggctgaggtgggaggatcacttgagccagggaggccgaggctgcagtgagctgtgaccctgccactgcactccagtcagggcaacagagtgagaccctgtctcaattagaaacaaaaacagttggccaggcgcagtggcttaagcctgtaatcccagcactttgggaggctgaggcaggtggaggtcaggagttcaagaccacactggccaacatagtgaaaccccatctctaccaaaaatacaacacaaaaaaatttagctgggcatggtgtcgcacgcctgtaatcccagctacttgggaagctgaggcaggagaattgctagaaccaggaggtggaggttgcggtgagccgagatcacgccattgcactccagcctgggcaagggaaaaaaaacagtctattacctgaaaaaaacagttaaataaattatggtatacccttactatagaatagtagccagccattagaaagaatgaagtagagctatgtttatagtgtgcaaggatctcattaagtagggaaaaagaaaaacccaaaacaaaaattttttaaaaatgagctgagcagaacaacttgtatattattatcctacttaggtaaaaatgaattcccaacctatgtaaaaatgtatgtaaataaatagaaagatctggaagaataaacttcaaacgagtaaccttggggaagaaggattgtaatggtggctgatgaaagaggatgtacccttttaaagtgtacaattcagtgtttctagtacattcacaaagttgtgcagccatcactattatctaatttcagaccattgcatcattccacaaagaaacctatagttcgcagtcattcttcattcttccgtaccccagtaaaattttaattaaaattaaatttaattaaaattaattaaaaaaattaaagaatgataagggaataacttagaacttctagaatgttttttctagatttgcagggggaagtgggtagaatccaagaacttaagctctcttctccaactatgcataaccgcaaaagtatgcccaactatacatatgtttacgataaaatgacagaaataaaaatccaccaccctcaaattccttctgtaacagaagttacccgtctaatcactcaagaaatcttatccccagacattgtgggcagagcggagactgaggaggggaggccagaaagtgatgggcggaggtgggcaggagggtactcgacggggtaggtggaaaatacagcggtacagcctgttttccatagacagtctacctctctaaccttcattaaacaagtaggctagattaaagaaataactcctctagctcaaggaatttgccctctagtacattaaccccttgttgctgtaagtgtagcctagggaccagcagcattggtgccatctggacatgtattagaaacgcagattatcagaccctactcctcaatcagaatttgcactttcacaagatcctagggattcgtatgtatattaaagtttgagaaaaaacgctttcctgcacgctccaagggcacttcaccacagtaacccctaaaaagcctcagtcctgggtcccccagtccagtgcctggtagggcaggaagggggcggggctaggaaatgggcggggccctggaccaatgaggagcagagtcccagccgcctgctcccttcagctgccccctccaccttcactgcacatttggctaggatatacagggctacctgtcctccttttccggcagaagccatctctacggttcctggaacttggcccgttcagccctgggcccggaagctcgttctgactgacaagtctacggaacctcggagtcaaaagaaccgccataagctcgcgcgctggctcctcccctggcaccatagccccgccccacctgacacccggggcggagagaagtactggctccgcctcttccgaaccggcaggaagtgacgtcatgcccccggccggcaggtcttttagtctttttccccctcccttactcttcgtccccggtccctcccctccccacccctttccttctagctccgacgtttgcggccgcgggggcggcggaggatatggagtaaagccagagtcagtggccaggcacgaaggcagagcaggaacagccaggaggcgtttattaggggggcggggggaaagagccccagcaccgcc

SEQ ID NO: 10278 - DNA, 2300 bp, Homo sapien
aacaaaaacagttggccaggcgcagtggcttaagcctgtaatcccagcactttgggaggctgaggcaggtggaggtcaggagttcaagaccacactggccaacatagtgaaaccccatctctaccaaaaatacaacacaaaaaaatttagctgggcatggtgtcgcacgcctgtaatcccagctacttgggaagctgaggcaggagaattgctagaaccaggaggtggaggttgcggtgagccgagatcacgccattgcactccagcctgggcaagggaaaaaaaacagtctattacctgaaaaaaacagttaaataaattatggtatacccttactatagaatagtagccagccattagaaagaatgaagtagagctatgtttatagtgtgcaaggatctcattaagtagggaaaaagaaaaacccaaaacaaaaattttttaaaaatgagctgagcagaacaacttgtatattattatcctacttaggtaaaaatgaattcccaacctatgtaaaaatgtatgtaaataaatagaaagatctggaagaataaacttcaaacgagtaaccttggggaagaaggattgtaatggtggctgatgaaagaggatgtacccttttaaagtgtacaattcagtgtttctagtacattcacaaagttgtgcagccatcactattatctaatttcagaccattgcatcattccacaaagaaacctatagttcgcagtcattcttcattcttccgtaccccagtaaaattttaattaaaattaaatttaattaaaattaattaaaaaaattaaagaatgataagggaataacttagaacttctagaatgttttttctagatttgcagggggaagtgggtagaatccaagaacttaagctctcttctccaactatgcataaccgcaaaagtatgcccaactatacatatgtttacgataaaatgacagaaataaaaatccaccaccctcaaattccttctgtaacagaagttacccgtctaatcactcaagaaatcttatccccagacattgtgggcagagcggagactgaggaggggaggccagaaagtgatgggcggaggtgggcaggagggtactcgacggggtaggtggaaaatacagcggtacagcctgttttccatagacagtctacctctctaaccttcattaaacaagtaggctagattaaagaaataactcctctagctcaaggaatttgccctctagtacattaaccccttgttgctgtaagtgtagcctagggaccagcagcattggtgccatctggacatgtattagaaacgcagattatcagaccctactcctcaatcagaatttgcactttcacaagatcctagggattcgtatgtatattaaagtttgagaaaaaacgctttcctgcacgctccaagggcacttcaccacagtaacccctaaaaagcctcagtcctgggtcccccagtccagtgcctggtagggcaggaagggggcggggctaggaaatgggcggggccctggaccaatgaggagcagagtcccagccgcctgctcccttcagctgccccctccaccttcactgcacatttggctaggatatacagggctacctgtcctccttttccggcagaagccatctctacggttcctggaacttggcccgttcagccctgggcccggaagctcgttctgactgacaagtctacggaacctcggagtcaaaagaaccgccataagctcgcgcgctggctcctcccctggcaccatagccccgccccacctgacacccggggcggagagaagtactggctccgcctcttccgaaccggcaggaagtgacgtcatgcccccggccggcaggtcttttagtctttttccccctcccttactcttcgtccccggtccctcccctccccacccctttccttctagctccgacgtttgcggccgcgggggcggcggaggatatggagtaaagccagagtcagtggccaggcacgaaggcagagcaggaacagccaggaggcgtttattaggggggcggggggaaagagccccagcaccgcccctcctggaagaaggaagaggtaagtgaccggccgccggcaccgaccgacctccctcaccggcggctctctcgcctgggctcccggagccggcgaggagggaatggaggactcgcgcccgggttaggcctcccagggccgctcaggctggtgggtgttgcctggtgacgggcctgccggcggccggccgggcgatcggcggtcggcgcccgcgcaaagcggggc

SEQ ID NO: 10279 - DNA, 2300 bp, Homo sapien
agggcttgtagggcatgttaatgtgttcgatttacttaaaaatggtgagaagccactgaaagattttaaacactaagacaatgttattaggtctgcattttgaaaaagtcactaagtcttgtttggaaaactacaggagaccacagtagatgcaagcagaccataatcaggaggctacggaagtagtcaggatgagagatggtggtggcttggaacaggactactgttacagacgaagagcagacaagagtcaagagatattcaagaggcaaaatcaacaggacttcatgagaggctgagtatgaagcacgacagaggaattgtcaaacttcaacttctatacaaaggaatggatagtgatgctacccacggagttaaacacagtaagaggagctatttttcttcttggggtgggggaagggaggtatatcatgaatttcaaacatgtgaatatgagtagttattcccagtaacagggttgatctgtctagaaagtattccacagtatagaagtacaatgtgcctgtatttattttactgggtatttatgaatcttagagacaaaataggtttctgcatgtgagtaatgtaaatctaaagagaatgaaggcccttaccttccattaggttcccttcctttacacaatcccccaaaagcattctttatgattacagtttaatgttgcctcaagaagtaatttatatactcagctgatttcatttttaaatattttaaaaatatttgtgctaaagaataagacagcaaaccaaacaacaacaaacctgcaaagtccaaaaggaatcttcaagcacctgactttcaagccatcaccagaacataatggggttttacagtggcaggctgatttggagcatttttgctaaactatttatttttcagaacggagataggctacttagaaaactcactcatagtatccaatgtttttagaaagtgtcatcacaaataattcctgagtttgacgtactaaaaaatagttgacaccttccaatgaagtcactacaggcatagcgcttttaagcagcttgtctggagcctcctcgagtgccttagagggtggatttgataatatggcctccttaattacggatcacaggtatgtgctcaaagtccaataagtttttgcaagctttatcggtctaaaccctcctccatccgtattctcccgtttagaaaaacaagactgcaggagtaaccgtggggttttttctcttaacaaaacccctgccccacccacctcacacacaataaccttccattccagaactaaagctactgtcagagaaggacggcgggcggcagggccctggctggtgacccaggctaccggattccggacctcagaactgaggtgaactctctcacccggtcctagagtagtgtccaatgtccccgaaaggtactacgttctccaccaccgaaacccgagctctcgagccggcatggggggctctccctccggcagctgacttcgatcccgggtctcccgtcgcctcaaggcctctttcgaggactcggccctctcggatccgctccccggagctcgctgctcgtccagccccgctttgcgcgggcgccgaccgccgatcgcccggccggccgccggcaggcccgtcaccaggcaacacccaccagcctgagcggccctgggaggcctaacccgggcgcgagtcctccattccctcctcgccggctccgggagcccaggcgagagagccgccggtgagggaggtcggtcggtgccggcggccggtcacttacctcttccttcttccaggaggggcggtgctggggctctttccccccgcccccctaataaacgcctcctggctgttcctgctctgccttcgtgcctggccactgactctggctttactccatatcctccgccgcccccgcggccgcaaacgtcggagctagaaggaaaggggtggggaggggagggaccggggacgaagagtaagggagggggaaaaagactaaaagacctgccggccgggggcatgacgtcacttcctgccggttcggaagaggcggagccagtacttctctccgccccgggtgtcaggtggggcggggctatggtgccaggggaggagccagcgcgcgagcttatggcggttcttttgactccgaggttccgtagacttgtcagtcagaacgagcttccgggcccagggctgaacgggccaagttccaggaaccgtagagatggcttctgccggaaaaggaggacaggtagccctgtatatcctagccaaatgtgcagtgaaggtgg

SEQ ID NO: 10280 - DNA, 2300 bp, Homo sapien
gtaagggactggggagagatggtgtaggcaattgaggactgactgctaaccagccatgaaagagcacttcttcagtgcctctttcagtgatacaaagttaaaaccaggtactgtgagtgctcacctgatttttgggtattttgatttgtgtgtgtgtgtgtgtgtgtgtgtgtgcgcgcgcgtgtgtgcagctagtttttaaaatttggtgttcctgcgcagggaggatatacagtgtaggattctatttggccatcttactctgccctcttccatcttaaccatttttaagtgtacatttgagtccgttcattaagtacattcacattgtcatggaaccatcaccaccatacatctccacaattgttttcatcttagcaatctgaaactctgcccctgaaacagtatctccttattcctccaactcctcctcccttcctgcccctggcaaccacaattgtactttctgtctctatgaatttgactactctaggtacttcgtgtaagtggaatcatacagtacttgttattttgtgattggcctatgttagcataatgttctcaaggttcatccatgttgtagcatttgttggaatttccttccttttaaaggctaaataatattccattatatgtatatgcatagcaattcatgtgtccattgatagatgatagttgcttatacacattataagcagcttatgtgcccagtcatctgtcaatggaccttgaattgcttccacattttggctattgtgaataatgctgctgtgcaaatgagtatacaaacatctctgtaagaccctgctatcagttctttgcagtatctacccagaaatagaattgctggatcatacactgattctatttttggggggaacaattatactgttttacatagcacctatattcccaccaacagtacacaaagattctagtttctccatatcctcaccagcagttattatttttttctctctctctattttaattatcccatggtatgtaaagatgtggattttcttttttctttctcttttattttgtttttttttggagatggcgtcttgctgtgttgcccaggctggagttcagtggcacaatctcagctcactacaaccaccacttcccaggttcaagtgattcttctgcctcagcctaccgagtagctgggtctagaggcacgcgccaccatgcctggctgatttttgtgtttttagtattgacggggtttccccatgttggctaggctggtctcgaactcctgacctgtgatccgcctgcctcggcctcccaaatggctgggattacaggcatgagccactgtgcacagcctggattttctctttttttaaatagtagccatcctcatggatgtgaggtgagagctcactgtggttttgatttgcatttccctaatggttagtgacttcgagcatcttttcatgtgtttattggccattcatatgtcttctttggaatgtatgttcaagtcctggaagtcagtgtgcattggcttgccaaaagctactccttggaaacagaaatctaacctttagttttggttgacacattccgtggtgatgtcagggacaaatataaaaattaccaaatattaatccactgtgagaataagtgaacttcagttgaatatttgaaaactgagtataatgctattcaggaaaactgaatttcaatctgaagtgtatgtatataaaaatcttaatattcactgtctgcaactcaagaataaaagattccctcacttttcaaactcaggaactgaataaatttggacatcaaaggattctttatcttttcttctgtttatatgcatataggaaggaacttaataaataggtgtactctggttttataactagatttttctcactaatcttcagattgttctggcaattgactacatctgtgtatactttggtatttatgatgaaatttgatttttagctgacacgcaaaacttttattgtgaagagtagcaataattattatttttgtgagacattttattataattgaaaggagttttatttagtgtaaaatgtgttttttccatttacaggtttctgaaggattgtcattcttgcatagcagtgtgaaaatggtgcatggaaatatcactcctgaaaatataattttgaataaaagtggagcctggaaaataatgggttttgatttttgtgtatcatcaaccaatccttctgaacaagaggtaatgaaagttttagtcttctaatttttgaggccagggaaattttgattgcatctggaatggacta

SEQ ID NO: 10281 - DNA, 2300 bp, Homo sapien
tggccctgtgtttaagcagcaggagccaatccaggtatgttatagatatttttgtgtatttatctactgttatttatgattgtgactatcactgaaaacaaaaggaatgaatatatgacttaaaaaaaactgaggtaagtgtatgagactttcttttccattagtcagaaagctgctttacatgtttgaaccaaactatttttaaaattatgattgaactttgcagttaaatgtctgtagctctccataagttactatctcagaagataaactgcaatgaaattttgcatgtgttatactgttctttatgtaccatatatatactttgtagaaagttacaggtttaggaaaataaatacttgtttttctcttgcactttgaagtatttgaagtatttttgattattttgttatttaagtctttaatatgtaggtgctttgtgccagttgtttctctccattttattgctaataactacttccactagaataggaaaatgcttacagcaccatgggaataatgtgtatatgtattgtaagtgaaaaaagtaatcagtctctcatgtatataatatatatttgctagattgaaggtaatgttggatttaagagcagtagagtcacacacctgggttgaattggggcttctttatctccttacttgaagtatgacttgtgtcgttgccatcttaaagcttctatttcctcatttctaaaatgaaaaggattgttgagattaaatgaaattttctggcacatagcaggtattattacatgtttgtagcattgtataggaatagcttattagttatatatcaactatctaatttaatggttttatgattctttgtagtccttcccttgaaaggaggggaacagaaggaagtatgtggtggtaaggtgagaatttctgtgaattagggaaagaacaagtgagggagctgtagcctgtgaagcagggttcccccaaatggtcaaggtgtcatgagggaaagttggtggagccactgttccctaagctatgcatcagtcaagatagtaccctaaggatcctataatctgaattcttatttgcctccattcttttttctcttagttgtccagttaaaaataccttttgggccaggtgcagtggctcacgcttgtaatcccagttctttgtcgtgtcaaagcaggcagattgcttgagcccaggagttcaagaccagcctgggcaacatggtgaaaccctgtctcttcaaacaaatacaaaaataagccaggtgcctgcctgtggtcccagctactcaggaggctgaggtgggaggatcacctgagccctgggaggtcgaggctgcggtaagctatgatcgcgccactgcgctccagcctgggtgacagagtgagtgaggccctgtctcaaaaaaaaaaaaaaagaaaaaatttcttccgaatattcttccctgagtcttggcaaaactaatttctgtataaatagaaggggcagtatgttccttataatttaggtatgtggaagaatgaccagggacaacttaaaaacatttttttctaaaataaaaaaaatttttttaagagatagggtcttgctatgttgccttggctggacttaacttctgggctcaagcaattcccctgtttcagccgcccaaatagctgggactgcaggtgtgtgccactgcacctggcgtctagaattttttcttatactccctctcagttctgtactttctttttctcttgagcttcatagaagccaagtgatggactttacttctttgggatatctcactttactggcttttttcaccctgtagctttccagatagttggtatgtgtgggcaagtgatagattactgtagatatgtgagaggagattagtctttatttaattaacatttaaactcagagcagatgttaaatattgtgcctccagaaatgtaagagacttgatttgtgtgtttttgtcttccacgcattcaggctagcaacatggtgagtgtcaaaatatatgagttattcttttgaagaagctttacatttggcatatattgaatcttttaaagattccaggttttaatacattgtttccgttttctaaacagattttgttaattttcctacaaaaaatggatttgctactaaccaaaacccctcctgatgagataaagaacagtgttctacccatggtttacagagcactagaagctccttccattcagatccaggtacagtatctgatttgtttttctttaatgatgattttgattcttaaagcagaagaagaggtataaagtacattt

SEQ ID NO: 10282 - DNA, 2300 bp, Homo sapien
tcaagccatttcttcttttcattttctcatttagttccctagcccccagtcatccctctgttttcctgttattcccagaatttgccagttatcatttctactatggcaccacattagttaacaagaatgttttaaatctttttttcccccatttctgagttatgcttgctttaagtttcagaatttggaagtacttacaaataacaaaaaaaagaaattaaaattcgctctcacagatgacgatggttaacattttcatatatatccttctagtcttttttcctaaacctatggatagacacaggtacctacacattttagaacttgggattaggtgcggtagctcacacctgtaatttgagcactttggaagactgaggtgggaggatctcttgaagccaggagtttgagacctgcctgggcaacatagtaagaccctgtctgtaccaaaaataaaagatgataaaattaaccaggcatggcagtgcatgcctgtagtgccagctacttgggaggctgagttggggaggaggatcacttgagcccaggatgctacagtgagctatgaatttgccactgcactccaccctgggtgacagagcaagactctccaaaaaaaaaaaaaaaagaaaaaaaaacccaagaaaactaaaaaaagggccgggcgcggtggctcacgcctgtaatcccagcactttgggaggccgaggcgggcagatcacgaggtcaggagatcgagaccatcctggctaacacagtgaaaccccgtctctactaaaaaatacaaaaaattagccgggcgtggtggcgggcgcctgtagtcccagctacgcgggaggctgaggcaggagaatggcgtgaacccgggaggcggagcttgcagtgagccgagatcgcgccactgcactccagcctgggcgacagagcgagactccgtctcaaaaaaaaaaaaaaaaaaaaagaaaactaaaaaaaaaagaattgggattatgtaatactctgtcctcaattttcttctaaaaattattaaacactcttttaaggctggtctcagtggttcatgcctataatcttagcactttgagaggccaaggtgagaggattgcttgagctcaggaattcgagaccagcctgggaaacatagtgagaccttgtctttacaaaaaattgaaaaattagctgggcatgggccaaggtaggtggatcacctgaggtcaggagtttgagaccagcctggccagtatggtgaaaccccatctctactaaaaatacaaaatattagctgggtgtgttggcatgtgcctgtaatcccaactactggataggctgaggcaggagaattgcttgaacccgggaggcggaggattctgtgagccaaggtcatgtcactacactccagcctgggcaacaagagcaaaactccgtctcaaaaaaaaaaaaaaaaaattagctgggcatgatggcgtgtacctgtagtcccagctactcaggaggctgaggccagaggatcccacaagactgggaggttgatgctgcagtgagctatgattgcgtcactgcactccagcctgggtgacagagcaaggtcctgtctcaagaaaaaaaaaaaaaaaaaaattaaacactcctttcggtatgttgttttaaaaaactgttgtatgttatcatatggatatatgtaacagctaagagaattacttgagaggagtatttttacatgatttcatacttgattttcccttcttctgagagatagcaaaacttatgtgttgttatttaaagataaacgaggacttgtgttatcaaagaaagagattaggaatgagatcagggagtttggatgtcatacactagttattatgacctagtatgactttgagtaatgtcttctgagctttttttctcatctgtaagactgaaaagtgattataaccattcatttttcaaagagttgttgaaaggaccaaataatatatatgaaaatttgtttcaaactatatgacagtttagccatgcaaatgcaaaactttgtaatatcagagagaaaagatgagtctttccctaatattgattcagtttattttctttataggagctctgtctaaacatcattccaacctttgcaaatcttatagactacccatccatgaaaaacgctttgataccaagaattaaaaatgcttgtctacaaacatcttcccttgcggtaagtaattgcatattaatttttgtttttcttttcacttgtcagtgctttaaatcattttcttattgtttaataacccttttatagattgttg

SEQ ID NO: 10283 - DNA, 2300 bp, Homo sapien
tccagaaaaggcaaatctatagagatagaaagtagattagttgttgcaggatatgggataggagatgaggattaacagtgaaaatgaaggatctagttggggtggaaatattctaaaattgctttctggtgatggttacacaacttggtaaatttataagaatctgaattgtccacttgaaatgggtgaattatttgaaatgcaaaatatgtctcagtaaagtatgtgtggggagaaagagggagggagggagggggagacagagagagagagcaagagagagagagagacaaagagagagagagagagaaaaggttggagccaggctgtttggatctgaaacctggctctgctacttactagctgtatgatctcaggtaagtttaacctctttttgtctgagtttcctgccagtaaaattggggaaaataagaagttatttaccacagagtcttgctgggaagattgtggtgatacttaaagagtgcttaacacagagccaggaccctagaaagaactcaaaagatattagcaatatttagcctaccaaggattcagcacggacttagttgaacttaattcaaattttggataatttggacagtggcttgcagaggatattgactggtcttgtggaaatgactcctggggagcctgagagcctatagcctatgatttgtcagtcgcatgcagactggaggattggaacacaggagcctcaaagatgaagagttttttttccaccgcagcagcatttacagaggcgtcatcctgctgcccataaatgtggccacaacttgcagcgtttcagccccagttcaacaagtatttaggtaacgcccactccctgccaggctctgctagggcagaggacaggtgatttggaggcacagaggagggacatctcaccttgcccatgcagttttctagaggattgatatcttagcatgaccttagaacccctagaagttacccagttgaaggggtgcagagagttacccaggcagagggcatagcttgagtaaagcccagaggcaatagggagcttgctgagttcagtgaaatgaggatgtggaaagcagagtgacaagaagaaagacttagggtcccagggaaaggccttgtgtgccatgataaagaattgtattgtaaatagtgctgcaataaacatacgtgtggatgtgtctttgtagtagaatgattagaatacatggatacagagaggggaacatcacacaccggagctggtcaggggttggggggcaaggagagggagagcattaggacaaatacctaatgcatgtggggcttaaaacctagatgatgggttgataggtgcagcaaaccaccatggcacatgtatacctatgtaacaaacctgcatgttctgcacatgtatcctggaacttaaagtaaaaaaaaaaaagtccatctagagggagaaaaggggaaaaaacaaaaataattttatttatcctgaggacaatgaggagtcagtggagagttctaagcaggttctagatatcttccggctcagaaatcttcaattagatggtcccaaatggcatctacgtatcatactttgagagagcctgctctgttgattaggagcaaataaatgtcctcctggatgtatgtggcctgggttttgcatttgggctactcaaatgcaagttcctcgtgggaccacatccatgctagtggctggctgaaaaacggcttcatgactctcatgaggggaataaaaggcatggagtggtggctgtgagcctgtctgcagggccagacctcagaaaagcaaagggctgtaaatgtttcataaatttctctctgggtgcctgctctggctgagagcccattcataagcccaggcggctgaggggcaggtattgtgccggttactatagcatcaccttggaaagtctcacttggtgagagcggcaggcgagctggggtggggcaggagggggacgcggctggctggaggggctggagctaggccacggatactgctgctggtctcaggactcctggtggtccggagctcatgttagcgtccccagctgcagcccagggagggagagaggctgcgctcagtctgagagtggctgcctgagacagctgccacaggctgctgcagagcgtgcagcttttgcaagggactgaattcccagccagacaccccttggactcttttttggaggggtggggagcagagagaggagggagttgtcttatcttggaagatccgagctgggtttcatctcctttttgattttgagtagttccctccacgagaa

SEQ ID NO: 10284 - DNA, 2300 bp, Homo sapien
aataacagctaacccctacacagcactttctgtgtgtcaggtaccagcgctttgcatagattaattcattaaatccttgcaataacctcatgaaatacatagtaattatatctttattttacagatggggaaactgagacagatgttaaggaaaagcctaaggtctaaggtcacacagcttgtaagtggcagagctgggatttgaacccagccggtccagcgccacagtctgtgtcttcagtcattgtctccatctctgctggagagaatgaaatcacagtacaggctcttatcatccaagaagaaatgggcttggtgtcacatagaagtcacacaggagtccctcaggcagcccagagctgcagagtgcagtaagtgtcagtgcaaactctcttcaaaagaaaatgtacaggcctggggtgaccctcttccttgtgccgaaggggctggaggatgcaccatagtacattgggaacccccagaagtaggtaggaagtaggagcctgtaggacctacaaaaatgctattttataagagaagcaaaatataacatttctaacaggtttgaatgtagatcttctactagctgaccttgtgacgggaaacaaatgacacacatcacagatgggaaatgcacacatcacatacacacacacacacacacacacacacaggtgcatgtgcagccatgctgctttgggaagttgtttctcagctcactcattgattgcgttaacaaagagttacacaatgctttttctgtgagaggcactgtgctaagacaaagggtagatacaaagacaagtctgctaccatgcctggtttttgtaaaagagataaaacaagtagaaaactataatatataaggtcagaggatttaagggacagcaaggaaactacaaataaaagatcaagggagttgggtggggagaataggggcagatgaggaatggggctggcttcagggagaactctgcttctgttccacgcctggaagatgtgtgggtgtgaaaagaaagtaactgaggtagaaggaagagcttgtgcaaaagtgtggaggcgggagagcttggtacaggttggcagaggttgggatgtctgaagggacagaatgtgagaaaatcctagagacattagggctagatcttcaggtgtggaaggggttctaaatgtcaagcattttgtgttcgttttttaggcatagagagtgcattggggattttcgatgaggggagtgcctagcaagttgctgggtacatagtaggctgataatcaatcaatgatggttcaactaatgaaggagagaaataataattgccacaaattattgggtgattgctatctgccacacacttttctaaacattttcactactcatgtaattctcaccacagcccatgagatggtttctccatatccattctacagatgaggaaactgagactcagagaggctaagtgtcttgctcaaggctgtgactaaagagtgggcatctaaccagagcctgtgcttccacactgctgtgcaatttggaaaacagaagaaggggagagaagaaaaaggggttgtgggaccaatgtcatccagaaaggaagctatgataggcccaaagtaggagaagaacaatgtgggttggaaataagagacattccaaagatgcaatcaacccaaatctgttattatttgatatgggtggctgggcagagggaagggtcaaaaaggctcccagcttctagttcagtcccggggaagtgatagagctattcaaagaagttgtagtgagagagagggaagatgacagtttggttttagttgatgtgtacagaaatacgggtgcccaggagcccacaaaacggccagaggagaaatgctttcaaaggcaagctgcagggctccttggttttgtcacattcctcattctggggctttgcggttttgtcttgggaatctcgaggctctcccaaggttcctttctatgtttatatcatttagcagggaaggattgttaatgactaatctgtgtccatgaggcacagagccaaggaagagatgctgctgctagcccagaaggccgcctgtgatcatgcacagtacactggaactctctcctcctcctcacctcattgtctccccgacttatcctaatgcgaaattggattctgagcatttgtagcaaaatcgctgggatctggagaggaagactcagtccagaatcctcccagggccttgaaagtccatctctgacccaaaacaatccaagtaagtacctaattcctttgggagtgggttgtgtatctcac

SEQ ID NO: 10285 - DNA, 2300 bp, Homo sapien
gctttttcacctatgaccctctcagggaaaggatagctctgggattgtgaggaagggagaacgaggtcagaagtaaactgaggactgaaaatggctttgcagatggtgaccccgatcaagcaattcaaactgaaatatacccatagaccaccactcttttcctctttcttggcaattagggcaagtgtaccttagtttttccaccacgggattttgagtcagaagacctgggttaaagtcccagcttcattccttactaatgggatgactatagacaaatcactgaaactcactgagtttaaaaataggcttaaagatagtggaagttagaaataatacctccctccaagggtgcaagtgaagatctgatgagataatgcatatggaaccgctttggaaacttgtgaaggctatagaaatgtcttagcaatgattattccacttgtatagctcacctttgcctttcaaaattgctttcatatttactatctcattttatcttcagaacaggcctaaatagggcatgaattattatctatgttttaccatctattgatgtggacaaatggggcccacagaagctgagagactcatctaaggttacacagtgcatctcgctacattatgcctgggctccaccctggatcaactgagtccccttctaaagccctcatttctaaaaaacaaccaatagacttaagcttgatgtacaaaagttatgctgaaggataaaatatagaattattcctattcaataagcaacccaaggtacaacatgagtccaaagctgagcaatcataacatcaatgtagtgatgatgggtagccacctgttgtgctaagcattttataaatactattttagttaataatcacgtataattctttgaggttgtatagttatcaaccccattttacaaccaaggaaataaaggcagaaaatggttcaggaatttgtccattgtccacagagctaataagtgccaagacagcctggatgtattagtttgctgggtctgctgtaacaaagtaacatagactgggtagcttaaaccacagaaattatcccatagttctggaggctggaagtccaaaatcaaggtgtcagcagggttagctcttcctgaaggctgtgggtggaggatgtgctccagggctctctccttggcccacagatggccatctccgtctcctctctgtgtgttcacatcaacttccctctctgtgtttctgtctctgtaaccaaatttccagtttttataaggatacaagtcatattggatcttcattttaatttgattttctctgtaatgaccctatcaacaattaaggtcacattctgaggtactggggtttaaggcttcaacatatatacatcctcatcttacaatggttcaacctactatgtttagactttacaatggtgtgaaatagacacttttagcatagttttcaataaattgcatgagatattcagttctttattacaaaaaaggctttgtgctagatgattttgtcttacatggtggtaggcatgtcttacatggtggtagggaagacagaatgagagccaagcaaaaggggaaaccccttataaaaccatcagatcttgtgagacttactcactaccacgagaacagtgtgggggaaaccaaccccatgattcaattatctcctacaggatccgtcccacaacacgtggggattatgggagctacaattcaagatgagatttgggttgggacacagccaaaccatatcaagcattatgctttaaattcttccattttaaatcataccattccattttaaatcataccattctgccaccttttgatggggacaaatgtcaggacccggagcatggcacttgacctccaagtccagttttagagccagtgaacagaaacccaccctctaaaagttcttaaactggaaaagtactcccccaaaatgtttatctaagagactggtttccagcttactaggcaatttggcattaagaactttcctcataaacatttacaaatattctgctccgtaatgaagttaatcagtaaaccacacaacctctgtcctctctcactccttacctagtctcattttcagtggctgtgaataagctaagaatggtaatgcagtttcaggggttagaaaatccaattcaaattagtcctcactgcagctgtacgccgtcaggatttttcatggaaatgatgagtatgaagcccgcgaaaggtaggacactgttcacaggtgctttcaggtcgagctcttgcaactggactgaggaaatctggg

SEQ ID NO: 10286 - DNA, 2300 bp, Homo sapien
tcctacacagaccaatttaaacagcttcaggtctaactttatcttctgaacatctccacttgcacactcctctcacacttcaaactgaacacactccaaaccaaaatgcattattttcccccacagcctgttttccttgtattctttagattggtaccatcatcaatcacataataactaagtccagatgagtcagcttcttaggtatcaccagatacctcttcctcaccatcccttctgagataatttaggtaaccgtcatcttttaatttaagggattgccacctgtcttactaccatcttcaaacatctgtgaaaatattgtttttcccctaaaacacaaatctgttcctaccagtccttccttataatcatcccaattgcctgtgggaaagaaactaaattcctcagcatctaccaggcctttcatttgtgtctacttctcccatctgatctgcctcccaatctgcagacttcagtcattcaaaatgagtattctcagaacatttcatgtactctcacatctctggaaccttgtctttgttgctctctctgcctggaaattaattcttattcccagttatccctccctcctggcagagtcttaattcatctttaaaaattcagctcctttcaaacctctgccatcacccttcaagactcttaggggttccttctttcatggacctccacagacttccatttggcctttaccatgctgctgagcactttgaagcctaaggctgttttcatttcagtttctttagcaagcaacagtacatctcattgtttttgttgagtaaaggaaggaataaatgctagagagagatgtcattccagttcagtgcccaccattcacagatggagacctgaggcccagagaggagacatgatttgaggaaggctaaaagactgaatagggccgggtgaggtggctaacgcctgtaatcccagcactttgggaggccgaggtgggaggatcactggagcccaggagttcaagaccagcctgggcaacatggcaaaaacccatttctacaaaaaacacaaaaattagcccggtgtggtggcacaggcctgtaatcctggctactctggaggctgaggtgggaggatctcttgagtccgtgagatcaaggctgcagtgagccgagatcgtgccaccgcactccagcctgggtgacagggcaagaccctgtctcaaaaaaaaaaaaaaaaaaaaaaaaaaaaaaaaaagaagggcctgggctgcaacacaggcctcggggacaaagccagtgatttttttaaaaaattatttatttatttattttattttttgctatgaaacaagccacatttacagatataaccgacttgggattgttacactgatgtctagtctcggctttatttcaaccctgggagctagtaagcatcccttacgttgaagttcattgtttttttgttttgttttgttttgttttcaggctccggtgtttgctgaagagtcaacatcctccttttgtgacttgggactacaggattcctcctcatccctccgcacctgagaagaggggcctctctctgaaagatttctgctgaggacccccattcctgctgggttccaggctgcgtctctggaaaccgtggcgccctcaggtcagccagctcccgagtggatgtggggttgggagcggctcttaacagaccaggataaaactcagggaagcgccttcagctgcaccgcaacattccaggacgctcagaagcaattattacaggcgaggttcattcacctctcaggcctgtgggaacaacaggacgggctgtggctttcgaactggctgtcgctgaaaggccagatcggaggacctgctctgactgaaccacttcgcctttcagtgaacagagggacttggccaccgaagctccgagacgcccggaggcgcagcgctggacgcgctgacaggcgagcgcccacgggtcgcgtgcttcccggcagcccgggggcggggcctcagaccacgcccccgccttatgattggtcccttcgaaacaggcggcggccagcggctactgaccctgaggcccaggcggcggcggcagcggcggcggttggtcaggggcgtgttggccccgcacagattgagccgagttgtcgccccgctgggagaagtgaccctcctgcgcctggtgagtacttccctgtttgtcttctcttttcctggcgaacttttacgcgctgtctcggggcctccgcgcctcagcctgagggctccaggagccccccgctctctgaggccccgaagctgaggttt

SEQ ID NO: 10287 - DNA, 2300 bp, Homo sapien
ttccaaattatgcctaatgatatctgagtattactagctttgttttcttatctctttaattggataaattatatcaaatgaactacaattatgtctcatcaccatattcataattcatttgttaagtgctaactgtgtatctggtactttataggtatcgtctcatttaattttttacagcagccataagaaggaaatggtcatatttcattttacagatcagaacactgaggctcagagaagttaactactccaaagtcatatagccagtattttctggagctgtaattcaaatcagatgtgttcaataccttctactaccccattgctgtctttatggtgagttattttagtacacattaagaaatacatgaaatatgattggtatagatatattatttctattttctttattaggcagttaggaaacatttaactcaaaattttaaagctaagaaactttttttctgagtaaatcagaaaggatgttttcttcaactatttttctaaatgaagcattaaaaaaggatgaaatattttgacatacagaaaggcatacagactagtataataacacctttgttcttaccgcttatcttgaaataaaatcttactggtacagttgaaaggcccttgtgcattcctccccagggtcattttcctctctcttcctcagtagtaaccgcgatctcaacttgatcctatccttgcagcttgtgtatcttggcgataatctggtggctgagggctgaatggatgggtgacacaatggcaattaatgttattctttttcctgaagaaacttaccttatttctttgcttttttttgtttgctactcttcctggttgacttcagatttgtaacagatggagccatgacattttgaattctccccatcataccgtataacgtgagaaaggattgaaaatgtgtaagtttcagatcctgtatttttgggacgaaggatcggttcagtagttggtgtttttaatcccattatggtatgaagtcaaattagaatgaagagccttaatgcaaataatcttgagtacctcatgactttttaaaaatttttaaagatgagtgggttgggctcaaattctggtcaaatttcaggtggatgagcacattctgtgtttccaacattttcctcggattttaaaagttaagtatagtattcctaactttgtatgatctatgcataagagtgtcttgtgaaagattcccaacaggtttagagtggagtttagacttggttacgtgagaggtcttccctcaccctcgcgaaatctaagggaaaagacttcctcaagttggcaaagaattgaaataggcttcttcaaaaagacagaaagacaaaaacaaaaaataaggacaatatgttgctaattaagatgcaaaattaaatgttactggttcagtgtaactgatttatatgaaacaaatagagatttttagggaatgatagaaaagaggaaaataggtaataaaatgaaggagaagcaagaaatgtgattgtgatagtatcgaggactggggctaaaaaggtactcttgggaataaatgcctgagacacaaaaatatcttggaaagatgatagtgaatgactagaaaataccaaagactggctcttagtatctgttatatagtgagtacttattacttaattgatgattgactgataaaatctcatcaatgaaaagcacatgctcatgtatattatagcttttcatgtatgaagatacataataacttctctgcatactattttttaaagaatttgttttttaaagttaatccagatggttatatttttgtcatcttaaaagtagttttttctgttatgcaagaaggatgattttaaaaatgtatgtgaagactcttgctaaagttcaagtgaccaaatattgtgcataaattctttatttctttcataaaactaattttgttgaattttccataaaaagtgcagcgactaaacattcttgtgatagcttctttgtgaatgtgtcactgttcttgatttgcacacgccttataatttaggctttcttttgttttgggctggcagctccaactgttaaagctcttgtctgattatgtggaactccattttaataggagcagcttctttgctgcatttttaaaaaatggtcttggaagcttcttacttccgagaagtggatctttgttgcggacaaaggattatttatgctaaaggaaaatgtattccccactgaattagctcgtgggaagcataacaagctcattaggaatgctcacttgtactttggccttt

SEQ ID NO: 10288 - DNA, 2300 bp, Homo sapien
agtattttccatttcatgcatcattataatgctgtgtattcaaggtatgaacccgtttcatcaacagtattaatctcaattcatttaggagctttaaataatattcccttattaagtatattcttgatatgctgcccatgcttttacagtgtcagaagccgttaatgcagataaaaacaaacattcagttaaagaaccttctcatatattaattcgatttcagaaattatttgtgcatttatatttcctgaatggcttcggttatgacaaacatctaactaggctaattcagagctttgaggctaaagtccagcctcatggattggtttaatctgaagaacattaaaatagtagaacattttctgtcttggcaagaatcatagtgttgaaatttcaagaagaagatttaaatttgtccatgagactgtaaacttcttgaaggcaaggactcatctctgtagccctgatgcataattgatgttcttcaaatgtttgctgatttgagttgaactgaggagaataacaaaacagcatttgagaatcaaagtctcccaggttttccttatataatttacaaggacttccctggcaaactatcctttcttcttcgtttaaaaaatttcactttattatgttcatctttgatgtggaacattttttatggccttctgctgtgactcattttggtgctgagttatctgcttccttggagctcagcccttccttttaagctgtggtattcaggctccccaaagtcagcttgcctacgggtagagatcacagcaaaatgtgcaaatggtattccaacttctaggtaaaaacagacaactaaaattaaaaactctacatcatgtaagtcacctggaaaaaaaaaacagaaaacaaaacccgagggcatttgtatattcctgttaactcttgactgactaaagggagttatcttttctgcagtgataaaaaggtggcccaagacaatctccccatcttacaaaaagttctgaagttttactgtggagtccaattaaactggcatttaacttcagaaactacatccctatataatgtaatcatcacaaccaaatacaaattaattaatatatatggacaaagtttataagttcaatattagaataggggaaaagggaagtaggaaaagtttagagtcctccacgcatccttcatttatcaccaagagatttgctcctttgctccttctgttagtgtaagtcagaatttctcaattttcagtgtgtttatgaattgttattattgtttatcccaaacacatattttgtcttataggtgatttaagagctctaaaagggacatgttaactatcttcagaagctcacctctaacaatatttctatacctatattatacaagaaaactaatgaagattgacagtcaaattcctggagagacctttgacccttctctgtcttaaatttttcacttctgaaatagaaagccgggtcactggtcatcttatcctgcactttgggcataaagaagcttaggtccaaagcgccattactgtactcatgatgaccccttgaaggcacatcagtagggctgtctggactgtgacatgccatcagacatcatttaggggacttcaagtctggcttcttgcagagatgctgtgggatgcctcaaaaacttcctgcatggctagtgtaactatggggctttagatctttgttaaatacaagcaaacattaacagcagcagtggagaggataagttgccaatcctcccaaatttcttttccaggcagggggttgtcctgccgctctcagaactggctgtcatctgctgctctcttgtcacactgacacggccccctggctgggctgattggtcgctggcaataactgatatggaatactgatgttctctccggcagttccttccactctaaagagactccttttcatccctcttctcgcctttcctagcccagcctagtgcccaccctcccccgaccatgcctcccctgcacctggggagggggaggaccagtcctgggcgtgatgctctgagacggtggtgaaatccaccaggctgctttcactccggctcgctctccggagagtcctgttccagacttctcagggtttttacagcacaaacaactgcatacggcccgaggggaggctgaaaaggacttgtgtgtggtggttttattgcctgtcatcactttgctggcctcctcccgactggagcctggaggttcacagtggatttctttctgccgaagacaccaaggcactgaggaaggatcccttctccttctg

SEQ ID NO: 10289 - DNA, 2300 bp, Homo sapien
tctgggacctcacaaagtagccaatgtgcagcaactgttagctgatgttcagtacagcctgttggaaacaatggtaataatttgtcaatagactttggaagacggttccaactctccgtaaatggcaagtctttccaaaacatacttttttttggcttacagtggtacttctcttaattttaaacactaagagggtgcaaaagatgaggtagatttttcagaactttatttattaagaaaaccagaagctgccatctgaaactctgtttagactgccaggaaatgtgtttggaatgctccatttactatgacagaagcaaacattttgacacaaaggtttgctagagccatacgcaggtgtttctgaactctaaagacatactgttccccaaaacatcatgtggcttcatcatgtcattgttagttggcattgcccagaaaagggttttgtgagaactgcatcctccctgctctcagccccagctcatggtatgggctgtgtctgatatggtaagtggcagaagcgtctgtgcaggggagtgggtgggtgggcatgggagtgtctgaggagatgcagctacaaagccccacagagtgactcatgcctttcacaatgactttcctatctcagtaaagccctgtattctatgagaagttccaaattggtaatagcagcagcaatcattgcatcattgcttttctgactttttactctcagtttaacttgattatattatttaacctcagaggcaaaaaggcagaaggtcagatattgctgctcttgtttcacgttaaagatttagatagaggtttagagaaaggtgaaacctccttaagtcacacaatgagttggtggttgatctgagactcacctgagtttctttctcctagccctgtgttctttccattaagaaaggacttcttatcaggtgtggtggctcaggcctgtaaccccagcactttgggaggccaaggtggaagtattgcttgagttcaggagttcgagaccagcctgggcaacatattgagacattgtctctagcaaaaataaataaataaataaataagaaagggcttctccacttaatatgaataattagcttgcctccagaaagtaccgtttctctttgtgaaactatcattgccacaaactaacctcagaaaaacatgcacttctctggccctttgtctcctcacttcttcaatgaggaggttgaattaaatttgaattacaagaattctgaagtgacttccagcttttacattctagaattttcttgtcgataacattgtgacaaggttacaactatggctgtttaccaactatcctatcttgaaagaagtgggaagagaggccaggcacagtggctcacacctgtaatcccagcacattgggaggccgagggggacagatcgcttgagtctaggaattcgagactagcctgggcaatatggcaaaaccccatctctacaaaaaatacaaaagttagccgtgcatggtggcacatgcctatggtcccagctacttgggaggctgaggtgggaggattgcttgagcctgggagtcggaggttgcagtgagctgagattgcgccactgcactccagcctgggcaacagagtgaaacccagtctcaaaaaataaacaaataaataaataaaaagaagtagggaagagaactaataagccttgggcatggcccctgggccagacactttattcattcaaaccacataagaaaccaaatgggacaaatattagttccactatggattaggaaaccaaagctcagagcatttagggaacttgcccaggatcttctagctgaaaagtagcagaattgaatttgaactcagttcaaaccttcctgattatagcaagcacgtgcattttactagatatcagcagtagcaagacaatgtccagaataactcatcaaactgcctgccctttaatagagaggattcatttctttctcataccactcctatcacaacacctgctgtaagacacttacattaccatcagcatttccttgtgacttttgtgagtactacctcactggcagtggtgtttttatcccagggaagttatagaagtaaaaactccattcgaacccatggagcagaaaaccaccgacatctactctatgagtgctgggcctcctggggcgtgtggtataaataccaacctttggatcttgtaaggtgagtttttaatcagctgcaaatataaagcttgcacagaatgattagggcagactgtcagctgggacaagctcccaatgaagcaaaaagagc

SEQ ID NO: 10290 - DNA, 2300 bp, Homo sapien
ttgtgcttattttaaactcctggtctgctgccacactgtgtctatgggaatcttctttggaggggaggggttgttgtcttccccatatatttcattattttggcctgttgggtacttgtcctctggaggcgtcagccactttgagtaagggtcagaggccaaggccaagtttgtcagtcctagtgagttacagagaggacagcgtgccccaggcacgactgagtgctactgctctatcagaggacttttctggtcagtttcatttttaaacctgcttagaacaaagcagaattgggcactttcccttgattgtaatctgccaatgctggggtttaagaggaggtggactatggagtgaatgccccagggcagctatccaggtagcacctgcttttcacccatgtctaacagagcaggactttgagcattccctgatattgctccaggaataccagcacctgtggtgtggcctgcttagctgatttctgagggaggggaaactaattgtccaatggccatttgagggagagaggctagagtagagcttatgtatttctctaacctgtgctctcactctacctggtatctacaacctacctctccccacacaccaccaccatcacacacataccagttcaagataacctcccatctcccctgaggtttctcagggtctttgttttttgtttttgtgttttgttagttcctggaatctactaccttgcttctccaggactgattttggcagaaggtgtcatcagcttaagctaactgactatctcattgggaaccggagcccctataaccttacccctcctcattcatatattgtcaaattgataactgcagcagaaagctgtctgtctccaaatgtttgtgtatcagccccagggcagtattctgattggttctattttgagccatgtgtcccttgggaccagcaggagttacctggagaaaggagaatggaagacagatgatctgggtagccaaaacaatgataactgcagtccattccagaatggacactgatggtgcaagctacactttctagcaactctcagtaaatactctgatagaggctgggcgcggtggctcacgcctgtaatcccagcactttaggaggccgaggcaggcggatcacctgaggtcaggagtttgagaccagcctggccaacatggtgaaaccccatctctacaaaaatacaaaaattagctgggcatgatggcgggtgcctgtaatcgcagctacttgggaggctgagacaggaaaatcacttgaacccaggaggtggaggttgcagtgagccgagattgcgccattgcactccagcctgggtgacagagtcagaatccatctcaaaaacaaacaaacaaacaaacaacaacaaactctgatagatagcacagtccagtcaaataccgctagaaccttcaaggttggtttgatactgagtgcccaatatacagcttaacattccctctggcatatgaaatagattagcttcagacatttgtctcacagtaggtatttgagtgctgcccatctctcctctattcaaagaaagagaaacttctggaataatctgaaatacttcacgttctgatataacatgaaaaacctctttatatttggtgcattctcgaaggaacaataaagtatactttataggtagctataaagtacccccaaaaaaggttattctttatgaacctatcagtcatcatttcaatttgtcatggacattggtattatttatactagaggcaggaatgagcttggcagttttgcagtaaaaatggatatttttgctttcttctgtggtgtttgcaatagaatatattattctagcaataaagtattgctagttgtctttgtgttatgtgcagtaggtaaatatagtgattacccaaggctttaataagggtagagttggatttagttaatggttctgctcttttttataaggctgaaatccagagggcagcccagaaaatgtttgctcaaaactgcataaacaaaatagccatgttttcaaagtgaataaatgaggcattaaaaacagtgcttgggaagttgaaaacctttaaagcagcactaacaataccttcctggtcctaaatataactatatccatacacatatgtacgtgtataagagttttgttgtgcacaaaaggggattcttagtagcactattggggatgctgataaatgttcaactagatgataaccacataaagagaacaaattgtatcctctatatatgaactaccttgcaattagaggaagccttttct

SEQ ID NO: 10291 - DNA, 2300 bp, Homo sapien
ttctagaaataccctggcaaaggtttgggaatgcaagtataaagaaaaaaatcacatctattagtattctgtcataaagcaagtaatttatgaggaaacaaaaatctagctgttctcagatagctctccagtaagaaatgccagaagacaacagaaaaaatacttaaaattttttgaagaaaaagactatgacctaagaattttctcagctgaattttttttctcatatgtgaagacaacaaatgaacaatcccatatattcaaaggctcaggaaatagagcattcatgtattcttcatgaaaatattatttggagacatacatcagacacccgaaagatgtgaaagaagaatagggtatggattacacatagttcatggcattatgtaaatgttataaagcaagatgacatagcttgggaaaacaaaagctgtgtctaatagcagtacttccaagccataacttacagtagcccaattctcaataaattggaaggcagctaaacaatcatacagtgctagtattttatagtgtcagggtctattcacatataatctcatttaacccattttaattccgtgagataaaaaccaatatccccatctaagatatgggaaactaagacgtagaagaaagcacttggctaagatatcatggctcgtaggtggcagtcaagaggtgagtttgcagtctacagatttaacctcagactattctgcttctaacatgactatagaaatgtattgatcattagctgcctgaagttctgttcttaactctaggtgtccaaaagaagatgaattttgtttagatagcattttcccatatctagggctgttggctttaaagaagttcccagaagtgaatccaattcccagaaggatcaaggtggattcttttgtgtgttactctaacaggttgctttatatatatatataagttatataatatacacatataatttatgtattatatataagtatgtataacatcatatgtaatatataaatatagtacatttcacactggtaggacgtaattccaaaccacatatttgtttaaccaattgaattacttggatttagtttctatttccctctttatttccttctgaaaatattatacaaataacatcagtttacaaaaaataaaatctgatatagcttttttatcatacactaggctagactaaatgcattctgtggattgtttacctaggaccagatggtatattataaagttgtatacaaatgaacaaggactgcctgaaatggattgatagctgagcacatttggctggagcgtctattttagaaggaaaacctgagaatcatattatttgagtgtgattcatgtgttaatagtatttcaagacaagccacttaaaatatgtcctgagtggtgatgctggaaatgatcttttcttcagtgttttcaagtgtcttcatttaagtgtacacattttgcctacctataacacgtatctacacattgtgattaagagagcaaactctgaaatcagacctagattaaagatcttaatctctgccagttgattgggcaagtgacttaatcattcgacagtaatttctgcatttgaaaatgcctatctcaagggtaatgagaattacactggttcaccaaaagaattacactgactaatataaaacgtgccaagcatgtatgtgtcacatgaaggctcattaaaaagcggatattattgttaatcttccaataactactatttccaacaacaggctgaaggggctcagaaacgtttgttgagtaaaaacacaaggaaacagtagcacagatttcctgctctcctttacgatcgatgacctgtctaaggactgtgatctctgttcactacagattgtcacctgcattaatctactgtcacccattaacctatcaaataaggcagtctaaaaactccaggcgtccctttccgtaaggacccggactgttgaactggaaagctaaaattcaaggcgtgacaattgccctttgtcccacattcctccaccggtcgcctgcttatttaaatggtgcgtcccctcgggtaccacttgaacaaaacctgcccagagcgctccctgtgtagattcgctggaagcagctggaggctccagttctcatctgctcaggtgtccccggcgccttggcgaactcggccactccagttcctcacgtggtgagcactcagggcagcgggtcgattttccgaggtcccatacctgggtttgaggggcgcggctcgcagcggcgggtgcaggggcgactgccagccctcaccc

SEQ ID NO: 10292 - DNA, 2300 bp, Homo sapien
caaaaataaattgcagagaaggaaaatggcacaatgatgtgggggtgattttggcaacaggttgggaaaatattgctttgagtgggggcttctaccctcagttaactgcaggcttctaactctctgaaacgtgcacattttagtgtggatgagcttctttgcatctttctgggagaagttctacagctttcttagatttccctgtgacccataaaaggcttttaaaaaaaaaagaccaattattagcctactgaaagccaatggaacattaggcacgtcaatattttattataaaaaaatctataaatgctatggaggcattaaaatatttagaacaaccctgtggtgacacagaaaatgttgatgtgataatgccaataacaatttgaaagtgttatgttcactttctcaactctgattacctcctcaatccatgcatatttcacttcctttcttccaactagactgtacttagcaaggtcaccagtgaccttcaccttgtcagatccagcaaccacttctctatcctcgaatttgcagtatagttggccaccagctctgcttccatgccataactagtctgtttctaccttactggctctctttcccagtcgcaaatgcctcacacttgaggtatttaggtgtatttaagtcacgtctgcagcccagactgctacagtgagctctgtacaacaatatatccaattgtctacttaacatcactccttgactaaaatgtaagcatctcagaccaagtatttccagtctgggcatggtggctcacccctgtaatcccagcactttgggaggccaagccaagaggactgcttgagtccagaagtttgataccagcctgggcaatatagcaagatcccatctctacaaataataataataataataataataataataataataataaaagagctgggtgtggtggtgcatgcctgtagccctagctacttgggaggctgaggtgggaggctcactttagcccaggaattgaaggctgtgaatattttcaaataattaattaatactattattgcctttctcgtttggctcccagaacagtacctggtccacagaggactctcaagaaatagttgctgaatgaatgaatgaatgtaaaatggggtaaataattatatttttaaattattttttaaaattgtacatatatgtatatataactgtacaatttaacaacatgctatgtgtagacattaaagtgatgggaaaaacaccaaacattaacagcggttgtgcatgaaattaaaagatttttcttaaaactccttctctatttttcaattttatttacagcgtagtggttaagaataccaaaatttagagtctgagtgaagactgccagttaccagctgcacaaccttggtttcctcttgtgtcaaattggcttaaaaatatacacagtaccggccaggcgcggtggctcacacctgtaatcccagcactttggaaaaccgaggcgggcggattgcctgagctcaggagttcgcgaccagcctgggcaacaaggtgaaaccccgtctctactaaaatacaaaagaattagccgggcgtggcggcgggtgcctgtagtcccagctactttggacgctgaggcaggagaactgcttgaacccgggaggcggagattgtagtgagccgagatcgcgccactgccctccagcctgggagacagagtgagactccgtctcaaaaaaaaaaaaaaaaaagtatatatctatatatagatatatagatagacgcagtacctcctttgtattaacatccctaataagctttactgtgaaattatggatgaaaggatctttgcacgatgcaggtacgtagtgagggacagtaatgttagttgataacgattacaggtatgttttattttataatgaaaatacatttgtcttctaaacctttaccgaagggagtgaaaagaacacctcacccaaacgcccgcccttatgtgcgcagccccgcctcctgtaggccccaccccaccaaagggtgcgcctgcgccgttcttttttccgtccacgtgacccactcaggctcctccttgtctccaacatggcggcgcccaggggctcaagccgcacgtgagaaagtctgggcatctgggaatcggagagtatagcctgtgagccgctttcccctccttactgtcggttgcatcccttcgacactcccgaggccgtcgcgggccactggccctctgcagccatgaagacaaagcccgtttcccacaagaccgagaacacctaccgggtgagcgcggg

SEQ ID NO: 10293 - DNA, 2300 bp, Homo sapien
gtccaacttgcatttctttgatttggacataccagggccttttttcagtgactgcttatgttggcatatcttgctgagtgcatataattgccatttgtcctttttcttccaaagatttttaaccatgagttgtttggtgctgttgctgaagagaaggaagtaaagcagatcctctccaaagtcatggaagcacgaagaagcaaaagttacgactcttatgaaatcctcggcaagtttgtaggaaaagatcaggttacaaaactcatccttccattaaaagaggtaaggacgtaaatgcaattctggagatcacagcattacaatctcatgagttcctaaaaggaaccatgcggggcaaactgaaacactgttcttgatcacccatgatttcctttggtgatagggccccaggaccatatggccagtgagtgaatgctttgattcaaaaatcatagtcccctatgtaaaccatgagatgagaaagaaaggcaacaagaattgagtgcaggtgaatattatagctgggtcaagtcagcagctaagaacatgaagaaatccagaggcacacaagccgcatagtgcttatctttgaggttgaggttgtgagtaacatttccttatatgttatgtccatgtttgaaattttattaagaatttgttttaggccaagcatggtggctcacacctgtaattccagcaatttggaaagccaaggcgggaggaattgcttgagcccaggagtttgagaccagcctgggtaacatagcaagaccctgtctctatttaaaaatgtatatttacatttacaaagaaattcattttagttaggagtaaatatatattagaaagcctttggacaaattgccacttccaggttgccaagaggaagaaaactggcatttattgacatattatattctaagcactgctacattatctctcctaatctgcacaccctgtgagattgatggtacttccattttacaaataagaaaattcaggcttggaaaggtagaaaggaacatggttaaagagaaaagtcagggtatagggtttagttccagatctttctgatccaagttcacattcctaccatggtttcattctgcctcctgaagatcagggaatgtaatttacccaccttcctattgatttctgtgcctgttgcagaggtgaacatccagtaaatgttattaatttattagttttgtgtattaaaactagagcaaagagcactatctattgacatgaattacattaggtctaaatgttctggtgctagatgaactccataattactcctagaatgcatttagttttatgtgagccttatctaagaatgttagatgcattttcaggatgaaaaagagtcaacagagcacatatatccgtgatgtatattaaaaagtccctccaaggtattgagagttaataccatgtctcatgcaagataatagctctgaagcaccaagtatttcctgaggttgctgatcctggttcccattaggttcctctgatttggcccaataattgatatcagaccctgaggcttggccatagtagcacttcattctcgtggttttctatgaggagtgaatacattttgttgattgtgtgtgtgtgtgtgtgtgtgtgtgtgtgtgtgtgtgtttgcctctaagtcacccctgttaatgtaccaggagagttgatgttaacttagaagtctcatatctctggcattgtgccctgaggcctcaccagcagagaacagggagggagtggaggaaaccccgaggctcacaagcctgcacagtggttcttcctgggattgagattatagttaactttcaccttatatgttatatctgtgtttgaaattatattaagaatgctttttaattaggagaaagccaaacgtatattagaaagctaatatataaaagaaaactgccattatgacaaatcaaaatgcatttctgtgtcatctcagcatgacatttatgttttgcctttagatcttacaaaataccacgagtttgaaactggcccggaaagttcatgaaactttacgccgaatcacagtgggattaattgtaaatcaggaaatgacagctgaatccattctattactcagttatggtttgatcagtgaaaatcttcccctgttaacagagaaagaaaagtaagttggaaaaaaaacaaactgtcatttaggtctctgcgtctgataagccattctgtgggttgttttaataatttgctttagtaaaaaataaaattatatccacctgagttctcagatggtactttatggtgtg

SEQ ID NO: 10294 - DNA, 2300 bp, Homo sapien
ccactatggaaggcagtatggaggctcctcaaaaaattaaaaatagaactacagtataaaccatatagtatataccatatatatcatatatgcatatgtaccatatatacaatatatacgtatataccatatattctgggtatatatccaaagaaaatgaaatcagtatgtcaaagagatatctgcatcaccatgctcattgcagcattattcataatagccaaagtatggaatcacctaagagtgaactgatggataaagaaaacgtgaaatgtaaaaatgtggtatatgtatgtatatttatatatataatgaatactatgcagcctttaaaaagaagaaaatcctgtcatttgtgacaacatgggtgaatttatgctaagggaaataagctaggcacagaaacacaaatacttcatgatcccacttatatgtagagtcaaaaaaagtggaactcatagaatgagagcagaataatggcgggatcttggctcactgcaacctctgcctcccaggctcaagtgatcctcccatctcagcctctcaagtagctgggactacaagtgccactgtgcctggctaatttttttatttttttgtagagatggggtctcactatgttgcctaggctggactccaactcctgggctcaagggatctgcccgcctcggcctcccaaagagctgggattacaggcctgagccacgacacctggccgaccttaaatattcttagcacaaaataaacatatacacacaagcacacacgactatgtgaggtgatgggtatgttatcatttcacaacatatacaactatgaaaacatcacatggtacactgtaaatatatacaatttttatttaaagctagaaaaattcttttaaaataaactaaaaaggcagtccataagcttctgttgaatggatgaaaatctctaccataaataaaaacataatatgcaaaggtattaataagatttggaagaaaacctaagagagtattaacagtagtgactactggggatcaccgagatacagggtattagggatggaaggtttacttttctctttttttttttgagacggagtgtcgctctgtcgcccaggctggagtgcagtggcacgatctcgactcactgcaacttctgcctcctgagttcaagtgattctcctgcctcagcctcctgagtagctgggactacaggcgcccgccaccacgcctggtgaattttctgtatttttagtagagacggggtttcaccgtgttagccacgatggtctcgatctcctgacctcgtgatccgcccgcctcggcctcccaaagtgctgggattacaggcgtgagccaccgcgcccggccggaaggttcacttttcaatggatctttgggaagtttcaaaacatacatgctcaacctttaaaaatttctctaggggaaatcccttctccacatcctataggtgtgcttccttcttcctctccacacacttcactatcaaaacctacattacttccaacagtcgaccctcgagggaataagtccctggtccccacgatcgggaccagccagtccacactgccgacccctgaaaggcggtctcagctgctcggtcagcgagaaaaaaagccggcgaggtcctcgtcctgcaggccacagcgaagacaaaaacctctggttactggcctcaggtgcaaggctgctccgcattggcagcgcggtaccattcctattattattacgtagtcttgtttctttctgggagaaagcacctagggagagttgggctggccccgcagggcgctccgggacacgcgtcctctgcaacgccgcagcctgcgccagcgttcgaccgggacgactcatcgaggcccgactcgcattttcagttgtcagattcgccactttttggtgtcagaatttaaaacaaaaattccaatttctctatttcagaagctctttctgtccagaaaaacacaagcaggagagacttcaggtttttgaattattcgtctcttctggcctccacggtatctacatccagtgagcggggaccgtgagtcgaaagcgacgacgcggatgctcaggccaccgttcccggcgcgcagtcgcagctgaccctcgctcccgcccccgcctggagtccgacgtggaagttgctggctgactgggcttgcgaggaaaccgcctcggagctgcagccgaaggccaaggaatcactgaagatcggcgagggaggacagggggttcatcatgggtgaggggttcgagaagggcacctgggcgcgctcgagggagccgcgg

SEQ ID NO: 10295 - DNA, 2300 bp, Homo sapien
gtgcacatgaagtggaattaacccaaatttggatctggcccagcccacctcactagaagttgaaccttagggaaaatcacaaaacatctttgaacttcagtttagattcctcatctgtgacatgggggtacacagataacgactgccatacatgacttgtgattattttagggcttgatgtgtatgttgatctggatcctgcctctttcttctccaactttgcctcttagcccccaggtgcattttcctgcagcctcctctcctcctcccgctttttttctgtgtcttgaatgccaaactcatttccatcccaggctctttgcacctgctgcttcctctgccaggaggtgctcctccaaatatttgcatctctgctttttgttttgctcactccttcatttttctgaggcagggtggggaggcactccatttttcttgggggtttcactgtgctgtccaggctggtctcaaactcctggcctcaagccatcctcctgtgtagctgcttagcggggatataggcaccagacaccctgcccgcctgctcactcttaagtcttcttcttgggtttcagctcacaccgctttcctcctcagagatttttcctggctattcgcacactgtcttcataatctttctcttttgtattgttgtttttgacacttcttatctaatactttaccaatgtgtttattttttaaaaatcatttcttctcataaggatttgttcagggctgtagctcctggacatggggcagtgcccagaagagtgaagagctcagtaatatgttgaacgaatgaaccaaataaggtggcttgaaaagggtgtagactagtacagattaaaaacaaatcaacattagtgattaccgttttatacctgttattataagatctgcatatcagaagaaggactgtgtgttaacatttgcataacaaattggctcaaaaaagtaattggtccaaaacaatagtcccctatcaaaggtgaggttaggctccaacaatgcaaaactgaagttactggcagctttgaaatcacagaccctcttcactctccccacccacaaggtttacaaaaaattcttaggcggttttccccctggccaaaatgtgacagctattaaaatggcaggtttcaggttagccaagtgagaggcagacatgtgtttcaggggacaggaaggttatttccaccgtgtacaagtggatgctgctttggacactgatggacaggtaacataaaatgggcgaatctgcagggggatgaactgggaggaaagtattttaggtggagggagcgtctcataatttccaacagagccaccccaaataaaccttgaagccaagtaagagaacgggacctgcattaggaatgcagcagcctcaggtatgtccaaccacatggccccccataaggttttcctaaccattttggagccgctactgaatttaggtgtggaggaaagcaagagcatggattctattatccccactcaactgagtggcaagatataaggctaaggctcaagagccttgaatgtcaggacaagggccctaagcctttaagctctctaaggcgatcagtgaatggcagtgtaagtaaagtagtttaggaggaaagaccgatttggagagtccagagtgaaggctgttgacagtccaggcaagaaagagagtatagagtccagaattgggagagaagtaatatgaattaaaaaaagaagggtgggcctgagttgcctgggttagaagtttccggtggggctatgcaatctgaagagctgcaacctaagttgggcgggggattcatggggcttgttctaatgcttttttgctttttggctgatgggatgcaaactactatgtgcctcttcaaaataatagcccctggtgtctactaatcatatcatgaaatagaaattgtgaaggcactgtatcttttaaaaaaaatccccttttgaagaacttccttaaaaacagctatttaatgcaactctgccagtatgttcttgatggttatgtcttaacaattctaatttttaaaaaaaatattactattttttttcatcagagccattgcactggaaaataattttttattttcatgatagcctaccgttgaatttaccgttctgatattaatgaaacatctctataaagggttgaagtgtcttcccggtaagttctcagcttatgtttttctaaatatcttctaatcactgttcattttttcctttggcctaatgagtgtttctcactgtctgcgtgttcagatgcaagaaatattaagcaatca

SEQ ID NO: 10296 - DNA, 2300 bp, Homo sapien
tgtggaggaaagcaagagcatggattctattatccccactcaactgagtggcaagatataaggctaaggctcaagagccttgaatgtcaggacaagggccctaagcctttaagctctctaaggcgatcagtgaatggcagtgtaagtaaagtagtttaggaggaaagaccgatttggagagtccagagtgaaggctgttgacagtccaggcaagaaagagagtatagagtccagaattgggagagaagtaatatgaattaaaaaaagaagggtgggcctgagttgcctgggttagaagtttccggtggggctatgcaatctgaagagctgcaacctaagttgggcgggggattcatggggcttgttctaatgcttttttgctttttggctgatgggatgcaaactactatgtgcctcttcaaaataatagcccctggtgtctactaatcatatcatgaaatagaaattgtgaaggcactgtatcttttaaaaaaaatccccttttgaagaacttccttaaaaacagctatttaatgcaactctgccagtatgttcttgatggttatgtcttaacaattctaatttttaaaaaaaatattactattttttttcatcagagccattgcactggaaaataattttttattttcatgatagcctaccgttgaatttaccgttctgatattaatgaaacatctctataaagggttgaagtgtcttcccggtaagttctcagcttatgtttttctaaatatcttctaatcactgttcattttttcctttggcctaatgagtgtttctcactgtctgcgtgttcagatgcaagaaatattaagcaatcatagtaatcaataatgttttcaagctttttcttccttttagatttgctacttgtaatagctgcgatagtcttgtggagcattttagtcaaagagaacatgttcatttttaaatatttaattcaaaatacaacattcagtgcttctgcacttttgagtcaaagcagttaattgaaaatcactgacatggcttttaaaaaatatgtgctactgataatattcactaaagaccatgagccgaagagtgatttctggattttcttctattttcttttaactgacatgatgtaatgatttcaaagagccaagcagaattttgatatttaatatgttatgttgatatatgatggatatatataatattggcattagattacatcatctcattttattattcaaagttaaacactaaagagtaaacacattgtgtttgcgggtaaatactaagaagataaatacttgcataaaaagaactgctgggtttacttaatggaatgataagcaattttggacccaccacagttctttttattatgtgggttggtttttgtttgtttgttccctgtgttggtctatagaacgtagagttaaaagcatttaattgtgggtcggtgtgataattgtttctctaaagcaaaatcagaattacttagagataagaaagtaaataacaaaattatagacgagttttcttagcctaggattcaagcaagtccaaggatagtcttcacaggctaaattttatttgcaatataagtccaattttcatgggaggaaaaggatggcttttgccagattctcagaaggcaatataacaccaaagaaaggttttttaaaaaagccctatttttataaagctatgctaaggtaaaaaggattttgattttcagaattttagaatatttaaaataattttgaaatacttatatatacttttgagttatttccactttctcttatcaatcaagcagctcagataattaaatatatagctattttaatatttaaagcattttgtaatcatggaaaagcaaaaagaaatgtttgtagaaaatttcgtagaaaaaaatttgtactcatcaaagagaattcaggaggtactcttggtttatgtaaggtattttcagaaaatatttttgagcaagatcttattcagaatcaaattagagactgcatttaattttgctttttaaatattaaactttttcaggattgtcaacttattttattttattttcttcaagcaacaattgctaaggaacagaattgtcaatttattaatgaaatatggtaagctgacattttaatattttctttactctgtccacagaggagctctacagcataataattaaaaaacttttttctttactctccctccattttaaaaataaaatatatcgatcatgttaataaggatatgaaatagtttgcaaagcaattcaattttaggtcttggag

SEQ ID NO: 10297 - DNA, 2300 bp, Homo sapien
gatccagaaatagaacccaagggaccaacttcagattctaggttctttcatatgtttcatctattaattgatatccccagagcggactcagcaaaggaacgttttttttttttaaagtacaaaaatgtgttcagtagtataatgtggttaaggaggggctgtctttataaaagatgttcattaccatcttgactggcttcctccccctccccgccacataactaaagcatgatgctattgagttctaagtctagtttccacccttatatgaaaagtcagcttggcacagagtttggtagagctaagtctgaccagctgcactctcagccacaagggaaattagacgagacagtgtggctgcttcagtaccaatcaatcaaagtttttgaaaattatcttgaaaacacacaccaataaaggcatgtgtgtagttgtcttttcatataaactcaggttagtcctagtgcatgtgaacaaagaaagtaaggtgtcttcttcaggttgactacttggtagttcctatttctctatcagttccatgagcgttttgggagaaagtgaccacatctactacagtctttcaacatcttaagttagatttgtgtaccctccaattgaatcacttgaatcaaaacaatagctactagtctatttgactttctttgcccaggccccatatatatctttttattttatttttattttttgtagagacagggtcttggtttgttacccaggctggtctccaactcctggcttcaagtgatcttcccaccttggcctcccaaaatgctgggattataggccccagcactgcacccagcctccatatatatttttaagtgtataatccagtggtttttaatatattcacaaagttgtacaaccatcaccactatctaatgccagaacattttcatcatgaccaaaagaaaccccatatgcactggcagtcactcccaattccacctcccttaggccactggcaaacactgatatactttctcaccatatggatttgcctgtcctagatatttcatataagtggaattgtacaatgtgtgttctattattttttattattattattattaatttgagatggagtttcgctcttgttgcataggctggagtgcaatggtacaatctcggctcaccacaacctccgcctcctgggttcaagtgattctcctgtctcagcctcccgagtagctgggattacaggcatgcaccaccatgcccagctaattttgtatttttagtagagacggggtttctttatgttgttcaggctggtctcgaactcctgacctcaggagatccacccccctcagcctcccaaagtgctgggattgcaggcatgagcccagcagtgatctattattttatagtctacgtttgtatgtctgactgacttctttcacttagtgtaatgttctcaagcttcatccacgttgtagcatgtgtcattgcctcattcttttatatgtcctataattttgaaaaatgatgtttttggaaaaaaatgcaaacgcagagtatcccctaatagaaatctttgctattcttagagaagaacatgagacaagttatttaacctagagatttggcttgaaaaattaatattgacatatcaatgaggaataagaaaaaatataaatgcaataattaaggactgatgaaaatgaaaagctaattggagcataaaagtgatcatctgaatacaaagacttttctgcctaatcttagtgaaaattaaggtataggttggattggcatattatgatttttaatttgtttttttaatcatccagcaaactttttgcactcctgagtcagcacatgcatctgtcagagagagaagagcaagacggagcacgaggctgcagctgaatttagaaagttagaggtgttctcatcagccacatgagatgggcaggagattccttccagtaggcgagagagcagagtgcagacaacagatgtgagaaaggtccccatagctgtcaagttcctgcatccttgtgctgaagaaagggaggtgccatcatgattgatgttcagaggcagtataaaagcactgggtttctccccaactgcttgtcacaccgacctgcaccatctctcgcctgcctgtggggtttctgtcaactagtcgtggagggaaggagactctttaaagaataacatcttattgtggccatgccagaacccactaagaaagagggtaagacttatctagaaatctttttgttgtactcctgaataaagtgtttattttggtatttatcttcaaacaa

SEQ ID NO: 10298 - DNA, 2300 bp, Homo sapien
tatgtagcagtaacttatctcaggagttggggatataaaactgtaatcagtttaatttaggaggggaagagaaacaaggccataaatttttaaaatcactgatagaaataatagaaaaagaaaaaatgacagaagaaaatatgggccagaattacctgaaaaccaaaagaatgtgaaacttaccaaaatcctgttgtgtttcttggtttcttatttgccataactagaaagggatgacatttgaaaatggctctggacttgggttccattctagatgctggtaggtaaacaatctcccaggaaacttgttcaaattccacaaacagtggcccaagacttcacctccaggaaaactctttggacaccaaactttaacacagatcctcgaagtgaaggaaggaggttacgaagcacatttgggaaatcaggaatgtgaacgcaaatgcacctcccctggaggaaactcactatggagatgaaacttcctatgaagagaaaactgctgaaaaagaaatcccaggtgcctggattggggcacctgtggaaatgctcacctctgttctggagggaggaagaggagagggacaatgaagtatcctgatacccctcaatccctcttgcacctactccacacacagagtcctataattggtttctccaggatttaaaaagccactaaccaaaagcagtggaaacgtcagaaatttcccagggttaacccagtaagggaaggggatagtgtcactaatgcaacaagtaaattcttgagcacttcagtttattcctcttccatcctcctgcccccatttaaaaaagtcatgagcactccattctgtttttttgtattgtccagccagcagaatatcccagtcttatgtgtgatgtggcctttgagcataaaccttttgtgtatgtatgaatcgagcaaattctttactcttttctttctgataggtttaaaaagtaagaagatacagcaaaatgatagatggctgtcattttgatgttacccaccttagataaaatacaatgaagtgtattttacaaaattttgcgtgtggtctgtgtagatacatatgtatatccgtatatacatatgtatatgtacacagtcattattatgtatatattttgccgagtaacgttctggaattagctttctatgggagttctctcacaacgtgtatctctttcttcttgcagtcttttcttattttctttatgtggctgccgactcttcattctcttttaatggctgttgtcctccagactaattttctatagtgtttaatgcttttagagacatcaggttttattctgtaagagaattctttgttttgtaagatcgtgtgttgttttggactctgcctttctctcgtttttgttttgttattatttttttaatgcctgcagcattttactcttctttgttttctttctgcactctagttttttctttcctttcttaaaaattctcctcacatgttaaataacttacatgttccttcctcatcccctgggacaccatcttctttgtctgtgtttccccaattaaagtggttccaatgtgaagagatgggctatttttgttccccctctggtcttgtttcgtcctgttttctcttgaaattgtctcttttactagttcttcactcttttgtacatgttttctgagtctcttattttcactttctcatccactgtctcttgactatgaaaataccaacacagaagctcccaagcagaccatttgtttaaagatgtatctctttttcaaagacataaggaatttttattctccacatgccttactagctgccaggatattctagttgcctgtcccttctccttgatactcctgttagggttagaacaagagagaggcaaaagttccaagggacagccagtccagtccccaatgcctccactcctctcctgatactgagaaagtcatcatcccaaaccagtgggtatgcccaagaccaccctgtgagccacccatgcggaaccctgagcaggctcaatttgttttcttgacagagttcattgtcatgggaaccagaactgcctcctgagctgctggggcagcctccaattctattcagaacttggaccctggtaaaacagggctggccttatcccaagggcctgcactcccagtcttgaatgagggagccccactgtgggagcaccgtgttccctggggacccaagagaatcctcccctgctggggtggcagagacaggcacaaggatagactgtctcactgtgcgctgctcccccgcagattccaggacctg

SEQ ID NO: 10299 - DNA, 2300 bp, Homo sapien
actgtatggagaagtgttgtttgggagttttggagaggcaccccagtttgctcaccagccagtgatatctactttttgtttttcctgtcctcttactccttcctgctgcttgaaacacaaataagatgactggagcttcaccagccattctgaatcatgagatggccttatagatacaagtcagagaggatattggagcagagagacagaaaagcctgagttcctgatgaccatggaaacatcgtaccagtcttggagtgccaattctgtacttcttttatgtgagagagaaataaattcctgttgtctaagctattcagtctgtggtattttgttatgacaatccaagctgactaatacacctgcttctttttttttttcagtcaacatatgcttgtgcaattcactcatgttcataagtgcaccctggaacattaccatgttccagggcttctcctatagaaacagaacatagcccagttgattattttttattctgattgatttttaggagttctttacataatctgggttctactcattgtgggttttgagggaaataccttttcccagtttatggcttgtcttttcattctcttgatgacgtcttttgatgtacattaaaaattatctttaatacagtgaaatcggctaatctagaaaaggattttttccttggactgttcatggcatcggtaaattaaaaagtagttactgtcaagttcactgcacataaaccagcattgttaaaagtggatctccatcattccatttcctttcctgcatttgtcagcatcgtttttcacactaaagatgaggagatccatattcctaagacatatacgcttggtctgtagagaccctcattgctctaaggcagtggttgccagttttttccttaaagggcctagtaggacatagtccaggctttgccagccatacggtctgtcacaactgaattctgctgcccttgtagcatgaaggcagccaaacaataggtaaggaataaacatggctttattcgtggcactgaactttgaatttcatataatttcacaacacaaaattgtattcttttgattttttccaatcatttaaaaatgtcaaaaccatacttagctggagggctgtaggaaaacaggtggtgggctgggtctggcacacaggcagcagttcgtggacccctgtgccaagtgtttgacgaagcccgtgaggcaaactgcacttgccgatagaggttgcgccacacaagtgtcttggaagcaatttctggcttgtcctaggccttagaaagtgcgtgcagatcagagccatgaagtgaagagcaaagcaagtgacaggcctgtctcaggttgtgcaacagaacgtgtttatgacagatgtcccctgtccaagtgagtgcactgtgagataaggggccggtgacctaccaatgcgtgtggcaagccagcctgttcccccttgcagggggaggacactcctgccctttattccagggaagagtatgtgtaaaaatattcacccttgttggtatcaaatgcgctgaagaaaataggtatcggggtttcagccattcggtctccttgttagtgtttctaagccctgattttcagtttcaaaaccttggtctctgaatccgcagtgatgggtctctagagcgaatacatggcagggccgccttcctccgtacagaaagggagaattgtgcttgtgtgttttaccaagcaggacagatggggccgtcacccccgtgacccgagccctgcaaaactgtgttctcacacgaaaacccccaggctctgcgggcagcgtggtcctgcagtggctaacactgggcgaccggagtcgtgttccgacccctaggagaggaaccggctcggtcgtggtgcagcccgcgaggagacgacctcagggcgtaatccgacgccgtgggttaagacatcagacctcaggcgcagtgcagccggcccctggggagtcaaggaccttgatcgccgataacaagttgccgttggcgggcgccgagggtgacccgcgagcgcggcacccgcctccccgcccctagcaggaccccctccgccccgcccccagccggacccctccccgaggccccgccccacccgcgagccgcagccgcggccccacagcttctggggctggggccccggcagccgggcaggccggcctgacctcgacctccgccgtgcgggcccgaccggtgagtccagcccggcagtcgcaggacccggccgccagcctctccctccacctctccctgcccccagcgccaggcgcgggct

SEQ ID NO: 10300 - DNA, 2300 bp, Homo sapien
gttagaacttactataaaattacagtaataccatattataaaattatatacatgacactgtatagtaataaattataaaaatctaatagtgctttatattatgattcttaaatctcattcaagaaaaaaaatctgctcctaaaaaagttggaaaaataccagtttaagagtttgaaaccaaccacttcctaacttgtgtttaagtcatccttcaaacatctaacagtttttttaatgaaaatattcttttttttttttgagatggaatctagctctgtcacccaggcttaagtgcagtggcatgatcttgccttactgcaacctccgcctcccaggttcaatcgattttcctgcctcagcctcctgagtagctgggattacaggtgcccgccactaagcccagctaatttttgtatttttagtagagacagggtttcattgtgttggccagactggtcttgaactcctgacctaatgatctgcccgcctcggcctcccaaagtgctgggattacaagcgtgagccaccgcatctggtcaaaaatattctttagagtagacaatgatcattactacatcttgttttcttcaatggaacttaacgttccaactattgttctatgttatcatccacagtcaagcaacatgtattcctaagcacagtactatactgagatcaactgacaaaacacctcaaaaaatgacaacttttccaaatatatcagaacttatatttctagatgaattgtatactttgcttttgaattatgtatataaagtgtattcataaatattgacaatttgtcaattatgaggatccctttgaaattgtctcgaaagtctacttacacgtcttttaaaagaatgagacttttttttactaaaaatgctatatctaatgtttaatatcttattagaccttgctccaaatgactttaaaggatagaaattttgaactatacaacaaaagaaattaaagtgaatatgctatagtttaaagcaatcctaaaaaggcattctttttttttttgaaacagagtctcgctctgtcacccaggctggagtgcagtggcaccgtctcagcttactgcaaccgccgcctcctggttcaagcaattgtcctgcctcagcctcccaagtagctagctggatttacaaaagcatggccaccatgcccagctaatttttttgtatttttggtagcgacagggtttcaccatgttggccaggctggtctcgaactcttgacctcaagtgatccacctgcctcggcctccaaaattgctaggattacaagcatgagccactgtgcccggccctgaaaaaggcattataacaatggtttggtataagatggtatcactggaataagtacttgtcttcttctgttcaactaccttgaaaatgacaataggctttttaaaaacataggtgttatatttgtttaaaaagtttgcaggaatcccaactcttgcccacttaaaagtactgaagttttaaaaaacaaatgtgaaaaaatacaaaagcattatatttaatacttgcatgagcaaggtgtaaagaacacaagcacaaagtatacccacttaagaattaaagttaaaattttaccttttgaaatattagaatagttcttttaaatatatttcagtgaaatttcaataaaatttacttgatgagtaataaatccccccatatgtgaaaccattgacctctggccactttcctgctttcaatcaggaactcatacattccctaccctttctcctctctgctattagttcaaggcacaaaatgcaggaaaacaaatggcaactcttaattatgtgcagtaatgaaactagatgtcagaaaagtctatgcagagcaagcttgtagaaagaggaaaatatcagtttaaactgtttttaaaatgcttttgtactatgtgcctaaaatgaattctttaagatacttagtttccttccccattcttgaactttggcatattttaatctttttataactggtgataagaaaatgtatcataaaattgacactgaatgatgaaattattgccttactgctatagtggatccattcttgccaacaccaccatggaggataacatggaaataatttgaacaggaaaatattactccacctagaaatccaagaactggaaggatcttcaattttatttctagaataggaatctttaggggtagaagaaagaaacaattaagacaacagaattttggttttttattaaataataaagaaacataatgataagccctgtacaataagctatcctttttc

SEQ ID NO: 10301 - DNA, 2300 bp, Homo sapien
atgctcttctgtaagggtcactgtaggaaaaacaactgaatatgatgatgtagtgaatggaactacttaataagaacagcatctataagggtatggaggcataagagtgcacagcacatttgggaaaacgcaatgtggctgatgcagtatgaggccaagaatgaggctggcaagagaggaaaagcaggattccaattgggaccaattgtcaatcataaaagccaccatttatggcacatttattatgtggcaggtactgtactaacgctttacaaacttttttgaatcctttcagtaatgaaaaatttacaaggttcactgtatcctgtatcaacaggtttgatgtagtgaatggaattacaggaacaagtctgggagtcgtcatccgtcattccttacccaatacactggtgtatttaaacgagccagtggaatgctgagcatcataaggaagaggattcaaagcaaaacagtaaacaggagggttcctttgaatctcttacttgaactaggcagttgaaaagtgattggcgtcaataagatcctgaagcctttgccaaatattaaagaagtaaaatataggccaggcaagttggctcatgcctgtaatcccagcactttggaaggccgaggtgagaggatcatttgagcctaggagtttgagaacagcctgggcaacatagtgagaccccatctcggcaaactttttttttttttttttcttaattagccaggcatggtggcacgtgcatgagtcccagctacgcaggaggcagagacagggggatcatttgggcccaggaaatcaaggctgcagtgagccgtgatcatgccatgccactgcacttcagccttggcaagagagcaaaaccctgtctcaaaaaaaaaaaaaaaaaaaaagtaaaatgtatgatttcaaatagaaaaaggattgcagagctgtgagcaaactaaggcaggtacaaaggttgaaatatattttaaaattatttgggggaaaatacatataagcacagaaaaaaggatgaaaggcaataatacccccaattttaaactgtatattatttctgggtagtgggattataggtgagtttcatttccttcataaattgtatcttcaaaaattgttttgcaattgataggtgatttccagttacaccaaataattgttttacaattatactcccacccactgaatgggttccctttgttacatagattcatcatcactccgtgtagtcatattttgtagttttgccattctagtggactgtcagaacactacatagactatgggacaattttttgtaatgccaaacgcgaacgaaactaagccgtgttgtttaacgacacattttcatgtggtaataaaacttagaaaataaggaagggtgaatgatttacataaatttaggataattttcttatatccctgaatggggaagggtggggtcctggtgaggatcggatggaaaggcctgcctgaggagattcagtgaatgttggtaaagccctacttcataaattaggtggtatgttcatcatgtttcataatttacatattattccgcaattttctttttttttttcttgacatggagtctcactctgttgcccaggctggagtacaatggcatggtcttgctcactgcaacctctgcctcccgggttcaagcgattctcctgcctcagcttcccaagtagctgggattacaggcgcccgccaccacgtccggctaatttttgtatttttagtagagatgggtttcgccatgttggacaggctggtctggaactcctgacctcaagtgatccgtctgcctcggcctcccaaagtgctgggattacaggtgtgagccactgcgcctagctgcaattttcgattataaacatttaaaacttaaaaactggaaggcaccaggcctcaagtgtactcgcaacccgctccggcggccaaagcaccctgggccagctatttgggcgcgcaatcgccccatgggggcggagcctcgccacccagttcacgcctgcgctctgcgtccagccaatcagcgacgtgtccggatgaggcgggactggcttttctcctgtgcgaatcccagcttgcctcagaagcgtcgcggagaaggggccacctcaggtgaagcgcgcttgtggaggagttgtggaggacgcctgtcgacgaccagtaactggtcctcggccattgcggtgtgtttcaggtgtgagcaggggaggcgtctgtctatcgcaggtgtccaggccagaggctgcccttgaccagtgaggtaaatcttacc

SEQ ID NO: 10302 - DNA, 2300 bp, Homo sapien
cttttttttttttttttttttgagacggagtctcgctctttcacccaggccggagtgcagtggcgctatcttggctcactgcaagctccgccttccgggttcacgccattctcctgcctcagcctcctgagtagctgggactacaggcgcccgccaccacgcccggctaattttttgtatttttagtagagacggggtttcaccgtgttagccaggatggtctcaatctcctgaccttgtgatacgcctgccttagcatcccaaagtgccgggattacaggcgtgagccactgcacccagcgaaaaattcttatataataaaattaggtggagaaaataatgggtactaccatatagacagtatgagttgaactataaaaatcctccaagtacatatacaacacacataccccaaaagacaacagaaatgacagtaggttaaatcacaggtagtttttaatatcctttttgtacactagagtttttcatattttctacaatgagtagattttgctttcataatcagaatgaagtggtatttttaaaaaattacgatcttgcaaatcttcaagccatgtataaataatgactgcagataggacacctcctccctcatgaggagacacagtgtgacaagtggcagccattggtgaaagaggtcagcatagcagccatcagagcacatagtatgagtgttgcctatcacgtgtagattagtttagcatatggcatgggttagtatatggatatgtgccacttaaaagccaattctctaaatgtgctaagacttaacattaccaaattaataaagttgagataaatagaggagtaagacctggtatcagccttaaaggaacttgctctagtgggattagcagataggaatcagcaggtcaagaatgagactagggctgggcacggtggcacgtgcctatagtctcaacactttgggaggccaaggtgggcggatcacctgaggtcaggaattcaagaccagcctggccaacatggtgaaaccccttctatactaaaaaatacaaaaattggccgggtgcgatggctcatgcctttaatcccagcactttgggaggccaaggcgggcggatcacttgaggtcaggagttcgagaccagcctagctaacatggtgaaaccctgtatctactaaaaatacaaaaatgagttgggtgtggtggcgggttcctgtaatcccagctactcgggaaactgagacaggagaatcacttgaacccgagaggtggaagttgcagtaagctgagatcgcgccactgcactccagcctgggcgatagagtgagactccgtctcaaaaaaaaaaaaaaaaaaatgagactatgagactatttgtgggtcgggaattcaccagacgcctcacacagagctggtacgcagtcaggctgataacagaagagcagctcgtctgtgtacttcagcagtttatttggggtttttgccatgatccaataggataaagtacttcaggtttggtttgtgaaaaatgcattataaactctattatataaatggtagtaattgtttgccagtatgttcttaaagatgaaaaagatgtatatgtagtcacagttggtgtttttcttacctccagagagcatagaatcaaagttaaaaatcagaactaagattaggactaaattgccctagtttcagctctgatgtgatatctgatctacttatattttctcatagccaccggtcactaaaagtctagtaacaaactgtaaaccagtaactgacaaaatccacaaagcatataaggacaaaaacaaatataggtaagtagtacacgcatactccctttgtttagtataagagtaatcacaaaggtctggcttttttataattctacaatattttgtctattaagcactgttctaaaatttatatgagattgtttgctgtagtagtattaaaagtttaagttattttgtggatgttgagtccactacggttttaaaaaatgtattttctattgaagttttattttttatatccatgtaattatttaaactcttcaaatatgttttgataattaggtttgaaatcatgggagaagaagaaatcgcttttaaaatgattcgtaccaacgtttctcatgtggttggccagttggatgacataagaaaaaaccctaggtactgatttttatatataatttttaattatgcaaataaacctgaataaaaggactggaaagaagggagtagcttatttctgtatggaacagaccaaaaggcctaacagtgcaggcagtgttggagct

SEQ ID NO: 10303 - DNA, 2300 bp, Homo sapien
cttttctgactaaaacttacacatcaaccttgaaaacatcaatatgaaataaggaactgtctttttcgttttttgttttttgagacggagtttcactcttgttgcccaggctggagtgcagtggtgtaatcttggctcagtgcaacctccgcctcccgggttcaagcaattctcctgcctcagcctcccaagtagttgggattacaggcgcccaccaccacgcccagctaatttttgtgtttttagcagagatggggttttaccatgttggccaggctggtctcaaactcctgacctcaggtgatccagcctcctctgcctcccaaagtgttgagattacaggcgtcagccaccacacccagtccagaactgtctttcaaaattgtaattacagcaagaatccctcttcttcctccgatctacaggaaacagtggagggagtcgctatattgcaggaggtggaggtactgggagtattggagttggacagccctggcagtttggtggaggaataaacagtgtctcttactgtaatcagggatgtgcgaattcctggctcgctgataagttctgtgaccaagcatgcaatgtcttgtcctgtgggtttgatgctggcgactgtgggcaaggtatgtttactgccaaacaaataagaatgggagcataaaacatccttgacaggtagagagagttttgaatggcttttgttatttaaaataatgattctctgtgtatccctttaccagccttgcattcaaactagttatgaaagtaagagaacaacataaatcactgaagaggatcttttcctgttattgttgcagtctggtgttttgttttgttttgttttgtttggaccaagcagatttaccttagctgaaaatatgtggtgaagttttaatttggaaacaaaaaaggatatcaataattcattaaataaagatggttcaaacactggattttgttgatagcgtattaatggagtttgttttggcagaaagtttttttcaaatggataaaaagatggaaattgattattgtaatttattgttaagaaccatgccatatctctatagtgagtcaggatcactatttcatggtaattattgtgactgcctcagatagtgaaataagccctataccagtaactgttgtattaggatatctgattattttgaaattaaagtcactcttagaaagtgaaaactcagtgcctacttcagcagcacatatactaaaattagaacagtttaggcattagcatggcccctgcacaaggacgacatgcaaattcatgatgcattccctattattttttttaaaagaaagtgaaaactcagactcaaagaattaaaggaaaacagaggaaaaatgcccagttaaaaaaaaaatcatgtttctgttttttcctctagatcattttcatgaattgtataaagtgatccttctcccaaaccagactcactatattattccaaaaggtgaatgcctgccttatttcagctttgcagaagtagccaaaagaggagttgaaggtgcctatagtgacaatccaataattcgacatgcttctattgccaacaagtggaaaaccatccacctcataatgcacagtggaatgaatgccaccacaatacattttaatctcacgtttcaaaatacaaacgatgaagagttcaaaatgcagataacagtggaggtggacacaagggagggaccaaaactgaattctacagcccagaagggttacgaaaatttagttagtcccataacacttcttccagaggcggaaatcctttttgaggatattcccaaagaaaaacgcttcccgaagtttaagagacatgatgttaactcaacaaggagagcccaggaagaggtgaaaattcccctggtaaatatttcactccttccaaaagacgcccagttgagtctcaataccttggatttgcaactggaacatggagacatcactttgaaaggatacaatttgtccaagtcagccttgctgagatcatttctgatgaactcacagcatgctaaaataaaaaatcaagctataataacagatgaaacaaatgacagtttggtggctccacaggaaaaacaggttcataaaagcatcttgccaaacagcttaggagtgtctgaaagattgcagaggttgacttttcctgcagtgagtgtaaaagtgaatggtcatgaccagggtcagaatccacccctggacttggagaccacagcaagatttagagtggaaactcacacccaaaaaaccataggcggaaatgtgacaaaag

SEQ ID NO: 10304 - DNA, 2300 bp, Homo sapien
gacctcaggtgatccactcgcctcagcctcccaaagtgctgggattataggcgtgagccaccgtgcccagcctaatgcaatatttttaaaaaatcaaaattaatggttgggcgcagtggctcatgcttgtaatcctagcactttgggaggtcaaggcaggtgaatcacttgaggtcaggagttcaagaccagcctgaccaagatgctgaaaccccatctctactaaaaatgcaaaaattagccgggggtggtggcatgtgcctgtaatcccagctactcaggaggctgagtcaggagaattgcttgaagccaggaggcggatgttgcagtgagctgagatcacgccactgcaacccagcctgggcaacagagcaagactctgtctcaaaaaaaaaaaaaaaacccaaaaaacaaaaaaaacaaaaaacattactgaagaatatccatgaaaagcaaaacacccaaactttatgttttattttacgttttaaattttttttttattttaataggaacagggtctgttacccaggctggtctcaaacttctgggctcccagactcctgggctcaagctatcctcccacattgacctcccaaagtattgggattacatgcatgagccaccacacccagccccgatatcaaaactataaacaaagacagaatctcactccaaacttgcatgactcatttcacagtaccttcccctaatcttggccctgttctacagcctaagtacctggttcaaatctcaattctgtcatttactatttgtgtgatgttagatagttactttttttcatcacagtttcttgatctgtagaatggggataataatggtatctccattataagattattgtgaggattagatgagctgggcacatggcagatgctacataaatgttggccattatcctgagagtcctgttgagtggcagatgtttttatatctgttaccatgcttttttaccccttctgattaagtcctcagatctgttatcatgcttgaaaagacctcagaactatatgtgtcttgtacaactgcaataatcttttgccatgtacatatagcatatatcaatcatcttttttaaaagaaggattaaaagaagtgactgcaaagtgtaaaaaatcttgccttggattggagtgaagctaaccccttttgcaagtctgttaattccacctgaccatcaaactgagggtgcgaatttgagtatttcctgaagctggttcccaagatatttttaaaaatgctttgaatgatggcaacattagataagtgtattgtttcccagggtgactaggaaaaaaatcttattgactagggtgcattgggattaagaaaaagatctccctttcgtaaatcagaggcaccaaggaaaggatctcgtgggaaaaacctgctgtcaaagtcggattacctggccacccctgagctggttcccctccagttcatcgcatgatttctatcataacaactcttgtatttagtggtttacatgtttatctcccccactagactctctgagaacagtagccaggtctagttcatttttgaatacctgacaccaagcactatgccacctaacaggcacaaattacatatttaacgactaaatgaatgaacgaaattcggttttggcagatttaacccaaaggtttcctctttcaaacaatatagttgggggttggaggaaaggagccacatacagcatctccttttagcactctgcagagaatgctaagtgcagagaaggttttatgcacaaaaatattcatggcattatagtaccgtctatggcacagtctcgacgcagggggcagttttctcttggtcgcctgcccaaccgggtaagtggatcccagctcagctccgcccctcccagcccagccctcagggcccgctgcgcaagcgcaggtggggagggcgcgcaccttccctatgcccctccgtcctccaggtggcgctggagaccccgccgccgccgcagccgcctctcgcccggccagacccgggcggcgccggccgcctcgccggccgcaggtccgcctccgccgcgccgagggcgtgggctcccggctcccggaagcggcggccgcggcgcggagccgagcgggcgtccgtcgccggagctgcaatgagcggcgcccggaggctgtgacctgcgcgcggcggcccgaccggggcccctgaatggcggctcgctgaggcggcggcggcggcggcggcggctcaggctcctcggggcgtggcgtggcggtgaaggggtgatgctgttcaagctcctgcag

SEQ ID NO: 10305 - DNA, 2300 bp, Homo sapien
atccaggctggagttcagtggtgtgatcatagctcactgcagcctcaaactccgggctcaagtgagcctcccacgtaagcctctcatgtagctggaaccacaggttatgcaacaccacacccagctaatttttaaattttttgtagatatggttgcgggtctcactatattgtccaggcttcggcctcccaaagcgccgggattacagaactgtgagctaccatgcctggccagcttttgtggtttttaaaaagccttattttaaattttctattttgttttgtatggcgggcactcactccacggccacagtgatctcttgaaatactagtctgcccatgttcttactttctccttaataccaaaaataatccaagattctcagcaggactctggtgactttgcctctttgtttctctctccatttgctgcctcacacttatttaagtgctttcatagtcccagggaagcaagctctgtgtatgcatttcctccagttgttttctgggcctggaatgctaatcttatttttctttgcctggttagtaattacttccttttgaaaactctgatgtcatctgtcagaaaacctccgtggtccttcctctgagcccaggcccctggccctcagctctgggcatgtctctactttttaaaatcctctcctttccatttaataaaccacataacataattttgtttttatttatttatatttttgagacagagtctcgttctctcacccaggctgaaatgcagtggtgtgatctcagctcactgagaaaacctccatttcccaggttcaagcgattctcctgcctcagcctcctgagtagctgggattacaggcgtgagccatgatgcctgactaattttttgtatttttagtagagatggggtttcaccatgttggccaggctggtctcgaactcctgacctcaggtgatccacccaccttggcctcccaaagtgctaggattacaggcatgagccaccacgcctggcctaattttgttattttgatctatgagtgtcctcgtcctgagggtactattactatttcatctttgtagcctagcatggcgcccatgaaatgtgtttgtggctgaaaggaacctatctttggtcaccaatgacccaacaattttggccacatatgttgggctcagactccctaaactatcaaaatcatgtgcttatattataagtgcctccagaacacaaatccctttcacagggcttgaaatgtatcaagtcactattaatcatcttaggccaaggctccgagtctgggctactccagaacctggaggggagttttttttgttttttttttgtttgtttgttttttgagacaaggtcttgctctgtcacccaggccgagtgaagtggtgtgataaaggctcactgcagcctcgacccccaaggctcaagtgatcatcccaactcagtctcccgagtaactggaaccggctttttttctttttcattttttttttttttttttgtagaagaggggtttcgctatgttacccaggctgatctctagttcttgggttcaagcgatcctcccaactcggcctcccaaagtggtggcattccaggggtgatggcttttggatgcctcccaaagtgatggctattcacggcgcccggcctgggaaatcttatttccaggaaatattctccagttgcgctctcctggaaagcagcacaatgggcctcccggctccgtgggcgcgcagtcccacccgcctgccccgcaccccacccgcgtactctccaccccacccgttcccaccctgtctgggttttcgggtgttcaccattgaggtgggagccacatctgcgccccgtgacctggcgaacctcattgaacacttctgcccgacccccgcagcagcagcgcgaccggatggcatgggtgtcaccacgcggtggccactctcactgctgcgaagcgccggcggcgggacctcggagggggcgccctcggggtgcgaggcccggcactccggaaatcccccgggagggaggggttgggagaaataaatccttttctccagagttgcgcaagagccagcgcggtagggccagagtgggaaggccagagcgggcgtccccgccagtgaccccacgccgcccgtccgcgcccaacccggcctccgccgagtgtccaaaccaaaagcgaaaggaacccgaccccgcgtcccctccggcggctccgtagtcgcgtccgcttggagctcgccgggcgcctccgaccctgccgggccgctttgtgacttcactcgtttcgc

SEQ ID NO: 10306 - DNA, 2300 bp, Homo sapien
caatatggagtcagtcaatcccagtgccctcttacaccatccttgccaagaatccagacttggaaaacagagagattattttatcacagcaagtgataaatacggcttttgcttctgaataaagcagaaactgacaaatatattcatttgaaatagtctatgtgagctcatgcctgtaattctagcattttgggaggctgaagcaggaggatctgttgagcccaggagttcaagaccagcctgggcaatgtagtgagatctcatctctacaaaaagttaaaaaagaaagaaagaaagaaaaaagaagttagctgggtgtggtgatgtgtgcctgtagttccagctacttggaaggataaagtggaagaattgcctgagcccaggaggtcaaggctgcagtgaaccatgactgtgccgctgcactcccacccaggtgacagagcaagtccctgtctccacaaaaaaaaaaaaaaaaaaagatttatgataagttattagtttttagcctgctttttaaaaattcaggaatagattatggccgtcatactatgtaaatatatacacatctactttatcctttccacacatgcatgatatctttcacaaggatgtattatcatttatttaatcagttccctattgtccaacatttaggctatttctggtattttgtaattctaatgttgaagtgaacatcttttaaatatatctttgcatatttgtgtgagtttttctataagataaatttgctgagttaaagggaatatgtatctaaaattatggtagctatttatttattcaacatttactaagtatgtactatatgatagggtttgtgcttgtttatgacttagtgttgagtttacaacagccaacaaaacagacaagagccctgctctcatggaggctacattttattgccaaattacaacaaatggtatttggttaattgactagctatttggaaaaacatacctttactatcctcctcacatcatacacaaaaaccaattgcaatttaatagacatgaaaagcaaaactatgcaataattaaattacaggagaatattttttaaaccttggaatagaaacacaaaacgcagaagaattgatagatatgagtagattaaaaattaaaactttcaaatgatgtaagatacaagatacaatgttaaaagacaaatagcagagcagaagaaaatttgtaatatttatagcagataatagactaatggacataatgtgtaaaaagtaactacaaattagatatcgacaagcccaagagaagaataaaaagaaaattgtaaacatgcatttctcagaagaagaaatgcaaatgaccagtagatatactgaaagttgctaaatcttgctaatgatcagagaaatgcaaactaacccaacaggttgaattttcatttattagactgacagaattaaaaaggcaagggcatacacaattgctcgcaaattctgctggtgggagtctaaatcgtcaacgggctggagcaatttggaggtgtttctaattgtgcatggttttttgacccagtaatattacttctaggaactggtctttcagaaacccaaagatttatatacaaggatattcatggcgtgttgtttgtagcaggaaaaacatggaaacaatgtagaaattcattcttaggagaatgaggaataaatatagtatctcataccacagaccatgataagatccctgaaaacaatgaagtagatctgtttgtacttgcttgaaaagatctccatggtacactgttaaatggaaaaagcaagtcacagagtaatacatgtactataatagcatttacatgaaaaggacaacagccaaggggtgtgtgtgtgtgtgtgtgtgtgtgtgtgtgtgtgtgtgtgtgtgtctgtacatgctggggagagagtaagatggagtcaggagggacaggggtgggaaagtggggagacttgcaatcagtacatttttaaaaagtgatacaaagctgctcctgtttttcatcctaaagacatcaaattatgaacattcatcaaagttctcttctttttcaggtgcagccacgatgtatacaagatacaaaatagtacagaagcaaaatcaaacctgctatttcagcactcctgtttttaacttggtgtctttagtgcttggattggtgggatgtttcggaatgggcattgtcgccaattttcaggtataatctggagctttttcagttatgaggagtggtggagtgtatgtgtctgaagagagcagcagaaatgcaagaggcacacttatgcc

SEQ ID NO: 10307 - DNA, 2300 bp, Homo sapien
atgtttctgaggctgttcttcaactcctggcctcatgtgatcctcccatctccacctcccaaaatgttgggattacaaacacaagccaccataccctgtcgtattttatttttcatatataacttccctgaatctatatgcctatgttaggaatcttatttatttatttatttgtatttgtatttttacctttattttttgagacagggtcttgatctgttgctcaggctggagtgcagtggtgtgatcatggctcactgcaatctctgccttgtgagctcaagcagtcctcccacctcagcctcctgagtagctaaaactacaggttcatgccatcatgcccagcaaatttttgtagtttttgcagagacagtgtttcaccacattgcccaggttggtcttgaactcctgagctcaagtgatacacctgccttggcctcccaaagtgatgagtttacagacataagccactgtgcccagtcttttatttatttttattttattttttgagacaaggtctcactctgttgcccagactagagtgcagtggtgctatcatagctcactgcagccttggtctcccaagctcaagtgattctcccacctcagcctccgaagtagctgggactacaggcacacaccatcatgcccatctgattttatttatttatttatttatttatttatgtatttatttattttttgagatggagtctcgctctgtctcccagactgtatgtagttcagtggcacaatctcggcttactgcagtctccacctcctggggtccagtaattctcctgcctcagtctccctggtagctgggattacaggcacgcgccaccacgcctggctagtttttgtatttttagtagatacgcggtttcaccacgttggcgaggctggtctcaaagtcctgaccttgtaatccacctgcctcagcctcccaaagtgctgggattacaggcgtgagccacagtacctggcccatgcaaggtatcttaggtatacagaaactatatgatgtattgcagagtcagtgcagtcatatttgaatataacaccaatcatgtaatcaatttctccccttatttctaggtttgatactaggaaatacatttccttagaaataagttaaaaggtctttttttttttctgcacctccctttcttatgtggtgaatgaaaatttaatatcaattcatttgtgctccagcttgaggttgaactgtctggatggcaaatattgtggtgctggggaagcccaggtcagagggaagctgggggaagagtgtgttcaccgtgagctgaggccaaggggtggcctgtggccaaaaccaggctctcctggacaacactttaacttgccctttgcaaagcttgcatgttcaagcttaagtcaagacccagtggttccatctaaatgttcctcgactggaaggttgtgcccagtgcacatttgaaaggagctgaggctgggtgtggtggctcatgcctataatctgagcactttggaaggctgaggtgggtggatcacctgaggtcataagttcgagaccagcctggccaacatggagaaacccccgtctctactgaaaacagaaaaattagctcagcgtggtggtgcatgcctgtaatcccaactactcgggaggctggggcatgagaatcgcttgaacccggcaggtggaggttgcaatgagctgagatctcatcactgcactccagcctgggtgacagagcaagactctgcctcaaaaaaaaaaaaaaaaaaagaaaagaaaagaaaagaagggagccaaaggtgaggtgcattttgagtgtgtagtatgtacagggtctgcaccaactttctgcctagactggcacaggggctgccttctggttgaaatggctggttacaggatggcagggacagggaacttgtttagaagctgcctttcaaaaaaaattagccagaactgggtgtggtggcatgtgcctgtagtcccagctacttgctgggctgggaggatctcttgagcctgggaattcaaggctgcagtgagctatgatcatgccactgcactcccacctaagcgacggagtgagaccctgtctcaaaaaaaaaaaaaaaaaaagaagaaaaaagaagctgcatttgcataacaaaagcagtggttttacttagatggtgtgttcatttgaggtgccttgggagggatgagtagagattatcagggagcagggagcctaaaaaccccaaaccacccttggcaccatcatggaacgagtcacgtactttggttttttttttcaatc

SEQ ID NO: 10308 - DNA, 2300 bp, Homo sapien
ccaggttcagccacctaccctcaagtcacattcattaccttgtaccaaacagaatgtcccgaaatgcaattctgatcatgccaccccctgcttaaaagctcttctgtagctcccatcatttctctgctctagatctttccatgacttcccatcatacccagagtgaaagccaaagtccttatgatgtcccataaagctctgcatgatcaggtctccacataacttttagccatcatgtccttcagttccccaccttgctcactctgcttcagctatactggcttccaatgtaaggtctgggttagatatataaatgtgagaaactctagagattggggacataagaagcaaccagcaaaagaaactgaaaggaaatgaccatagtgatacaaagaaaaccagagaagatctgccttcctgaaagaaaaattaagaaagttcaatcaggagaaggtgatcacgctaaggttaagctgggcaacgtgcaactttaagaaacaccacccacacccaaataattgctacagatggcctatgaatcacattagataaacatggactatagtatcaaatctggcataaaaggcccttaaacgaaaattttctggctacgtctcctgaggcagaatagggtctggaggcagggaacctaacgccgattcacgctgacttcctagaactaaatcaaaaggtaaaccccaaatttccacacctaagtaacaaaaggaccagcggctactccctttgcaaatccccaccttttctgacaggcagatggaaattgaaagtacctcaaccaatcagactgattgcgggccaaatcttcctttgcatagaagtgcaactaagtaacatcactttagccaatgattggttgctttccacaaccaatcagatgtttgtataggagtatgacctttgtcattttacttcagcctctgattggttgctttccataaccaatcagactgattgtgggccaccacttcatttgcatgaggagaacaccagtgtccaatgggaaatctctagtgggtatttggacctaagaagattctgtatccagtacactgtggagcgtactttggttttcaatgaatctttgcttttgttggttcattctctccttgatttgtgcgttttgtccaattctttgttcaaaagaacctggacaccctccaccagtaacactcttacctcatttcctaccattctccatttatgggattatttgcttcaaccaaaccaacaggccaggtgccagtggctcacacctataatcccagcacttagggaggccaaggcatgaggatcatttgagccaaagggtttgagactaaggtgagctatgatcctcactgcacgccagactgggtaacaaagcgagaccccccatctttaaaacaaaactgcccactgcagtcttggtcttcatctttttgatgctccctgtaagtggcagtcacttccgtaggtttgtgcctcacatctagtagttgacattttatttcatgttttaaaaacctttggaagaccaggcgcgttggctcacgcctgtaatcccagcactctgtgaggctgaggcaggagaatcgtgtgaggctgaggcaggagaatcgcttgaggccaggagttcgagaccagcctggggaaatagcgagaacttgtgtgtatacacacacacacgctttggaagtaggtcttatttctcattcttcagggcataaacctctcccgtgcagcaatcaaactcaatctttgttttcccagtaaaagcctagcagagtatatggcacttaggattaacaacaacaaaaaaaaaattgttgctcaaggaatgacggagttattatataacagacaggactaagtagggataacctcaaaaggacgcaacttctggctttgtttttttgttttgttttgttgcctcctttctaagatttcagtgctctaactgcatccttgcaccaccgcgcgccaccccgaaattgacgtcacaatctggactaaaactaccaatcccagaatgccgagcgaggaggcgggctctccggaagccgccgagtgattagtgagcggagaagctttcttccggcgggaagggccccggaggcgggcacttggggggaaagttgagacgtgattaccgggttgggcgggccccatctgggaggggtttgtgggtgaactcggggtccaccgcccgctgaggagatggatgaggacgggcttcctctcatggggtcaggcatagacctgaccaaggtttgtaaaagacggtgctagactcccgacga

SEQ ID NO: 10309 - DNA, 2300 bp, Homo sapien
tatcagaatattccattaatgatcatgaggcaaaagtgaagcctcataccattctttttcactatctatataatgtttacataaatctcaggcacatataactgggaacatctttctctatggatcttatcttttttttttttaacattcaaactcaatatactttcaaagtttagatttggtttgtgtaagttctcttagtagtgaaatatgttcactgtcattcggtgcagttttgtagactaacctgaaacgtacacgtgccaatgaccacataattattgccaccatatgcaattaggtttcctgaatccccattctcaaagggattaaattctaccacatgcacataatcttcacaatccacagtgtaggcagcatttcttgaggcatcttgcttcatcttgtatgtcaaaattcaagcagttgtgaaaattaaatagccttctactggacaaggtcacgaaactgtggattagagcacaggtacaattacaatggtcaatatgttagtcattcagcaaatgcatcaaaataaggttgtggtgttacaatgagacagaaagctcaaaagaaacatttaaagtacttatcaagggacagaaactgcaggaaaaatattaaatctagttattaatggttccacatttgctccacagctctttcccatatctgtgattctagcagacaataacactgcaaagttctgtttagattatctaaaacaaatagtatttcatctgaagatggaatcattttaacagcaaatgttaataaaaattaataacttttatgaaccactatttgtaggtaccatattaagcattttactgacatgatcacatctggtatctgtacaaatctaaaggcaggtactacctctggtctccattttgtagatggagaaactgaggcttcagtaggttaactaacttgccaagctcataagcagggccaggatttggaagacttcattgtgtgtggagaaccagcgctaatgaagaaaaaaacagcctcctggcttgaaggagaccacagtttagggatagttatgactcaacgtgaaaagggctataatataaacagatagaaaatacaggatctgttgttaaggagtaccaaaatgtgtgatataaaaataatgttcagggggttgggcggagggagagcatcaggataaatagctaatgcatgtggagcttaatacctaggtgatgggtgtgcaaaccaccatagcacacgttttacctttgtaataaacctgcacgtcccgcacacgtatcccggaacttaaaaattaaaataataatattcttaaaactaggcagaagaccttaacctgtcagggactagtgtgcattctggaagtagcattcccacatgagaattatgggttttagagtttttggttttttaaaaaattcgacacaagggttgtcctgaaaacagctggactcagtaacaaacatatcaagcaccttaagagtatgtactgagaatgagtcccacctcgagacgcttataaactagtaactttaggaatggacatcagggactggagacttttgaagggtgaccagcaagtgttatggacacggagacagagaggtatagaagtgcaagagattcgaggtcacgaaattgttccgtccctacacctactgctcattaaagcagtggccggggcctcaccgtacacgttggacaggacttgcccctgtaaaactacaacggcagagaagaagggagggaacaagataagtctctgcaatgagcgccgacacctctccccgggccaggcgagttcctcaagaccccgctcccacctcccggggcccgaagtgggaaggaagaactcctgggaatagagtggcaaggctgggcggccggcagaaaagcatcccggcctctcgggctcccagctcgatacgcaccgcagagcgccaggaaccgaccagaggcaggctggtcttccttgggggctgccgcgacgcgctgtggctctgcttccgggtcggagggcgagcgcagcgattggctcccggggcctcccgcgaggtttgaactgtattcagcggcgacagcggcgactgcggcggccgcgggagggcatcccgttggggatccttccgcacactgaagagtacgtcttcgggtctacccctaatcacgtaagtctcgcgtctgccctacctgccctgtcgcatttttaagtggtgattcaggctgtggcttttgagggtgttttgcactgtaatacctcggtcgtagcaaagtgccgtgggaccgaagtattatgg

SEQ ID NO: 10310 - DNA, 2300 bp, Homo sapien
agtttagatttggtttgtgtaagttctcttagtagtgaaatatgttcactgtcattcggtgcagttttgtagactaacctgaaacgtacacgtgccaatgaccacataattattgccaccatatgcaattaggtttcctgaatccccattctcaaagggattaaattctaccacatgcacataatcttcacaatccacagtgtaggcagcatttcttgaggcatcttgcttcatcttgtatgtcaaaattcaagcagttgtgaaaattaaatagccttctactggacaaggtcacgaaactgtggattagagcacaggtacaattacaatggtcaatatgttagtcattcagcaaatgcatcaaaataaggttgtggtgttacaatgagacagaaagctcaaaagaaacatttaaagtacttatcaagggacagaaactgcaggaaaaatattaaatctagttattaatggttccacatttgctccacagctctttcccatatctgtgattctagcagacaataacactgcaaagttctgtttagattatctaaaacaaatagtatttcatctgaagatggaatcattttaacagcaaatgttaataaaaattaataacttttatgaaccactatttgtaggtaccatattaagcattttactgacatgatcacatctggtatctgtacaaatctaaaggcaggtactacctctggtctccattttgtagatggagaaactgaggcttcagtaggttaactaacttgccaagctcataagcagggccaggatttggaagacttcattgtgtgtggagaaccagcgctaatgaagaaaaaaacagcctcctggcttgaaggagaccacagtttagggatagttatgactcaacgtgaaaagggctataatataaacagatagaaaatacaggatctgttgttaaggagtaccaaaatgtgtgatataaaaataatgttcagggggttgggcggagggagagcatcaggataaatagctaatgcatgtggagcttaatacctaggtgatgggtgtgcaaaccaccatagcacacgttttacctttgtaataaacctgcacgtcccgcacacgtatcccggaacttaaaaattaaaataataatattcttaaaactaggcagaagaccttaacctgtcagggactagtgtgcattctggaagtagcattcccacatgagaattatgggttttagagtttttggttttttaaaaaattcgacacaagggttgtcctgaaaacagctggactcagtaacaaacatatcaagcaccttaagagtatgtactgagaatgagtcccacctcgagacgcttataaactagtaactttaggaatggacatcagggactggagacttttgaagggtgaccagcaagtgttatggacacggagacagagaggtatagaagtgcaagagattcgaggtcacgaaattgttccgtccctacacctactgctcattaaagcagtggccggggcctcaccgtacacgttggacaggacttgcccctgtaaaactacaacggcagagaagaagggagggaacaagataagtctctgcaatgagcgccgacacctctccccgggccaggcgagttcctcaagaccccgctcccacctcccggggcccgaagtgggaaggaagaactcctgggaatagagtggcaaggctgggcggccggcagaaaagcatcccggcctctcgggctcccagctcgatacgcaccgcagagcgccaggaaccgaccagaggcaggctggtcttccttgggggctgccgcgacgcgctgtggctctgcttccgggtcggagggcgagcgcagcgattggctcccggggcctcccgcgaggtttgaactgtattcagcggcgacagcggcgactgcggcggccgcgggagggcatcccgttggggatccttccgcacactgaagagtacgtcttcgggtctacccctaatcacgtaagtctcgcgtctgccctacctgccctgtcgcatttttaagtggtgattcaggctgtggcttttgagggtgttttgcactgtaatacctcggtcgtagcaaagtgccgtgggaccgaagtattatggtgcagtgacttgacgctcgagcctggttgggcctgggggctgtaggcggagttcacagtatctagcgatggagctggtaggtcctgagggttcgtctgcagcttggaagacaggcccgtagaggcctgcttaacttccattagttaggcaggaaacctgggttctagtc

SEQ ID NO: 10311 - DNA, 2300 bp, Homo sapien
ttatcagtgttcgagtgcaagtcccaaaggttccttgggaggctgtaactaatcaggagtaggagaaagttgaggaattggagtccgtgtacatagtgggactagaacccaggtttcctgcctaactaatggaagttaagcaggcctctacgggcctgtcttccaagctgcagacgaaccctcaggacctaccagctccatcgctagatactgtgaactccgcctacagcccccaggcccaaccaggctcgagcgtcaagtcactgcaccataatacttcggtcccacggcactttgctacgaccgaggtattacagtgcaaaacaccctcaaaagccacagcctgaatcaccacttaaaaatgcgacagggcaggtagggcagacgcgagacttacgtgattaggggtagacccgaagacgtactcttcagtgtgcggaaggatccccaacgggatgccctcccgcggccgccgcagtcgccgctgtcgccgctgaatacagttcaaacctcgcgggaggccccgggagccaatcgctgcgctcgccctccgacccggaagcagagccacagcgcgtcgcggcagcccccaaggaagaccagcctgcctctggtcggttcctggcgctctgcggtgcgtatcgagctgggagcccgagaggccgggatgcttttctgccggccgcccagccttgccactctattcccaggagttcttccttcccacttcgggccccgggaggtgggagcggggtcttgaggaactcgcctggcccggggagaggtgtcggcgctcattgcagagacttatcttgttccctcccttcttctctgccgttgtagttttacaggggcaagtcctgtccaacgtgtacggtgaggccccggccactgctttaatgagcagtaggtgtagggacggaacaatttcgtgacctcgaatctcttgcacttctatacctctctgtctccgtgtccataacacttgctggtcacccttcaaaagtctccagtccctgatgtccattcctaaagttactagtttataagcgtctcgaggtgggactcattctcagtacatactcttaaggtgcttgatatgtttgttactgagtccagctgttttcaggacaacccttgtgtcgaattttttaaaaaaccaaaaactctaaaacccataattctcatgtgggaatgctacttccagaatgcacactagtccctgacaggttaaggtcttctgcctagttttaagaatattattattttaatttttaagttccgggatacgtgtgcgggacgtgcaggtttattacaaaggtaaaacgtgtgctatggtggtttgcacacccatcacctaggtattaagctccacatgcattagctatttatcctgatgctctccctccgcccaaccccctgaacattatttttatatcacacattttggtactccttaacaacagatcctgtattttctatctgtttatattatagcccttttcacgttgagtcataactatccctaaactgtggtctccttcaagccaggaggctgtttttttcttcattagcgctggttctccacacacaatgaagtcttccaaatcctggccctgcttatgagcttggcaagttagttaacctactgaagcctcagtttctccatctacaaaatggagaccagaggtagtacctgcctttagatttgtacagataccagatgtgatcatgtcagtaaaatgcttaatatggtacctacaaatagtggttcataaaagttattaatttttattaacatttgctgttaaaatgattccatcttcagatgaaatactatttgttttagataatctaaacagaactttgcagtgttattgtctgctagaatcacagatatgggaaagagctgtggagcaaatgtggaaccattaataactagatttaatatttttcctgcagtttctgtcccttgataagtactttaaatgtttcttttgagctttctgtctcattgtaacaccacaaccttattttgatgcatttgctgaatgactaacatattgaccattgtaattgtacctgtgctctaatccacagtttcgtgaccttgtccagtagaaggctatttaattttcacaactgcttgaattttgacatacaagatgaagcaagatgcctcaagaaatgctgcctacactgtggattgtgaagattatgtgcatgtggtagaatttaatccctttgagaatggggattcaggaaacctaattgcatatggtggcaataattatgtggtc

SEQ ID NO: 10312 - DNA, 2300 bp, Homo sapien
ctcataatgcatgataatagctaatgtgcttttatacatgccaggcactgttctaaaagctttacttgtgtttatgtcgttgacttgtcataaaaccctatgggatagggttttcattttcattatgaggaagctgaggcagggaaaggtgatgtaacttggccaagatctcgcagccagtaagtggtggagccacatttcagaatggcctaattcccaagtgagtcttcattcatagcaatcaaatctcataatactacctttaaataataccagtaagtaatttactcctaaaaatgtatttcaggcaaagtgaccatgtcactgaagctgacagttcttcactttcttttttctttcaagagatgagggtgattttttgaagagaaatacaattcttagctatttactaggatttgcatttatgtaaataattaatctctaatcttctacctgtatctttaagttgcatcatagattgtgtctataatttaattatattgcaagtggcatgtatctttgctcttgattatacaaaccaaagtaaacatctaggattctgtttatgccacataaaaatagaagaaaaggatagcagaaggagtcaggaaatggaataagtacaggaaaatacccaaaataagatgatgggcatgtgagtatgttgagacttgagtacttaaagtaggaaaaaaacttttagcaggcatgtctgtaaactcagagaaaggaattggatgccttatatagtcttgggtatatgaaacattggcactacctcaaattattttgaaaggcttttgtgtgcatcaggagaagttacttaacatgatgctttaagaacacagcttatagagttagacatattaagtttatgctgtttgtccacttacaagctgagtgacgtggaggttattaggtaaaataaggataataacagacctgtcttattggacacttatgacagtcgagtgaggtaatcaatattaagcttttgaaaagtatctccaccaagttagctcctaaatattagttattttattggttatgtagtacggtgtaacaaaccatttcaaaagttaaggttttaaaataaccatttccttctgattctgtggatcagcagtttgggtgggacactgcttggtgatactctagtggtcatacaggacacaattcctcctgttgtaataggtggtgacaacacatgtgaaatgtctaccagggaagcttattagagacttaatgcccagggtttttattgggggctaaatgcaaaggcatccactgtctgacatgtaccaaaattccagactcgcaagtgtttagcataaactatattgtttgtatgaacagtttagcacagtgaaccactcttactggaaacactcctgaaatctaagctcccaaactggactccagcttcaaaggagagcattcaggcctattgtattagtacttctgcacacaccacttaaggcctaagctcagaactcccacagcgtcattcttgccacattctattggttaaatcaagtcacaagcctggtccagattcaaaagggtagaaaaataggccacctcttttgggacaacgtaggatgggaggaaattggctttttaggtttttttttttttttcccaatttatcagacttattacctatctcaaaacaaatatatatatttaaatacagctttaattaggtatatttgtaattataagtttgcagtaaatttgcatgtctgtttttgtgtgaattttcagaattgaaggctacattttgttctttcagaaggtttggcttaagaaaccaaaggggagggaaatatgattgcgcagaaattgtattattttgttttcctaaatttaattaaaagcaatcttggtaaatatgaaatgacctctcattcactatatgtttttctctatctgtgcttgcctatacatgttaaatgttaatttcaggttaacataagatactttaactttgtattctgtcctactttaagataatggctgtgtttaatcagaagtctgtctcggatatgattaaagagtttcgaaaaaattggcgtgctctttgtaactctgagagaactactctatgtggtgcagactccatgctcttggcattgcagctttctatggcggagaacaacaaacaggttggtaaactatatttgggttaacttgtttttttaaagcaaaatttcattgctgcccatttgaataaacttaagcttaagaatattaatttctttacattatgtgcccttctgtgataatacaccattttc

SEQ ID NO: 10313 - DNA, 2300 bp, Homo sapien
aagaaaaaaagattaaagaagatctaagcaaatacagaaaaatgtcatgctcatagataataaattaccttcaggatatcagttcttctccaaaattaatctataaatctataaaaccaatgtgattataagttgagcatcccaaatctgaaaagccaaaatccaaaaatgctccaaaatctgaaacttgttaagcattaacaatatgctaaaaaatatatattcattgaagcatttcagatttcagattttgggatacttaactgatataatgcaaatgttccaaattctgaaaaaaatatcccaaatccaaaaatacttctggtcctaagcatttcagataagggatacctaactagaaccttaatatcctgtcaagtgttcttacggaacttgaaaagctgattttaagatttatatggaaaagaaatgactaagaatagctaaggaactgctgtaaaagaaaaacatgtgggtaagtagagggctgggaaatttgaccagatattaaaaattattttaaagttatattaatactgtagatttggctgtggaatagaacgttctgaaaggagcccacacatatatagaaatctgatatactgtagagatggcactgcagattagtggggacaggatgacttcttcaagaaatatataaggacattggaaaaagtaaaattacatctctatcttatatcatacacaaaattacagatgaattacaaacctaaacatgaaagtcaaaatatttaaacttttagaagaaaatatatgaaaacacgttaataatctaaggattgagaaggatttctaaaaaaaaacaacacattaaaagtagttgccataaagaaaaaagaaaaatatttaaacattaaaattaatcagtttggttcaccaaaagacaccagaggggttgaaaatatgtcacaaactgagcgaaaataattgaaacatatataactaacaattaatatccagaatatataaagaactcccataaataaattagaaaaagacaacccaatagaaaaatggacaaagccaaaaaagaaaaaaaaaaaaagcatttaacataagaggaaacataaatggctcagaaacatatgggaagacacttaacctctttggtaattaggaaaatacaaattaaaaggacaatgagacacaagagtcagctaggacatggaacaatggaaattctcataccctgcttatcgagggcacaaatcgcttacaactatgttggaaaacattttggcattagtaaagctgaacatatacatactccatgatccagtaattccatactgagaaatatactctagaaaaattcttacatatatgtaccagaagacatataaaagaatgtattatcttattcattggggtcaaaattagaaattaactctgaaatgtttaattaaaagtcatacaacataaactcatcatccaaaagtaatgtttatgggcacataaatattcttttcatggactaattcattaatttctaaattcattaataaatatttgtacatattatccttttgtaaatgcagagataaaatacacctgacaggtcaatttttgatatagcatgaatggctttttgttcacactgacaggcatatgtactttaatcaccaaaaactatatcaagtatttataaaagaaagtctcttttgaggattatttcagtttaatcaggattaaaaggaaataaaactttatccttatcatccttgagtgaaataacttgagttttaatatctttacttaatcagaaaatacacaaaaggaaacaataatatagagagagcctgatgtcctgtggtcttccttaataacaacccattttcaagagactataatctactcaacagaaagcattctaccaaggatcttagtcagattctgagaaaattcacactcaaaataaacaatgtgtcactaaaaccaaaacaatgtaggtattagcagctgcataaaggttagcctcaatctaatgagtcatttctaaaatgatgaaaagtataattctttgaagtgctttctattcaagctagaaaatatataaagatacagaatcgtttaccaagcaggctgacagagaaatttttcattttctttcttgtttgactgtatgcaaacatcaaactaagaatggcaaaaatgaatctctcttcctatatattaatactaactttttctttgttttctcaaggtattttactttcagcatccaagtccataagaaatttagatgatgacatggtatttaatacattcaggttggggaa

SEQ ID NO: 10314 - DNA, 2300 bp, Homo sapien
gctcttcttgttgaattgatccctttaccattatgtaatggccttctttgtctcttttgatctttgttggtttaaagtctgttttatcagagactaggattgcaacccctgcctttttttgttttccatttgcttggtagatcttcctccatccttttattttgagcctatgtgtgtctctgcacgtgagatgggtttcctgaatatagcacactgatgggtcttgactctttatccaatttgcctgtctgtgtcttttaattggagcatttagtccatttacatttaaagttaatattgttatgtgtgaatttgatcctgtcattatgatgttagctggttattttgctcgttagttgatgcagtttcttcctagtctcgatggtctttacattttggcattattttgcagcgggtggtaccagttgttcctttccatgtttagtgcttccttcaggagctcttttagggcaggcctggtggtgacaaaatctctcagcatttgcttgtctgtaaagtattttatttctccttcgcttatgaagcttattttggctggatatgaaattctgggttgaaaattcttttctttaagaatgttgaatattggcccccactctcttctggcttgtagggtttctgccgagatatccactgttagtctgatgggcttccctttgagggtaaccagacctttctctctggccgcccttaacattttttccttcatttcaactttggtgaatctgacaattatgtgtcttggagttgctcttcttgaggagtatctttgtggcgttctctgtatttcctgaatctgaacgttggcctgccttgctagattggggaagttctcttggataatatcctgcagagtgttttccaacttggttccattctccccatcactttcaggtacaccaatcagacgtagatttggtcttttcacatagtcccatatttcttggaggctttgctcttttcttttcttttttctctaaacttcccttattgcttcatttcattcatttcatcttccattactgataccctttcttccagttgattgcatcagctcctgaggcttctgcattcttcacgtagttctcgagccttggttttcagctccatcagctcctttaagcacttctctgtattggttattctagttatacattcttctaaatttttttcaaagttttcaacttctttgcctttggtttgaatgtcctcccgtagctcagagtaatttgatcgtctgaagacttcttctctcagctcgtcaaagtcattctccatccagctttgttctgttgctggtgaggaactgcgtttctttggaggaggagaggcgctctgctttttagagtttccagtttttcttttctgttttttccccatctttgtggttttatctacttttggtctttgatgatggtgatgtacagatggatttttggtgtggatgtcctttctgtttgttagttttccttctaacagacaggaccctcagctgcaggtctgttggaataccctgccctgtgaggtgtcagtgtgcccctgctggggggtgcctcccagttaggctgcttgggggtcaggggtcagggacccacttgaggaggcagtctgcccgttctcagatctccagctgcgtgctgggagaaccactgctctcttcaaagctgtcagacagggacatttaagtctgcagaggttactgctgtctttttgtttgtctgtgccctgcccccagaggtggagcctacagaggcaggcaggcctccttgagctgtggtgggctccacccagttggagcttcctaagcaagcctgggcaatggcgggcgcccctcccccagcctcgctgccgccttgcagtttgatctcagactgctgtgctatcaatcagtgagactccgtgggcgtaggaccctccaagccaggtgccggatataatctcgtggtgcgccgttttttaagcccgtcggaaaagcgcagtattcgggtggaagtggcccgattttccaggtgcgtccgtcacccctttctttgactcggaaagggaactccctgaccccttgcgcttcccaagtgaggcaatgcgtcaccctgcttcggctcgcgcacggtgcgtgcacccactgacctgcgaccactgtctggcactccctagtgagatgaaccctgtacctcagatggaaatgcagaaatcacccgtcttctgcgtcgctcatgctgggagctgtagactggagctgttcctattcggccatcttggctcttcccccgttttacaat

SEQ ID NO: 10315 - DNA, 2300 bp, Homo sapien
aaatgcttctgtgctctagttttaaaatgcaaaggtatgatgttatttgtcaccatgcccaaaaaagtccttactcaataactttgccagaagagggagagagagagaaggcaaatgttcccccagctgtttcctgtctacagtgtctgtgttttgtagataaatgtgaggattttctctaaatccctcttctgtttgctaaatctcactgtcactgctaaattcagagcagatagagcctgcgcaatggaataaagtcctcaaaattgaaatgtgacattgctctcaacatctcccatctctctggatttctttttgcttcattattcctgctaaccaattcattttcagactttgtacttcagaagcaatgggaaaaatcagcagtcttccaacccaattatttaagtgctgcttttgtgatttcttgaaggtaaatatttcttactctttgaagtcattggggaattctatttaaattgtgtactgtttgcttctgcctagaactgttcttcactttaaaattttcattgtttcggaaccgagagttatttataaattgctgaatatgcaattctgtggaatctgaaaaatagctcggggagatggatgcatttgcacagatatctgtatgagtagaaactattgcaaggtacttatgctaaatcctccacttctgcagggcttccgtggtgtcattacagaagattcctttaaatcctctctatggctaagggctatagagcatggatatgaacttggggattttttttttcttttgcaggtgcagatgttttatttttaagaccatgttcttttgcatgtgtgtatgtgtctctgtgtgtatgtgtctctgtgtgtgtaactcatcaggactttatttacaaggcatgctatatatgaagggttgtattttagatgatattaaagcttttaaatatgatctttggagctaaggtcccggaactctgcacttatgcccagagagagtgttaaagttagagtaaagtgtaatttgttcttccaaaaaagaactccttgacaactcttgctgaccttgcatatttgtataatttaaacaaatacatactgtatatggaaagcagaaactttctaagagctgcttgcccaacttttctgtttagaagaggactttcatgggcaaagtttggacttggggttctgtgttataaaactctgattttatattcagtgtcgtgaagtccctttaggtaaatctggctgctgctgtcagtgcaccgacttctcgtttccgattgctggccgtagttctagtttccattctcagcaaaattatatccttcaagacttgtgtttttttttcaatttgcaagcgcttttaagctgctgtcactggctccaccgattcaattgcctgagggctcaattcataagacgtctctgccacttagtgcagcattcagttgctgctttcaaacacttcaccactacgactttccctagtcaagtaagtggctccaggagttaaagatacacccttgtcaggcacctgattctgctgttcctgagatgccaacacatgcaggccaccttgctttcaaagaaatgacgtcactgtgcatacatactatgtgatctagcagctggagtttttgtctccttacttaggggatcataaaagaggctgtggagcgttatctctgcattaattacaagttaagaaaattgtttccaaatgcacttttcatgctgtgtatgctgaacacttcagaagtggagctcttaataagttgttacttttttctgtacttgaagcaggaagtggtttgagggagctgcgtggtctttcacatgtaattcagtgggtaaaggtgtcctgcccagaggcagagctcaccagctgattgtactctgactctcaaggtatttccaagtgagtgagtcgggggaagggagtaagggagtggactggagcttgggtcactatctgggctgctacaataggcatacaatggaaataggtggcttgactggggggaaaagattgacttaaatcccagctgtgcaatttgttcattgtttcaatggacaaaaggcagtttacccaggctcataatagcatacctgcctgggtgtccaaatgtaactagatgctttcacaaaccccacccacaaagcagcacatgtttttaagacttcagttttctattcacatcggcctcataatacccaccctgacctgctgtaaaagacctggaacaaacaaaaatgattacacctacagtgagtattttcttatgactgttgccctcaaattt

SEQ ID NO: 10316 - DNA, 2300 bp, Homo sapien
agtatctgactctccaaacttggttaaagaggttttttctcatctggaagacaggtgagatcagctctattgttttatacaatctacatcctcaaagtctgtaagagaatagacatttttcagaaagggtgtgatccacaaaaactgcagaaaagaaaaagatttgtcacaaatcaagtgtacaaagagagcttattaaaggaagccacggattattattaaatgcagggattactcacacatctgcacatgtggataatccctgcattaagaataatccagggccacctactaggccacctcttgatgatacctcttagtgtgctctttgggtcaaatcccacccactgaaatttcccaacatggtaccccaaagcctctcatgacacaatctgcctccctcattttggattttccaaaagattttactcccctgtcttcccagagaatgtgtcactccctctcattgtgcactgttcatgtttttaaaagagcacatgcccatcatatgactgtgaagttttcctctttgtctctgacattcagctgaaagcccctgaagggacttgaccatatcttattcctctttgttttcctagggatgttgtagttgggcacatagtagagctcacaaaatgttgctgaacatagtgcaccattgacacaacataattccagatttctaactttgatttctgaaaggtaaacattgctacaatgtattaaccacacagaagactcaaacaaacccaacccccttccaaacaaagcaggtttgtttgttttttgttagggcacccacttctacaaacaaatttctggccccaggataacacaaagagccagagtaggatttcaagcagaactgtgttttcagttgatgtgtcagtcccctgagagtcatgtggaaaaaaaaaaaaagaaaaaattcaaggtccaggttatttccaccactcctgggaaaccaggcctggagagctctctagggaaagaggtatgtctgctctgggcttttgcaaccttattttataattcactttcttatctactgcttcacaaaaccaaagggaaataggtacaaactgtatcgacaaaagatcagaactgaattctcaatggcaaaggcaagtgtacattataaatagcaaaacagctggcttggaccatgttgccggccagtcacccagttgagggatttgaatgacatcataaccctcgagagggtattgctagccagctggtgttatttagaatacacaaaaatcagagaaagaaaacacactctggcacacagactccctctgtcatacacacacacacacacacacacacacacacacacacacacaggtttgagttatatggaaaattcaaacaacaggaaaattgtttgccccccaggtacccttctcccagagtggtggggtggggaggggacagtgacaggcagcctagtagaagaataaagaaaaatgttctatttcagttgggttttacagctcggcatagtctttgcctcatcgcaggagaaaaagtatgagacagtgccctaaagggaccaatccaatgctgcctgcccctccataggttctaggaaatgagatcacacctctcacttggcaactgggacaaggggtcacccgagtgctgtcttccaatctactttaccccagtcacttcagggttaaaattgtagagtttgctggagagggtcttatcgtcctttctttctttttttgttttaaataatgcatttgctctagaatctaaaattgctctcccatcccccatattcctttaatactggtaaggtgtattagcagacgtttgtgtcttcatgcccagcagaaagttaatcagaaaacagatccttattttctatggcagcataagtattttaatgtctgcgaaccctgtcactaacacacattcttttaagggaaaaaaatgcttctgtgctctagttttaaaatgcaaaggtatgatgttatttgtcaccatgcccaaaaaagtccttactcaataactttgccagaagagggagagagagagaaggcaaatgttcccccagctgtttcctgtctacagtgtctgtgttttgtagataaatgtgaggattttctctaaatccctcttctgtttgctaaatctcactgtcactgctaaattcagagcagatagagcctgcgcaatggaataaagtcctcaaaattgaaatgtgacattgctctcaacatctcccatctctctggatttctttttgcttcattattcctgctaaccaattcattttcagactt

SEQ ID NO: 10317 - DNA, 2300 bp, Homo sapien
tcatggagctgcagcattaccagacttgtagatcataatcttcaaaaagtcagcatttgctttattgctaaagacatttcttgaaatgatctgtctctgtgtccccgaacaaatcacattttgaatccaaattgtaatccccacaagttgggggagagatctcatggaaggtgattagatcatggcggcagttcccccatgctgttctcatgatagtgagtgagttctcatgagatccgatagttttataacgggttttcccccgctttgctctgcacttctctcttcttccaccatgtgaagaaggacgtgtttgcttccccttctgccatgattgttaatttcctgaggcctccccagccatgcagaactatgagtcaattaaatctctttcctctataaatcacccagtctcaggcagttccttttagcagcgagaacagattaagacacttctttcagctgggggtgttccgcagtgcacgttttatgaaatagttaacactttaacataaacaacattgatttaaaaaaaatagatcatgctacagacaggttgttttactaaggaaccagcataagaaagcatgacttcactttgctgcccaattttaaggtaattttggtgagatctgggaggctttttgtgtttccaggagcaggaagtggagaacaatttttaacacaaaagtcgctggcactgtggccatttcaccctttgagcacactgcagcctacagaaaaagccaatttggaggtagaatcaaaaattcttgcaaaatagggcaagacaaaccagtccttcaaatatgaggaagtgaaaagaaagcaccctattgctccaggaatactgctccatccccactcattaaaggattgtaaaataaaagttgccaaaatctgccaccaggtgtatagtttgaggagggggaaagataatccgttaatatacaaggttttaaaactcaaattattgcacttttcgggcttaattccacaagtttttaattgaaaataaaataaatattttatttgggctcagtgaaagactagacacattaaaatgattactgcaagggcgatgcagcagaacctctattgctccaccctgtggagttgatttaggatattagtctttttgcctaagcaccgctggattcctcgacctccttttctcttccctccccaggaactctccaacctgaaaaggaacgccttccactcatcagtcctggcttagaaccagcttagctggaaccagaaacatgctccattcatttcaagagattcaaccctcatcgttccaaaaatttagtttatatttgatgaacttaaagtggcatcccgtcaacatacaggcggggacggtgggtttaaaaccagtcccatccccagtttgcctcagaatccccaaggccagcaggactgcctagagatcaggagtgaagctgggaatgaccatttggctactgcagccctcaccttgcgcttttccacctagatttgtttgtggggcaggggagagaactggagagaagtggggcggtggtggacaaattctgggggataggtgaaaagagaacatgagacgtatccgaataaagttttctacgtcctcaaagagaaatggcactgacggagaaaccgaaaagaaaccttcagattctcaccagcggtgatttgcgctgcaaagggcgcagaaacgcggctctcagaccttgcctgcgcgtgggttaattaaaaccaatccaggttctgcagcccccgactcctccctgcggtttagcagaaggtaggcgggctgccccaacccttaaatacccacgggtcgacgccggccagaaccacggacagctcccgccctgtggcccatgtgtcctcccagcgctgtgcggtctgcagtttcacccggaggacaaggagtgtggctgcagatcgggtcggcctgcccttgctctgcttcttccccacccacacttggtgggtgtcttctaggctgtccagccttgaactaagcaccccaagaggagtcagagcccgagagatgagaaaggggcgcccgatgaagatctaggtccgtccctctctgggagctcagctactgcgcccgagaggcagcgctcagacagcggggaggaggcggccgcggagcccccggagatggagggtgaaggcctgctttcaaagtatcccacgtcgttcaggtaccacttcctttgagaactcttgtttgctcacaaatgagagagagagaccagagacgtatgagaggcctcactgtacagtgaaactgaggtttc

SEQ ID NO: 10318 - DNA, 2300 bp, Homo sapien
caaacatcacatattctcactcatatgtggggtctaaaaatcaaaacaatctgattcatggagctagagagtagagagctaattaccagaggtggggaagggtagtaggggcctggaggggaggtggagatggttaataggtacaaaaaaatatagaaagaatgaataagacctagtatttgatagtacaacagggcgaatatagtcaaaataatttaattatacatttaaaaatacctgaaagagtataattggcttgtttgcaacacaaaagataaatgcttgaggggatggatgccccattttcaatgatgtgattattacacattgcatgcctgtatcaaaatattgcacatactccatgaatgcatacatctactatgttcccacaaaaattaaacattagaaaaaagagttgcattttcagctgttatggggagaagaaagaaaagctatcattttgttgtcctaaaaattatgttgtcctcatttcaaacaggaaagcaaaagtatttgagagccagtgcagtgccttggtgttgggtgaaacatagattgaatttgggccatttgtttaaacttcctaggcctcagtttcttgcctattaaaagggagtgcatagttcatgggattgttaagaggaagaagtgaaaccatgcacgtggagagcgtggcacagtgtctaagacagagtgtgcatgcaaataagtagataatattctttgcttttctttattgcatgcctgtaatatttttggagttgtcacattcattgccctcaagtagcatcaagggatgaaattatgtttgtaagaaaatcctgaggctgaggaatacaacatgttttatgtctactacactgaaaaatgccggagtcagataaagaatacagattctcctgaggatggaaatcaagatcttcgccttcaatatttaacaacattgagcttccaacttactatgggaaatattcatcaggcccctaaaggttccttttggacagaaattgcacttgttatatctgtattcttagcagacagtagacagcctggcacatcataaaggcttaaggaatcctaaatatcccttaaaattctcattttaaagacaaaaacaaaacaaaaaaaaaaaacaaaaaaaaactgaggcatgggcttgaccaaatcagtggtagaaccaagagttaaaccacttgttttgaatcctaaacctgagttttattttacttatttatttatttatttgtttatttattttcagatgcttggtcaaagaacagtgggaggagagggatgggcttccagcaacctttattattggcttattttcttacagcccattactttctcttgggaaaatattaagcaggcactcaaggcttgaggcccctgagttttcacatcctttctgaacctctgaacctgctttccagcattcttttatactttgttttacctcctggtcagtaatgcctcaccctcagtcttctctaaaagtgtggttaatggcatcttcctgactatttgaagaccactggccaaatcccaccagctcactcatagaccatccccctactttactttcttcaaaagacttagccctacctaaacttatttatatgtttattttctgcccaccagaatggcagcatagctggggaggcagagtctgttttgttcattgctgtattcccaaagactagaacaccaccaagcacacggtacaggtctcagtaattattgtcaaatttatgtggatttgcttttaaacaatatcttccatttactgagtgtttatgtggaagaactgtactaaattttaatgcatttctttattcctattcttaaaaccttccagcaaggtggctctaccaccctcttttccgagcttcaggagcagttgtgcgaatagctggagaacaccaggctggatttaaacccagatcgctcttacatttgctctttacctgctgtgctcagcgttcacgtgccctctagctgtagttttctgaagtcagcgcacagcaaggcagtgtgcttagaggttaacagaagggaaaacaacaacaacaaaaatctaaatgagaatcctgactgtttcagctgggggtaaggggggcggattattcatataattgttataccagacggtcgcaggcttagtccaattgcagagaactcgcttcccaggcttctgagagtcccggaagtgcctaaacctgtctaatcgacggggcttgggtggcccgtcgctccctggcttcttccctttacccagggcgggcagcgaagtggtgcct

SEQ ID NO: 10319 - DNA, 2300 bp, Homo sapien
attaggacacagctgggtcatgtgggaggtgggtaaggagtgcctgaataattcctatttctgcaagtggtctgaggcttactctggctgggaggtgcagggtgcccaggctgtgttgtgactctgcttttgggtgctcacctcctatacttccagagacctcttaggccctttccttggtcagggatgtggagaaaggcctgaggtgtgaatcccacggggttcagccagtcctgtgaggccatcaagccacaggttaccatggggagaaggggctgtgtggctgggaaaggttacagaattgacctctgttggcacgatttggtcctatacctctgaagcctacctattctgcaaagatgaaactgaggtagagaagagaggtgattcacttcgggagccgcccgtcattactgcccaccatcatcactattgttccagaaacactcagccagcccacataccaagagcagctccctgggtcatccccttggccctttagaaagatccacctccacaaaggggagttcaattagaaccaattatccggataattcaccacaatcattcctgcacccagatctcggattatttctactggaaaatcaaatggatgattgccctccacttcgttctgcctatgtagacaagacctgagacatgccccagcctctctccggaccagatccttaaagagatggggcctattgcttggtctgctttctccgcagcgccgcgtccccagacgtcctgaagctggacggggttctggccagagagcgccagggccgaaggcccaggaaggacgcctgggcaggcgctgtccaagcggtcgagcgacggctgcaagcgcctccccctccctctcggcgccagcacgcggccccgccgggctccgctcccagtcgcctgccaccgggccgccgggcacacgcctggggcgggatggtggctgcgccaaggccgccgaggtgcccgcggcggcgccgaagaaccaggaatccccaccagtgccctaagcgccatcactcaacccccgccccgcatctttcttctccgagggtctgggagtatcccagagcactcccttctttatgatatccgctaagctggtccggaaataatctttatggggagggggtggcggtagggggcgatggtacagggggccagaggtcatcctagggggacgtccctgccatatacacccacctacaggacggctcacaaccactcctcggtgtcgcttccccgcggccccccacacacttgctcagttatggggagcacatcctagtttttagagctgaatgggacattagagaccatattctgtggctgcagacgaggaagcgaaggctcagagaggatgccacttcgaggagccacagagcattgagaggacgccttgggactagaacccacgttttcacatagtccagcactttttttcactgttctggacggagtccctcccccaaccatgtttctaaacttcaatcgtaatttgctccaatttctagggtcaccgaggaacccgaagagaataacagtgaggagagagagaaaacaggaaaagtcgagccccactccctcctcacctccacaccgttcctgtgccattttttctgcccaaacccttccctgcgctttgcttcaagttcttagtagaatccaagagagcttcaccccaagtctttccacctatacacctcaattcctagagccatttgtccctcctgtgacgccccccacccccttcctaaagccacccccggcagcagcccgccccgagcgcgccgcctgtttattcagccgggagtccggcacgcgccaggcgcacgcactgcaacaacaaacccagctgaatggagagtttgcaaggagcgggagaaaggaacgggagggggggagaggagaggaggagggggagtttagggagtgggtgggaggaagaggtaagaggaggggggggagtgggggctgcagccgctcgctgcagcagcggggagtggggggcgaggcggggccagggctgcgcgtggggctgggtgtcccattgaaaaggcggacgcactccggcagcccagcactctctcacttctggccagggaacgtggaaggcgcaccgacagggatccggccagggagggcgagtgaaagaaggaaatcagaaaggaagggagttaacaaaataataaaaacagcctgagccacggctggagagaccgagacccggcgcaagagagcgcagccttagtaggagaggaacgcgagacgcggcagagcgcgttcagcac

SEQ ID NO: 10320 - DNA, 2300 bp, Homo sapien
gaatagttttctctctttcttcttttttttttttgagatggagtctcgctctgtcacccaggctggagtgaagtggcgctgtctctgctcactgcaacctctgcctcacaggttcaagcgattctcctgcctcagcctcctgagtagctgggactatgggcgcgtgccaccacacccggctaattttttttattttgttttagtagagacgggatttcaccatgttagccaggatggtatcgatctccagacctagtgatccgcctgcctcggcctcccaaaatgttggaattataggcgtgagccaccgtgcccagccttttctttcttttaaaatctgtttgcaccacaaaagaatgagctctacagggatggggatctttgtttattttgcctgacacgtgataggtactcaaggattatttgctgaaattgatgaagagttctcatttctgtagtgaaaacagcagctgtaggaatggtaacagagtagacaaagggcattttcaggtgtttttggtgtgcaaagctgcacctctgtgatattgttggggttaagagagcactgggtatccatagccactagcagtacagtcttgggccagtcacttaccattttggggcttgctaccttatctatagataggagggttggactcagctcatcccttctctaagttggaatgatgccatgattctatgtatttaggagtaccttgtagattgaagggcatgtcttctcagaactctcaactttaatttatggaagtcataattaaagtaaaatggtgggtagaattttatatttggagcaagtttatacatacaaaccttttccccttcatctattatgtcaaagccatggatattttgatagttgacttttctctcttgcatatgaatgataaaaagaaagtgatacattagtggaactgtcattttctgtgtggtcacagcaaatttaaaaaaatgcattttaatcataaaattagcctgattcatggtgtttctatctagaaattataaaaggatgagagaaattttactcgatgatcacgagactttagctggaaaagatgaacatagggtcaatagtacaaacttacttttttttttaaagaaataaatgcagaaaatgggtttgagttgctaagtcagagaaaggctgttggcttcccaagagttgctagacctttgaatgagatctaacaagactcaagagtctttaaaaacaagctgctttttttttttttttcccggctagaaatattttagatgtgggtgtgtggggtggtggggagggtgtccatcctgggactcaggtgtgaatgtccactttcttttggtcctgtgattctgcagaagagtgttcagtaattagctagcccagaaaaaatatttatatattatgagttgtgatgaagacttaacaactctttggttctgtgcagcctatggacagcttatgggcaggaattagggggtgttaaccagtcctttgttgaagtgtgtggactcctcaggcagatgagaacgacctttgttggcacagctaaatgtccttgaccagtcggaggtgggatagagatgaggaagagcagagagtaaaattcctcagaagtttctaaaccaactagcatgactttggattaaaagtatccccaaatggccactgtccccatctacagccttgctctgccccctgctgttggctgcattattcctggatgcactactcctctattcaaaatggtttacaattcgaggcagatgagtaggtggaagggggaatttcaggatttctggggattactacctccagaagtaccccctccgtggaaaatcaacccattttgataaacatcgggatcccccttgccgcccccggaagaacaggtgccattcatattctgatgtcgaaggcttccccagtgcttggagtcgtgcacaggccacagtgtcagatgagaggtgtgaaagttttctgtgactttggtggcagtcgcgggggagggtctcacggcaaggcagccccattgtggttgcccggcgactgcggagcgcttggaaccacgctgcgccgcgtccccaggacccagcagagtgctccagctcccgcggaggaggctgcgggcggcgccccgggatagggaccctgcagctccaggtagacgcagggagcgcgggactcgccccctggcagggtgaggtagagccggaccgtttgctctctgctgctccccgggactccagccgcgcccgtgagaagaggcagcacggcagcaaaggccaaggagcgg

SEQ ID NO: 10321 - DNA, 2300 bp, Homo sapien
ggtcccttaaattgccactcaggtagctctggatgataatgtacctatagcactctcttctctttcccagatcagtcctgaaccacttctgctgcatcattctatattccacattcagaccactcacagtacccaccttggactgctcacaaccttggaattatttcctctctgtatgacttggccttcagtcttaatcccaaagctcaatttaatgaacttcactatggctcagactctccatctggacagaatgcctctagtttatgaatagagacaactaatattagttgagcactttctatatttcagatattaagtgggtggtttttatgcattattttgccttcatgataaccctgagagaagtttaaacactgagagaaagtatcctagggagatctgattagtgagggaagtcgccttgaggagatggggatgacgccaatcactgaagaataggtaggagttaaactggtgaccacatagccaaggaattgaatctcggaaactcagcatgtaatgattcaatactaacttctttaagtggcaaagtaaattatatagattttttgaaaatgaggttacagatttgtccttatggaaaaaccaatattgtctcattgagctcgagtgtctggacaaatggtcctgtcagtgttccctctgaaaggatccagggcacatcttccctaaggggatgataggatcaattctgttttttaattatcactccttttgtggttgcttttatgttgtgtgtaatttggttgcttagatgacaggttgaacaaaataaacacttagcagaaagaatatttcctgggaatcttaaaagatacaagaaaatggggaaaaatagaacctcagtcgcctgatggtgagaagttacaaaaagggtcaggtgttttgatggaagtcattgtagaaaaaaaatgaaagacgttgaagcttgaagatactaaaacttaatactttatcatctatattttccaactgaatgacaggggttaggacatgctgtcccaaaatatggcactttggcatataaaatgttttaagctgaaggaatttgagaaacagcaggtgaaggaaagattttctgaccctcccctaatgcaggctataaaaccctcacatgagaagtaccctccttatgcccagagaaaaggaacatctttgtctccaaagacacagggacacggagatgatgaacaggccttgctaagtttcctccactctattacccttagcttgtacctttatccaaccacattcttccatgactctccagtcttcatcaaacctggcataaaaacactcagacttaaccacttctttgggtcttcatttccttatgaaggctccagtgtcatataaaacttccattaaataaatgtatgtatgcttttcttttgttaatctgtcttttgttacagggtccccagccaaaaactcagtagggtcaaagcaaacagtatgtttccttcccatgtctaatgaggtagtcactggctacataatggctatttacatttaaactaaataaagattaaatttctcagtctcgctagccatatttcaagggctccgcagacatttgtggctagtagctaatgcattgaacagctcagatacagaacatttccattattgtagaaagttctattggaccgagctgagagctataactcagaaaagccctgaatagtgtcctactatacctgtacaaatacaatcttcaatcaggtcgtgattgtctaaatttaaatgtcttacatggaaattccatccaactcagtaaacattttattaaacaaccttctgtgtgccaggcattgaaccaacccctgagggaatagaaaaacaaattagacatggttactgccttcaagtagtttataagctagacagggggaaagatatgtgatctgcttcaggggctgaaagaacgcaggaggcttttccttaagcacgaagttcttccaaggcaggtattgtaaaaggtaccacattccaaactctccaatttcagtgtggaactgaaggtttccagaattctggagacaatgaaataagatttgcacactgtgacaacacaggtctctaacagcgaatccaagactgggatttttttaaagctctcttcccttccccaccttgagtgtacaatggagagtgctagtgtggtgtcacatggtgcaacatggctcagtgttgtgtgaaactaaggtaataggcttctcgtggcctatttcttcatttgtaaaatgagcaagttagacagtaagataatccac

SEQ ID NO: 10322 - DNA, 2300 bp, Homo sapien
tgccatgtgcgttataggcattttttaatgcaactaattgataaactctatgcacaggtctctgtggccactggcaggctaacctccacttctaggaactgaaaaatgaaataatctacctgctaaagtctaacatggcatttcccttagagacactgatagaacacagaatctggaggttgccaatataaatttgcaaaaacagaaagcaacccttagtctaaaaagcttgggaaatgctgccttaagcaaagttgaactgttttttgtttcatttggttgcgttgttttaaaggacttctcagaactttcaatggactaacaaacatggccaatccatgagaaagggacatgagagacaggcgtcccaaattatctggcgagagaattcttccccactacccctacagcattttccataactaaattgtatttaataaaacattatttaggaaatgctagtatgggctcattttattatttcacctggaattgagcctgttccaagccccagatttttatctacatcctttagaaagaaaagaatcagaaagaagcatccaatttatgtccctgttatattttttaaggtaacacagctgctgtaacagataaatatcaaagtctcactggcttcacacaatcataatccatttctcctcaagcaacagtccagcgcaagtgaaatcacccaggaagctttggaaaattctcctgtgcgccactcccaggcattctgatttggttattctggagtggagctaagcattaggccttttttttttttttttgagctccccacccaggtttctgggctggcctctgaggggcctatgttggaaaagtttcctagattatcggtcattataaatgttgtttcaaaagttgaaaggagtcggggggagagagagagagagagagagaaactttgtagagaaataaaggatcatttaaccaaaattagtatctgtaagtgcatgaatctcccatttaatttagtgtcatgagacatgccctggtttgttaataagtccaaaccttatccttcctggtgctgggtctgacacgtttccatcatggtttccaatagaattgagaataccatctattatttatttattcattaaatattgattgtttcagcagcagagggcagtggttgacagtactggctctggagccacatagtttgaatactagatttaccacctattagctgtgtggccttggataaattccttaacctctctgcctcagtttcctcctctgtaaaatgagaagaatcatcctgttttaccaagtactgtgagaattaaacaactaaatccatggagaggcctagaatagtgactagcatgtagtaagttttcaaaaagtgatggctactatccttaactgttttcattattttgaagtgcaggtctctgctctaggaatcaaggggtacagagaagatgaggctatattcttctgtcctcaaggcattcatagctgggcatgggagacagacagatagatgtgacctcggctttcatggctttatgtgcaaaattgtgggagcatcttcagggtcctgtggaggggcagcacaggaaggcttcctggaaggggtggctttagatctggaacttaaagggtaagattgaacctacaggctcagtcacttgttactgaagtggcatggaaaagaagaaagaatgagtcaaaaacccacctgtcagcatctgcaaggagactttttttgcagtagaggttatccagggtgaagccaccacctcctgcaaggtttctgcaacattcattccatacctgggaccgtgctcacttatgggcactcccccaaccccgctcgacagcaagcttggacctttgcattggcaccaaaaggcctgcagtgttccatggcgtggttgtggaaacattgacagggccgcagggcagcagtaggcaggactagaggagggggcagagtagaggagaggcaggaccgttctgagagcttcgcaggcacaaaaatcccgggccaagcctctgcctcagcccctgcaggatatcctgtcattcagcaggatatatagaccatttacagtggccaatttcaccaagactcctggatttgccatttttcctttctgaaggcaggtctcacctatctcctggttcgatctaggaaaaaggaaaggaagggatttaaaagtaaacagtgaaatgagaaagaattcactgggagtttatcaaactaagttaaaatagctaagtcagcctgacaggtgcttggcacagagaaggagcaaatattt

SEQ ID NO: 10323 - DNA, 2300 bp, Homo sapien
attaaaggaggttaattcaaactctatctaagtgtagcttttgttattactcaataaagaaccttctagtgctattttggttcatgatgatcaccaaatgaaaactcctggtaaaaatagaaatttcagttttctatactccactcaggtgcaggaaagagaaagggctaatcaaggaatcacaagaccagtaactcacagggtgaccttgggcaagtcactgcaacacccctcacctcagttttcttccagctaaaatgaggatgatgatacctgccctacttatcttcagagcagtgaagatcaaataagataatacctttgaatggatgcataaccaataatcgttctgaagatgtaaagtttctttttatgcaggctttatatatttcaatgaacttagaagcagtggtgacatttccaccacgaccaacctattattaggcccgtggatgagctgtgggataatacagaagcatgagacacaatcctgcccaagaagaagcctacctctttctgctctgtcctatggcctagagcaaacctgttcaaaaagcagggcctcaaaatgtgttggtaatgtcttttttgattggcaggtcctttctgccttcccaggaaatgcctggattagactccttgccctggaaaggtcaaggtttggggttcaagagatcctaccccttctctctactaactgctctatgctcagttttacctcagcatgttggcacagcatatttctaagagtttagcaaataagaatcaggtgtcttttaatggagtgcaaaaaccaacaaaatgtgctccactgggccagccacaggaagagtagaagttgagaaaaggaagaaaaatgaatgtggttttgtgaaagaggtggtgtgaaacagggtcttgaaggatatggttcagcagcccagtgagaacatggcagttaggagaggaaacaggcacaaaggtgagtgaagagttacagcagccagcattcaccacctgtgatacttcagacatttttgccaggaaatttgcacctgcttaagtgaccgtcatcatttaaaggtctcaataacctcaagagtggttattaatatctcctctttataggtgatggcaaagggtaagcaattcattcaagattgtacacttagcaagatatagagtttgactccaaacttaggtcttttgatccccaagtttagtctctctttgttgtacaaagctgctccatcttaagcttgatgaggaaatgaagaaaagttgaggaaagggaggcatctctcggggaggatcagcctcggcattatgagcaacaggggatcctaaagagtgccaaattgggtctggatcattcaatttagtagttacatatccaccaccttatgttgctaaataactgtttctagcacatctgatttccccaattcatttgtttaatcaacaaatattcactgagcactgctatgcatcagatactattttagggcttaggtacaacagtggacaaaacagagaaagatccctgctctctggaagcctacttttcagttggattgtaatctaaagattgcaaatatctctgaaatagtaactgtatcctccacggcactggcacagtgctggctccagagcagacattcctgtggaatcaatgatgaaagaacatccttgagatctgctgatctatgaccaattgaccttgaataacctgctttacaaatttttcacttgagagtgtattctgccatatatttcaggttccccacttggataaatgtgggtaataacattatcttaccttgctagatttcagactctatctcaggtatggcaaatgtatggtacaaacagtggctcttatttcacctacagccatggcagacattgcttattaatctcaatactctttccagataagattgaaaggagcaaaccagtcattaccaatcaaccttatcaccatccctgacgttccattgagatgattggagacattccagtggagaagattggccatgctagatgttttgcaagactctgataacaggaattaatgttcttttttttaatatttacacaggcaagaagatgtgataggaagtctcttcttacaattaggaccgagtgccgatcctgcgctctcaaccttggagtcaagtgcccggatggttacaccatgattaccagtggctctgtaggggttcgagattgcaggtactcatgagaaaataaacgtgatggaactatgaatccaacttgaagctccctgtctcaaaaactgcaaagcatttccatgactt

SEQ ID NO: 10324 - DNA, 2300 bp, Homo sapien
tatgtatatttttgacatatatttctaagctaacagctcgttgtggagtcagaccatcctgaagtccccacactccagcctaccaaccgtctgatctcagaaaacggctatttcttcacctataaaatgaagataatagtggtacctacattatagtttgctgacaggattaaattagaccataatttcgggcttttggcacagagcttgcactgagcaagtcatcaataagcaaagccgctcctcttactgtcgctactaactccacacatttcctatgaaacacacaacccttccgctctcctaccttatttgatcttcacaaataactctcaggatggatgggaaagcagagcacatcagggtcgaggctactgaaccctttccaatgttctttttgccaaattagattttcatattagaggaagaaaaaaatcagggtttatcccaaggcctgacaatgttggcatttgtctgaggccagccgggcaggacaccaaggctgggatggggcggtggccttccagctgtcacacctctcaatccagggctacggctgtgcacagtctcatacaggggtctcgtaccttgcaaattaaatgctgacttccctaaaattgtataacaattcttttttgctttaagtctggctgtgattttccaggcccgctcacttgtgttgttctctttcctggatgatggctccaagcacccacacgaattcctctcccatgagtcccttctggggtgaaactccagattcctttatttctgatcattttccaagcccccccagtccttgccaggtgcctttgaaaatctccatgtccttctttccactttcacatgcataggaacctgagtctgatgaggtggcccgtgttacaatttttaaatacctacaattgaaagcaaattcagcagctaaggtttaaaatgataacggtgatatggaaatgccagttcatataatgatctacggtgtttacacagtcacgaacggaaatggactttgaatcctggtttaagtttctgcctgggaatttagcagcaagttgggcaacttgcttcctctctctgggcctcagcttcctcatctgaaaaatgggggatataaaagtacctaccttctgggcctggtgactattaatgagatggtgcatgtggaaggctgacctagtgccttgaatgaagtcagtgcccaaatatcgcctattggttatcattggtttgatgtgatagagtgaaaaacaaacatattagctacttatcaggagtcctgccagcatgggagatcacttctatttattccagaatatcttcatgaaaggtgagaaatttccaggctaaactctccaaccaggaagtagttgaaaatggagttccttggcctctttcaaagcgtcacatcctcttccccacaccccacacacatatagataaaaaggagttcttttttctttttttttttatttgttttgtttttgagacagggtctcactctgttgaccaggctggagtacagaggtgcagtcatagctcactatagcttcaacctcctgggctcaagtgatcctcccacctctcggcctctgcagtaactgggaccacaagcacacaccatcatgcccggctaatttttgtgttttttgtagagacagggtttcaccatgttgcccaggcttgtctcaaactcctgggctcaagcaatcctcccacgtcagcttcccggtgtgctgggattacaggcatgagccaccatgctcagccttaaaggagttctgagaccaagttcttcccctcctgggtgggacaagcaagctctccagggctgtcccaggcactctgagaacacttgagactccaagaaatagcagcctaagtcttctcccggctcagccccgattctgctttgacaagagtgagtggggggtgagaagaggtggtccctgtcctccagggtgctctgcctcagtgcttggcttgtccccaaggcctggacggatgtccctcctcctcctctttcagaatgcctgtgcgttcacggaacatgcaataacaggatagacagcgatggggcctgcctcactggcacatgcagagacggctctgccgggagactctgtgataagcagacctcagcctgtgggccctacgtgcagttctgtcacatccacgccacctgtgaatacagcaatgggacagccaggtaggtctgtgagggaatggcccttaatgacgctgagtcattaagtgtaaggggatggcacttaatgacgctgtgttacctgtagacggag

SEQ ID NO: 10325 - DNA, 2300 bp, Homo sapien
catggtgacatttttattttcttctaatacccagtataacaaaggtatgacataggaaaaaaagaataatgagaaatgggattgtaagctaccctgcaattttcagttaccatattaggatcttcatttaaaatgaaagttgcaagttggaatttagggtacattgggaacttttgtaagatggaagatcagaaaaaaataacaattaattgtgttttaattaaaattgttctcagttgggcacggtggctcactcttgtaattccagcactttgggaggccgaggcgggcggatcacaaggtcaagagatcgaaaccatcctggccaacatggtgaagccccctctctactaaaaaaaaaaaaaaagtacaagatggctgttaattgattcagttatctgtgtagcctctgggctgcaggcgctccctaaggagctccttctctatctgtcaattggcatcaagggcatctttgtcagggccaccattgtgccctgcataaaggtgcctggccagagtggaggctagctaaatcccagcccacttcactccccatgctgtgcacccctgtttggggttgcaaactcctagagaaaggagtgtctttttcttgattttcagtggccctcatcactgcctattgttatgtgacatagacatagaaccatcaagttctatcaggccttctcctcatagctcttgaatctgccaaatcccgtctaatcaccttaagcccctcctcccccttcagctccaacaactcagaaatgtgtctgtcttcctccaacacaggggttggtacaacgtttctggaaaaagccagatacaattattagactttgcaggtcacatggtctccatcatagctgttcaactctgccaccgtagtgcaaaaacagacttagacaatatgtaaacaaatttgcatggctgtattccaacaaaattttatttttaagtacaagcagcagactggattgggctttctactgtagtatgctgtgagctcatttagggcagaacccagacctcagtcacacttgtatacccactgcctggcctgtagtaggcaagcaataaatgttggaaaaatactgattagattagaaaaacattccagtgttgaattcttcaatctgacaaagttctaggtagaatgcaaaggtgaaaatagtgatcttggccagaaggttaattatgcagagcttgcaaactcaaatgcccagatagatcagatggataacaaaatgagtaaggagtatgtcccaagtagaagacattagggagtggtggagcctataatgaaagtggctgctgctactctctgcagctgtgtgtctgcagaaattcagactgattttttttaaaggcaatctaaatttatatgtaaaaatgtcctattattacatagcacaagccaaacaaaacatttttacaagccagattcaggccactgggttgcagtagatttgagacttcagagaaaataaatggagaacctaaagaataaacacacgaataacaaccaagaagaaaggattagatattagctgcaacctgctgtgtttcacctcgatttggtctaaggtcttctctgacaaggtagattaatgcgagctggaattaattacttaggagaagctgaaagtctttcgtgcaagaagaacttttctctaatcaaggaggtttaacggtaaggcataaaattgaatgactaacatctccaactctgctccagccttgtcatgctgtatcctggaatatttttatactgtgagtaatcttcaaaaggttgtcaatgtcaatccattgaactgtctaaagaggttaatggcattagactctcctatgtatcgaaaagcagtaggtcctaccaaaacatgctaacaggattctggggtttcttttttcaggtgctggtcccacaaagacgtctaactggctccttaccaaacctgctcatgcggctggaacagatgcctgactattccatcttccggggctacatcattgcaagtaccacattctctgcctgaccaccatgctcaggttacccaggaacaggaatccctcatgcactcttgtctctttccatcgcagcaatataatctggcgaatgcaattgaggctgccgatgcctacacagtgtttgctccaaacaacaatgccatcgagaattacatcagggagaagaaagtcttgtctctagtaagtgtcaagaactataactagggaagttattttgtgaaaattcaaacactcagtgtttgtaatccattagttgtgtgccatttcactcc

SEQ ID NO: 10326 - DNA, 2300 bp, Homo sapien
ccagagtgttgtattttggtgaccatatatacagtgacctggcggtgaggggcccttttttcctttgttgggggacagatgtgttagtctcacttactaaagaatgtatcttttatttaaggatgtaccttttatttaagaatatatcttttatttaaggtcatctttatgctttcataaaacctaaaagtaggctgcatttttttaatgtcttttttttttttttaacagaacaggatggatcagagttgtgaaaaagataaatattttttggaaatgatggaaataagttcactcagagtttatcagaataatctttccatttaaataataagaaataaatgccattgttctttttcctttcatcgatgcatcaaaaaacataaaatccacctttgaaagtttgccaccgttgggaatatttaaaagaatgtgctgtaggttttcatgtattattaggaggaagagaaatattcaaaggcttcaagaaactgaaccagtgggctgggcatggtggctcacacctgtagtcctagcactttgggaggccgaggtgggtggattacttaagctcaggagtttgagatcaacctgggcagcgttgtgaaaccctgtctctactaaaaatacaaaaattatctgggcgtggtagcacacgcctgtaatcccagctactggggaggctgaggcaggagaattgcttgaacctgggaggtggaaactgcagtgagctgagatcatgccattgcactctagcctaggcgacagagtgagaccctgcctcaaaaaaaaaaaaaaaaaaatcaaaccagtgaggaaggtgggcatcctaagccctcttagactcttgcataggacttaggattctggctttagctgagtagccagactgaacctttaaaactataaatcagctaccacttcttttaaaacctgaaagcctttctttctctctgagtaaaagcctgagttcctatggttgcccactggatttccccttccccagcccacctctgaagacatcctctgcctctgccccctgttttgtctcttctaggttccctgacttgttgcttcttaacatgccaccctccagcatgttcctgccccagggcctttgcacttgctgttcttcagccagaatctttctgtttccacatattttcatactttcccccaccttgtccttgtattagcctggtcttcctaactaccctgtataaaatggaaacctccttgcttcctctccttatcctgttattctgcttgatttttgtcccttgtacttatccccacctgccattgtgtattttacttatttattgtctgtattttccacgagggctgggatttctcagtttttttgtgcattgttttatcctcagtatttagggcctggcaaatagtagtgcttgataaatatttgccaaataagaaaatgcacatttagtatgatgactatatgtcttagattttccaggacatagctgatactagatattctggcctgttgtcaaatatggggtgacagcatttggaatggaaaatgtgatcatgcatgcttatgttgtatgtgatcattccaaatctgagattccatggttctccataacccagagggcctggcacacacaggtctgtggatgaattgaatgaagacctttggtagcatttaggtcaagcccctttctgcccctgacctcatttttttttttttttttttttttttttttacagaccatggttaatgattccagacctagtgtttctgcaggggttgtgactcacggcaattatttccagaactgaaactttcttggaatgaaatgatcaaaggctggggccaaataggttttaattaaatgtaattcattgaattcagcttggtgaataactaaccattaccatcaaaaagtaattaaatgaatgcctctcatgtctgggaaaataatgacatagtttagattctgttgagactgacgttgacttttcgtgatctttgtgatcaggatttgaccctaaagcatggctggaggactggtgcaatcatcccagagttgagatctgagctcaaaatcatgaacacggagcaatacattcaaaccatgacctggctgcagaccttgactggcttattggaacagatgcaggtttggatatattatttttctctctcactttttctttaagcctgaggttagaaagttacttcaggtattttctgcttaattgttataaaatatgaggcttaagttgttttcagtagactgtagaataacgattggggttcttttgcctag

SEQ ID NO: 10327 - DNA, 2300 bp, Homo sapien
gggccagttgtagcctgatgtctctttttgtatgttaagttttattggaacatagccacacccatttgtttctggttctccttttgtgctaggatgtcagagctgagcagttgcaacagagactatatgcagagccccaaatatttactaactgaccctttatagaaaacatgtgttgtctgctgaactagaactacagaaatatacctacatgggtgactctcactagaataattttgagtaaaaaggaaaaagcaagtattgcaggcatataccaattacaaaaggttttaaaacacataaaaatactatagattacttgtagggacacacatgtatgtggtaaaagtctagagaaatgcaggagaggccgggttcagtggcttacgcttgtaatcccagcacttgggaaggccaaagtgggcagatcacttgaggccaggagttcaagaccagcctggccaacatggtgaaaccctgtctctactaaaaatacgaaaattaactgggcatggtggtgcatacctgtaatcccagctacttgggaggccgaggcaggaggatcacttgaaactgtgtggcagagtgttgcagtgagctgagatcacaccactgcactccagcctgggcaacagagtgagactccgtctccaaaaaaaaaaaataaaaagaaagaaaaaatgcaggagagtggtaaacaccgaaatctgggtagtggtaatgtcagaggcaggaggagcctgcaggtgagggtggaagggattttatatcccacttggatggtagggatgtgggtgttctttgtattatcttgacctttctttatgtcttagaaatagcaggatatattctttaaaagtcttccccatagtttaggcatatgatgttgatcctgtggtcgtacaagaaagtagtaaaaagatttaagggagaaacatgccacatcataactttcacattttcagataggaaagaaatgcctaaaataggagaacctaagactctggccagtggaggggcctctggaggtcatagagttcagtcctctgctggaagaaggaatccctttttccatagactttattagtggccatctggcatctgtttgagcttgttgtgtgatcacaaggctgcccattttattttggatggctgagtcacagagagtacttttgattccccttccatatgatagtcgcttaaatatgaaggtggtgatcatgcatcatcactgcaactcacctttgatttgatcattttggaagctcaactttgctttcactctagtttgtcagtatccctttgaaagtgaaccatttgttcctgaccatgtgtggtctgactggttcatggtggagggaagcaactggctcttccttggtgaacaaacactgtacttctgtaactttaaaagttaattcgtgttcagtttgtggtcagccaaatcctgactttgtccttcttgtattgacatgatgtaattttagagaaggaaaacaaaagctttaaaaaaatcttctttgcaaataagtacttagaagacaatgatagaattctattattttttaaaagtcaaatactacatgttatatctaggagaatgcagagagaaagagaggctagctgattgatcaagctgggttttataggaaatttttatactttaaaggattggtccttaatttgagtaactctttttcacttcactagggttttgaggaactgtttcatgataagttaattgataagataatgatgtataaacctgaatataattttaatttgtatgtagagatgcaactctctgcatagactgtaatattttgttctcattcgagcagaaaaatctacttgagaaacactactagtgaatattaatccttagctaaggtagcagacctttcaaatgttttgccctcagtactcttttatacactttaaattattgaagatcctagagtttcggtttatagattagtctcaagtagacttttaaataatgtattctgcccttatgttgatagtgattgtattagaaattaaaacccagagaattttaagatatgtatttattgattcatttaattaatttattttttaaataaattcccgggctgaatttatttaaaattctgactctgactcccaggctgaagtgcaatggcatgatcacagctcactgtaacctccatctcctgggttcaagcaattctcctgcctcagcttcccgagtagctgggattacatgtgtgttctaccacacccagctaattttttgtatttatagtagagacagggtt

SEQ ID NO: 10328 - DNA, 2300 bp, Homo sapien
caaccaggccggagtacagtgttgcaatctcaactcactgcagtctcaaccttccaggctcaagcgatcctccccaactcaagcctcccaagtagctgggaccacaggtgtgagccacgacgcctgcctaaattttgcatttttttgtagagattgggttttcctttgttgcccaggctggtcctgggctcaagagatctgcctgcttcaacctcccaaagtgctgggattacaggcgtgagctcacacctggcccctctattaattcttaaactgcatgtaaatatacaattatctcaataagaattacaagttaaaaaaaaaactttcctgcccaaaagctgggtttgataatcttctatattcctttcatctcttaagacctgcaaaattcccaatgtctccaaagccagtcttctttccaccataccacacaacagcttcaaaagccaaagcaaaattaactcttggcaaagggaaactaagaaagtaagccaccatttcatagaattctgcattgctagtcattttacgtcccctctgaaaatcactccaatttgcttttttcattaaactgacttctggccaaaaaaaatggaaaatgtgatcctataaaacgttcttgctcaccaaataatctctccctatctatgtgccacctccacaacaagaagtaaccaatatacaaatttcggttctgaatcctccttggaagcaacagcgacaatggattattggttcccaaatggtcaacggagcacaggaaacaggacagtgggttaggagctgagacagtccctaaattcaggcgtcaccttggccaggtcatttaaacctgagtctcgcctttcccatctatagaatggggatgtggaacctccttcgtagattacaggaacgatttagagataatctacgtgcccggcactggtatttattagttcattagtagtaacaaccgagccaagctcattttatgtgcacctggccatgaagttcccattcacagccttagaatcccctcctcaccgaggttaatggataacccagaaccttccccacctggacctctcctctttcaaacaccgcacagctcatctcatctcatctcatctcatctcatctcatctcatctcattccatcccattccatcccatcccatcccatcccatcccaacccacccccaccaaaaggaaaacagaccagcctcgggatcggccacctccccagcagccccgctcttgggcatctctgcgccagcccgactcggctgttactattattactattgatgagtaacaacacctaacggtgcgtgggagtggccggctcccaagggaggcctgaggaaccccagccccgcgcggcccaaagcccctcagatgcagatttcgggctaaaaatcccaagaatatatacaacagctttcccgaccggggaaaggcgcgagttgtgaagtttctagagcgcatttttccccgtttccccgagtcgctccgcaggagcgatgctgcctgcggctgggggtgtgggcaccggggttcgcgactggaggccctggaggtccgcagctgggctggtccgggtcctagggcgcccgcttcccagctgagcgcgcaggaggggccccaggcgccggggcggggtcgccgcctcactcaccttctgtgcttctcttcgcctcccggtagcgctcccacaggtagcgcttcatgtccggggcggtcccgggtgcagtgcacaagggccgggcggggcccgcacacggccgcccccgagccgcggtcccgcagccaccccgcaaagccgccgctgtcgctgccctcgccccggccccgcgtgccaccaccgccgccgctgccatggtcatgcctgctgcctgctgccgccaccgccgccgcgccgctctgcgactgctgctgcccggcccaagatctacccgcgctctgccctgcaggagggcagctcctgcgtcggaacacgtggcggcgcaggcctgccctcccgccgctgcggggcggggagtgggcggagccggaggcggggtctaacgggggcggggtcgatggggagtgggcgggtctgggacgggggcggagacggggcggggcggggccgggccgggggccccacgcccagcctgctgcggtcaatttcagggtggcgcgggggtggccgtgtggtgtggtggcgcgcaggccacatgggatggaatgatgaggtacgaccccagcgccgcccgcccagctccgccgcaccttcgtcctgccttctgggactgacccccagctctggcca

SEQ ID NO: 10329 - DNA, 2300 bp, Homo sapien
atcctccccaactcaagcctcccaagtagctgggaccacaggtgtgagccacgacgcctgcctaaattttgcatttttttgtagagattgggttttcctttgttgcccaggctggtcctgggctcaagagatctgcctgcttcaacctcccaaagtgctgggattacaggcgtgagctcacacctggcccctctattaattcttaaactgcatgtaaatatacaattatctcaataagaattacaagttaaaaaaaaaactttcctgcccaaaagctgggtttgataatcttctatattcctttcatctcttaagacctgcaaaattcccaatgtctccaaagccagtcttctttccaccataccacacaacagcttcaaaagccaaagcaaaattaactcttggcaaagggaaactaagaaagtaagccaccatttcatagaattctgcattgctagtcattttacgtcccctctgaaaatcactccaatttgcttttttcattaaactgacttctggccaaaaaaaatggaaaatgtgatcctataaaacgttcttgctcaccaaataatctctccctatctatgtgccacctccacaacaagaagtaaccaatatacaaatttcggttctgaatcctccttggaagcaacagcgacaatggattattggttcccaaatggtcaacggagcacaggaaacaggacagtgggttaggagctgagacagtccctaaattcaggcgtcaccttggccaggtcatttaaacctgagtctcgcctttcccatctatagaatggggatgtggaacctccttcgtagattacaggaacgatttagagataatctacgtgcccggcactggtatttattagttcattagtagtaacaaccgagccaagctcattttatgtgcacctggccatgaagttcccattcacagccttagaatcccctcctcaccgaggttaatggataacccagaaccttccccacctggacctctcctctttcaaacaccgcacagctcatctcatctcatctcatctcatctcatctcatctcatctcattccatcccattccatcccatcccatcccatcccatcccaacccacccccaccaaaaggaaaacagaccagcctcgggatcggccacctccccagcagccccgctcttgggcatctctgcgccagcccgactcggctgttactattattactattgatgagtaacaacacctaacggtgcgtgggagtggccggctcccaagggaggcctgaggaaccccagccccgcgcggcccaaagcccctcagatgcagatttcgggctaaaaatcccaagaatatatacaacagctttcccgaccggggaaaggcgcgagttgtgaagtttctagagcgcatttttccccgtttccccgagtcgctccgcaggagcgatgctgcctgcggctgggggtgtgggcaccggggttcgcgactggaggccctggaggtccgcagctgggctggtccgggtcctagggcgcccgcttcccagctgagcgcgcaggaggggccccaggcgccggggcggggtcgccgcctcactcaccttctgtgcttctcttcgcctcccggtagcgctcccacaggtagcgcttcatgtccggggcggtcccgggtgcagtgcacaagggccgggcggggcccgcacacggccgcccccgagccgcggtcccgcagccaccccgcaaagccgccgctgtcgctgccctcgccccggccccgcgtgccaccaccgccgccgctgccatggtcatgcctgctgcctgctgccgccaccgccgccgcgccgctctgcgactgctgctgcccggcccaagatctacccgcgctctgccctgcaggagggcagctcctgcgtcggaacacgtggcggcgcaggcctgccctcccgccgctgcggggcggggagtgggcggagccggaggcggggtctaacgggggcggggtcgatggggagtgggcgggtctgggacgggggcggagacggggcggggcggggccgggccgggggccccacgcccagcctgctgcggtcaatttcagggtggcgcgggggtggccgtgtggtgtggtggcgcgcaggccacatgggatggaatgatgaggtacgaccccagcgccgcccgcccagctccgccgcaccttcgtcctgccttctgggactgacccccagctctggccacaaggacagcgcccctcccaccccagctgctctggccccggccctagaaggtgacctctctccgca

SEQ ID NO: 10330 - DNA, 2300 bp, Homo sapien
cgtgtatttgatatcatatgttttaaacattttattgtctcattttatcagtgatttgtaaaacattaaccattaactgttaaggattacttattggctactttcttccctgtcacccacctaaatcctacatactatatgttagcaggccaaatggaagaatgggttcagttgtgtggttttaggaaagttatttcatctttcttggcctcggtttcattactgtcagccttctgtatctgcaggtttgcattcgtgaattcaaccaaccatggataaaaatattagaaaaaaaatcaacaatgaaaagtaatacaaatagaaaatacagtatcacaactatttacagagcatttatattgtattaggtatgaaaagtaattgaggcctggtgcattggcttgcacctgtaatcccagcactttgggaggccaaggtgggcggattgcttgagtccaggagttcgagacaagcctgggcaacatggcgagaccccgtctctacaaaaaaatacaaaaattagctggtcatagtagttcacgcctgtaatgtcagctactcaggaggctgaggtgggaggatcgcttaagcagaggaggtcgaggctgcagtgcactgcgatcataccactgcacaccagcctgggtgacagagaaagactctgtcttaaaaaaaaaaaaagtaaacgagatggtttaaaatatatagaagtatgtgtgaacgcaaatactagccattttatataaaggacttgagcatcgcagattttggtatgtaggtatggggcaggtgttctggaaccgattctcggcaggtatagagggattgactatattataaaattggagaaattatggagtctgcttttcaggattactgagaggattacatgagatactgcatacagcaagccttcaataaatggtagtttaaacccagatgccacctttttccatgaaacacctccagacccctccatcccacaactggagcatacactaatgccttgggttatttgtcttaaactgtgttccacccatttcacacaagccagtatggtctccttggcagagtgccagccttgagggccattccccctactccacctgctcaaaattaagtaaccacaggacagcttgggaagtccttgctgcccggcgattttcagcagggttctggctgggccacatcagtctttcctgcagaagctctgtctgactcagtccacacagaattgcccccaggcagggaggttgcggttcatttggctttagtggaaccacaggcacaggacgggtggagcctagcaggtttgagagaagacctgtgcaccgagccgttagcgtgggcaggggcaggagctgggtgaccatgttccaatgacctctgccgccaggcggaaacctaggcggggggcgggcattggccttccaggctgtgtaatgggagggcccttcaaacttactgaggtcttaaggggctgggatcctccagccgacatcagcccatgagtggaacctcggcccagccacccactcacaggtcctcctggataaatttaagctggggatcggggacgtctcagaggggccccacgatccaggggaggtccagactgccattaattagactgccagaggccattaatgcggagagaggtcaccttctagggccggggccagagcagctggggtgggaggggcgctgtccttgtggccagagctgggggtcagtcccagaaggcaggacgaaggtgcggcggagctgggcgggcggcgctggggtcgtacctcatcattccatcccatgtggcctgcgcgccaccacaccacacggccacccccgcgccaccctgaaattgaccgcagcaggctgggcgtggggcccccggcccggccccgccccgccccgtctccgcccccgtcccagacccgcccactccccatcgaccccgcccccgttagaccccgcctccggctccgcccactccccgccccgcagcggcgggagggcaggcctgcgccgccacgtgttccgacgcaggagctgccctcctgcagggcagagcgcgggtagatcttgggccgggcagcagcagtcgcagagcggcgcggcggcggtggcggcagcaggcagcaggcatgaccatggcagcggcggcggtggtggcacgcggggccggggcgagggcagcgacagcggcggctttgcggggtggctgcgggaccgcggctcgggggcggccgtgtgcgggccccgcccggcccttgtgcactgcacccgggaccgccccggacatg

SEQ ID NO: 10331 - DNA, 2300 bp, Homo sapien
aagggactgttaacatggtcaagtaagaaggtgcataaagcacttcacataatgtctggcacacagtaagatcttaagtatggtagctattttgttgttactgtctttgagtaatgaagcaaatgaggcctaggtgagaaatataagggagtttgatttaagcttttaagagaacttcccacttcagagtgctccttctggaggcatcaatcttatgattctatcttcaaaatatttttgcagcagttctttgggactagccaccatgaagactattaaaagaatgtttttaggctctgaaggcacttccaaaagaggttttatgactattttgggcaataacaacttatttgaaatatgtgcctgacattctttttttttttttttttggtttctaacaggttatttttaatacaaatcaagtttggcatatttcatttttaacattacttcgcttttgaagtggtaactgaacctctctaatgctgcgtaaatggagatcaaaatatttatagaggcttcatcatacataacccagctccagggatacaatagcaagaatcaaacatgatttctcccctcaggcagcttgcagtcatttgggagaaataactattaataagacattagtccaatgattattcaaatcaatatataattacaaactgtcttaagagctagtaaagaatattaatgctatgtaaatatagtcgtacatcacttaacaacagaaatctgttctgagaaatgcattgttatgtacctgacattctttttgtgtggtcgtcgcttgttatagcaaactaacattcttgaggggaaagatcttgttatttgtgatatatgcattctgtactgtactgcttttataatttcttcagataaggtcattttaaaatttaatccagtggttttcaactaggggacaattttggtccccagggaacatttggcagggctggagacatttttggttgtcatagcttgggggagagttgctactggcatccagtgggtaggccagaggtgctgctgaacatcccatagagcatagttcctcacagtgcagggttatcctgcccaaaatgccagtggagcccaggttgagaaaccctgatttaggtgatatgtttattaaaaattgatctctggggctgggtgtggtggctcatgcctgtaatcccagcacttagggaggctgaggtagatggatcacttgaggtcaggagttcaagaccagcctggccaacatggtgaaaccccatctctactaaaagtacaaaaattagctgagcatggtggtgcgttgggtcattgaattcacctaaaaataatttactaccccccctaaaattatctttacttccccatctcccttctcctgagaggcagggtataaaaatgtctgtattctataattccccactgtgcgtgctaacaaatgtgtatgccatttctcctattaatctgccttttgtcagttgattttttcggcgaaacttcagagggtaaaggataagtttttccttggcccctacatcctgaaataaatatgctagaccagtaaggggaatttaaattcaagtctctgtgcacaaatgtgtcaaacataaagttagctgctctctggtcacatttgaattcaagcagcgttcacagctattcatttgaattctggataccacctcctctgaaatctttaacacatgcaagacattgtcacgttattctttaaaattttttatttccactgggcacggtggctcatgcctgtaatcccagcactttgggaggccgaggcgggcggatcacttgaggtcaggagttcgataccagcctggccaaccacagtgaaaccctgtctctactaaaaatacaaacattaactgggtttgcaatgcctcccaatacatctttcaccataaccattatcttatatatatatttagaatttcctaagaaatgatgtaaagcatacagtctttttcaatgtcattatgaataagcctttgttgggtaggtatctggtatctgtatgtatcctaatgctgtgttttctcaggggtggttcccttttcattttgtacagagccagtccatgacagacatgcttctcaaagtacagaatgctattggagaactgtatcttgaaactggaatgactcaggaagggttccagtatttccagaaagcatggtcaagcatgctgcgtctttcactcagtgacttagaagacagccgggacttggtgaagcagaaaggtacggtgggcacatgcagagggaacagcctctcatgtg

SEQ ID NO: 10332 - DNA, 2300 bp, Homo sapien
tcaagggacagagttgatcagacaacggcccgccatcttatgccagcctaccatcttgtgctctgtctgcctcatgaattcccatcatcatctgcagaaacgtctacccacaagcagtggctctgttttgaaggatatgtctctgtctcagttctctccaggtgcagcaccaactccccaccactcactagttaaggtggcatttgcagtttcagaactggttgcttacttattcagaattggaggaaaaggtcaagaagttgagctgtgaaatgcagaaaaaaaagtgaagaaactcagttttctctcaaaacaaaaaataaaggagttaaaatatacaaaaatgcaactgaaatctctgaatgtaattcacactctagtatgctcttttaaaaaaagatgaaagcacagaagcatacataaagcattctttgtaagctactctttgcttactaataacaaatgtaggtaaattgggcagatgtaaataaggcaccaccacaacacgtgagcgccaaccacagagccaagatccgcacactaaatacgggaagttgtaaaagactgtgacagactgtcactaaaaaacttgtcttcaggaattcggacgattatctgaaaagatattcaaagttcaattttgttggaggaagcaataaggaagtggggtgtctatgtcagagacgggcgcgggtatgcgagggggtaacgtatagagtaggttaaagagacgtagaaaatatttccaaaggcacaagtttagcatgagggacttccctcacaggaaagacacctggtgttttatatgtccttctgagcacagacagggtatttctatgaagttacaaagctgcaatcccgttctcatgtgcagcaccacaggttttgctttcaaatatctgcaggtgcatcctcctgcactcgttaaactaagggttttccttttctgtgctagacccgcttttacgaccacgctctccacctgattcacagaaagggttctacgaccgtcaggtcaccgccgcctttgtactttattggggagtcgaaggcctcagcgctgctcgcgatttccctaaggtggtcgggaaggtcccaaccacgttcttctgtaaaccagataaggaaggcctggggattccggccgcggaaaggcacagaggaggtgaacgctccggctgcccaagtgacgcacttgtaggcggattcggaaactcgtgctcttgagccggaggcggagcccccagactcagaccgaccccccagaaccgggcggccttgcccgaggcatgaaggctttctaggcccgcttctaaaagctgtgtacaatggagactcctggaataggcacatatctctactgtaatcagaacgagatgtaacatctaagacgcagggcagggctctggcaaagacacgctgggggaacgtgaaagaaagggccaaaactacgcagctggtcctcagagaccaaagactacgacccccagcattcaatgcagtgaacccctaggacgttgcatgccgggagctgtagtttctcaccaccgccacccccccgcccccccgccatctgaaagggttctaggggatttgcaacctctctcgtgtgtttcttctttccgagaagcgccgccacacgagaaagctggccgcgaaagtcgtgctggaatcacttccaacgaaaccccaggcatagatgggaaagggtgaagaacacgttgccatggctaccgtttccccggtcacggaataaacgctctctaggatccggaagtagttccgccgcgacctctctaaaaggatggatgtgttctctgcttacattcattggacgttttcccttagaggccaaggccgcccaggcaaaggggcggtcccacgtgtgaggggcccgcggagccatttgattggagaaaagctgcaaaccctgaccaatcggaaggagccacgcttcgggcatcggtcaccgcacctggacagctccgattggtggacttccgccccccctcacgaatcctcattgggtgccgtgggtgcgtggtgcggcgcgattggtgggttcatgtttcccgtcccccgcccgcgggaagtgggggtgaaaagcggcccgacctgcttgcggtgtagtgggcggaccgcgcggctggaggtgtgaggatccgaacccaggggtggggggtggaggcggctcctgcgatcgaaggggacttgagactcaccggccgcacgccatgagggccctgtgggtgctgggcctctgctgcgtcctgctgaccttcggtgagtgattctggagg

SEQ ID NO: 10333 - DNA, 2300 bp, Homo sapien
catttaatccatccaactgaatagcttcttcctctctaaggaaatcagttaggtaagcaaatattgcatggcatagttcccttcaaaactagaggaattatgatgaaagcacaggggcctctgaatattgtcttgggggttaaaatggaaacctttataaaatataactgatataccgtctcattatgttagcacagcagtaggctacctttaacattacactggaaatactcggttcttaaaattgccagaaaaaaaaaaatcccaactttcctctactaaaaagcaaagtcatactcatttatgctccacagtgaggacttcaaaactgtcaataagtcccaagaggccaaattttaaaatattgttcaactgacagaaatcccatttttaaacttactcggtgtacacagttaatgaatacaaatccaactgaaagtatcttctataaagtcttacaaagtttatggtgctagtattctgcaatatagttttcaaaggaattcactcagttttcatcactcctagggacaagttaggaggtatgtatgcacacaactcaccgggtatttaaatacagggtgttagactttatctggacctttggagaagagatacataagaagtgaccgtaactcacaaggttcacacggcttatctgtatacgtaagttcaaatgaacacaaacctctgtactacttcatcatccgtccttgatccttctctacttttacccagatcctcttctactgtaccatccacatcaacttcatcgtcagctctgaccgaccctgaagatttaacacgggcaaactcttcaacatcacacttctccaaggaggatgatcaaatagggaagggtaggggttgcaaaattcagttggtaactaagggaggtggggatgaaagagtgcattccctggtttaaataccaaaggtaaagccaagacagaacatctatttaagttcagatgctgaagtctccagtagatcctgaaatacggaggcagtcaccacttctaaacagtgtgtctccgatcatttataaataacgttaagcagactgataccaggcctcttctacacccacacgtgttgcgcgcaggccgagccaaggcctcccaactgatcaagccaaaacttcggccttcgttagcacaggtcagaatgcaaataggatttatgcaacctctggcgaggggaactgaaattgagcccagaggcatgagaagggggagaaatgttaagaaccgaactccagcaaaactgaatcaaacacgctgacactgccattccgctggccccaggcctcacgctcccgaggccagcatctaagaagggacacgggcttgcgaggagtcggagtctggggaattaggggacgggaaagctgggatggccgaaggttgcggtggccgaaaaagtcctccgggcggggaggggggagggactcgcacagctcccgggggagccagagcctcagagaggccccaccccgaggtcgctgagacctccgggcgagatactattagatctgtagggcagttagatgatgttgctctctttttttatttccagaggaagaagagaataaacgtaattcccttgccctctttcgaggaatggtgacgtcccttggcccaccgcaggccccgggatcccccctcccacgttcaacgcccccaggaccttcgagaagcggccgcgtgtgtggaggggggacgtctgctcctccagaatcactcaccgaaggtcagcaggacgcagcagaggcccagcacccacagggccctcatggcgtgcggccggtgagtctcaagtccccttcgatcgcaggagccgcctccaccccccacccctgggttcggatcctcacacctccagccgcgcggtccgcccactacaccgcaagcaggtcgggccgcttttcacccccacttcccgcgggcgggggacgggaaacatgaacccaccaatcgcgccgcaccacgcacccacggcacccaatgaggattcgtgagggggggcggaagtccaccaatcggagctgtccaggtgcggtgaccgatgcccgaagcgtggctccttccgattggtcagggtttgcagcttttctccaatcaaatggctccgcgggcccctcacacgtgggaccgcccctttgcctgggcggccttggcctctaagggaaaacgtccaatgaatgtaagcagagaacacatccatccttttagagaggtcgcggcggaactacttccggatcctagagagcgtttattccgtgaccggggaaacggtag

SEQ ID NO: 10334 - DNA, 2300 bp, Homo sapien
tgtctccaggtttcatttggaggcatcactaagagttatgccccagtgccctctctttttaagcactgggctagatgttggagaaggatagggcaatcattcccaaggaaagatagaaagtgatgtcccaagagatgttaatgtcaggttgctaagaagcaggtgaaattatctggatataagctccatgaaggcaaacattttgttggaagctccattcccaaagcttaacacttaattggcagccatttgtatgaataagtgaggttaaacaggacagttccatgcagggaacgatggctgctaacacctatccaggacctagtttccatgaccatgcatatctttttaaaaatttcctttgcccacttcttaaatgttaacatacattttctccaagttaagtttcagcccttttctcattgtccatgtgatctttatgtagtcttatccactgccacggcctcaggttccatctctagttctcaaatttatattcttagcctagatcaggagttagcaaactttttcttaaaagagccagctagtagaaaaaaagataaaagaaaacaacaagaaagaaagagccagctagtaaatatttttagcttgtgagctatatggtctgtcacatgtcccaactctgtttagcttgaaagcaggcatagacaatacataaggatgtgtcccagccaagtgtggtggctcatccctataatcccagcacctcgggaggctgaggtgggaggatcacttgaacccaggagtttgaggtcagcctggacaacataatgggatcccatctccacaaaaataaaaaataaaaaattagcttggcacagtggtgcatgcctgtagtcccagctactcaggaggctgaggtaggaggattgcttgagcctggcaggtcaaggctgcagtgagccatcatcacgcctgggtgacagaggtccaaaaaaaaaaaaaaaaaaaaaagtgtcccaataaaatttctaatgggtgccagctgtacagctatagcttgccagccccttgtctaggtctcactactgggctctgtgttcatgtgtttaattgccttttaaatgcttctacctaagatatctaaccagcagcttctacttgcatccaaaactgaactcttaatccccaaatcactagaacatgtgctctgagaccaggggcctagtcactcactaggctttgtcatatcatggctacttattggccaggtaccactaaactaatgagccttttgagacagggagggaaccatagatagaccatttcccatacttaattgggaacacaagtatcaagatatggactacctactgtgcttaagagtaggttctaggccgggcacagtggctcacacctgtaatccccgcactgcccggtagaattttatataatagtagaaatgttctatatctgcacttttccattttggcgatcaccagccacatgtgactgttgagtacttggaatgtggcagcataactggaactgaactgtacattttatttaaataagtcacatgtgcccagtggctgccattttggatagtgcagatataaatataaaccagattaattttctagcttttttaaggaaaatgttttcattaattaggaatagttatctacaataatcattaggtttctggaataacagtaagagctatgagagtgcatgattccatttctctccagaatatttcagtgctttctcaccttgaaaaatgaaaacaatctattcagacggttgggaatattttaattttctacttaaaactaaggttattctccacttgaggtaatgtagaggagattcttctctttactgtatctacatgtgttacattttagctcacaaacccttgttggtgatggagagttaacatgaataattaggacatcttggattatactgaactgctggctattaccatggtatttaaatgaatttataatcagatcttctaaatgttaggtgtctctaaacatcgaatttttcttgcagccttgtcttaaaagaagaagcatctgattaccttgaattggatacaattaaaaatctcgtcaaaaaatattcacagttcataaactttcctatttatgtatggagcagcaaggtaaatctatattgattaaaaacttatatgtattaccttggcacgtatttaaatattcaacactaaaagaatgaaggcaggccggcgcggtggctcatgcttgtaatccccgcactttgggaggccgagacaggtggatcacctgaggtcaggagttcgagac

SEQ ID NO: 10335 - DNA, 2300 bp, Homo sapien
tagtagctttatatctatcaaccgatgtcaacctaaaataaccaaaagggtcagaatctaacttaaagagggtttattcaagcacaaagagtaagaatggaccacctggaaacaccagctccaaaggaatggagtcagcgttctgaagtaagaaagttaagatttcatttgtatggcagagacaggagtttttagcaggattgcaacacttttcatacaagattggcacaaagttacagcaatttggttggttatacgcagtgtttctttttgggaaggtgcatttaacactttttacagagggtgtaatactcatgggttttctgttatctggtctcagcaaagcaggacaataaagggcaaattaatcaagggtcattaagaaaggaggtttttgtcactggcatttaattttctctagtgattgtatagaacaagaaaaagtgagttaatatataatctgagaacagaagttgtaaccgtatgtgactcagattagtcacatctctctcaaggcttacagtgttttttttaggttccaacatttttaaaattttatttatttacacaccaacaactagaaacaaccaaaatgttcatcaataagtgaatagataaaccaattgtagtctaaacccacctagcaataaggagtgaactactaagacatgcaacaatgtggatgaatctcaaaataactgagctgcatgaaataagcaacacaaaaaatagtacatacggtataattctatttatgtaacattccagaaaatgcaaactaacttatagtgacagaaagcagatctgtgattacctagggaaatgaggccatggaggagggagggagtagaaagaagcactaagaaacttttgagggtcttgggtatgttcattatcttgattgtggtaatggtctcacatatgtcaaacatcatattgtatactttaaatatgtgcagtttattgtatgtcaaatatacctccataagactctttacaaatatgagtattatgatttgtcatacatacaactttaatccttcagaatttagccttgcactaacttttttttttttttgagacggagtcttgctctgttgcccaggctggagtgcaatggcgcgatctcagctcactgcaacctccatctcctgggttcaagcgattcccctgcctcagcctcccgagtagctgggattatagtcatctgccaccacgcccggctaaattttgtgtgtatatatatacatatatatttaaaaatatataaatatatattaaaaataaatatatattataaatatataaatatatattaaaaatatataatatatattaaaaatatataatataaaatatgtataaaatatatatttaaaaatatatattatatatatatatttttagtagagatggagtcttgccatcttgccatgttggccaggctggtctcaaatttcaggcctcaagtgatccgcccgccttggcctcccaaagtgctggctgggattacaggcgtaagccaccgcccccggcccttgcactaaccttttacttaaaaaacaaccaataatcaaaacaatggaaaaattcctggattaagttatgtcgatttcaaatttcccctttcccagtagcaccaggtcataaggccacagctgtctggatgtggctctatttcgggtatcaaaagacgccagacacagggacagtgagtgcctttaacttcactcttaagaggtcacaggagggtgacctcccataaaagcacgcaaatgctcaatgtgtgactccacccctcctaaaaaagtggtaaaggcgtggtttcctttgtgtgcacgaaagaacaaacgatgtaataatagtccacggcctggccttagattccacatctgccaggaaaatttaactatagggagagtgatggaggtgctgggagcctggggctgagaaagtgtcggaattggtttaaaaaaaaaaaaagtcactggctttctcccagcgccccacctcctctgcgtcacgtgcctgcgccggcagcgctcccactttcctgtccggtgcggccccgggtccctgtattttgggtccggcctgctcgccgtccgctccgtccgcccttagacctgttgcccagcatccctgcagttcgcggtacagtctctagtagagcgcgtgtatagaggcagagaggagtgaagtccacagttcctctcctccaagaggtagaaggggcgcggggaaacgacctggtatcggttttccgcttgctgatcaagagctccctttaatgccgcacg

SEQ ID NO: 10336 - DNA, 2300 bp, Homo sapien
ttgttgttagtacataaattacaattgatcttcctatattgatattttatcttgcaaccttgcgaatctcacctattagctgtactaggttttttgtaggttccacaggattttctacataaaccagcaccagagcaatgaacaaagacaaattgtttttttttttatagatgtcatttatcaatcttcaggaagtttacaaggaagttcccagttctgtttccagattgctaaaagctctggtgggccaggttcacaagcagaaaaagtttgtcttccagactcagatgcaggatgttgagagagagacactgatgggataaaagccagtttgctgcaactgcttcaccatttttaggttcagtgtcctcaccgacaactcctcccataagctttttttttttttttttttttttttttttttttttttttgagacggagtctcactctgtagcccaggctggagggcagtggttcgatctcagctcactgcaacctctgcctccctggttcaagcgattctcccacctcagcctcccgagtagctgggactacaggtgacagagatggggtttcgacatgttggccaggtgggtctccaactcctgacctcaggtgatccacccgcctcggcctcccaaagtgctgggattacaggcatgagccaccacgcccggcctcctcacgttaactttcttttgccatgcaagattgggcagaggaccctggtctcttgaggttatgaatggagctggcaggacccagcacagcaacccacagtgagagaagcccttgctgccaagggtaattccccgagtgcagacatcctgagaaaagtttactctcttcacacacattttcagtcaccagaattctctcccaaagcattcagcagtctttggttaatgtgtctttctggatgccctgaaataactgaggcaagccacctgctgtaagacttttctagacgatggtcctgagccattggcaaaatcagagaggatgggcttttttcattcactcaacatatattcattgaatatttaccatgtgccaggttctgagtagtgtctactaatggacagggtattcataaaagttctgtactgttttaaacgtttcactcaaactttaaacagttgatatattacaaaaatctttctgtatttactcacgaaagcctggatcctagaatgaagaaaatacatggagcacagagccacagccatctcccagctcacagatcacgtgagtgagaaataaacttctgtggctgtaaaccactgaaggtttggagttacctgttactatatgaataaactcaggaaagccaacaaatacagcagccatgtttttcatcatcctgcaaactagaaaaacccaaaagcctattccattaagagttccttaataaagtacaaacaccagtgacagaaattgagaactaatgaaacaaaagccagctgcaagaaccactgagacataaaagaggggttagtctgtaagattacgaaccactgagatttaaaagaggggttagtctgtaaggttatgggaggtgatgctcgaatgggatctagtctcgtagacgtcaaacgttaatattctcatatatccaaagtaatgcggagagtggtttatgtagagctttacattttacatagcagctttacattcaccctcatttcacagataaggaaactgaggcccaagatggcacagtggcctcgacgcccaggttttccactttcaaagaccctccctcacatctcattacctgataatgcaacacagtctttaatcggggcgaatttcggggtggaaaggactagataatgctgataagcgtcatcatcccatatacacagcaccccaaggacagcaccctatcgcccacgcgtccaccagcccccgaaaatactggagacaaaagctgacgtcggcagagcgctcctagtccccgtcttctggtcctccacccttcccgaaaggccaagcggcggagctggggcgccaacgagaagggggtgagcgtgattgggctgtcctacatcacgtgacggccagtacgcgtgggatttggctccgaggaggcggaagtgcagcacagaaagggggtccgtgggggacggtagaagcctggaggaggagcttgagtccagccactgtctgggtactgccagccatcgggcccaggtctctggggttgtcttaccgcagtgagtaccacgcggtactacagagaccggctgcccgtgtgcccggcaggtggagccgcccgcatcagcggcctcggggaa

SEQ ID NO: 10337 - DNA, 2300 bp, Homo sapien
tcttctttgaatatctgaaattagtcttctaaaaaagtcggctgggcccggtggctcacatttgtaatcctagcactttgggaggccgaggcaggtggatcacttgagggcaagagttcaagaccagcctggccaacatggtgaaaccctgtctctactaaaaatacaaaaattagccaggcctggtggcaggtgcctgtaatcccagctacttgggaggctgcagcgggagaatcgcttgaacccgggtgatggaggttgcagtgagccaagatccgccactgcactccagcctgggcaacagagcaaggctctgtctcaaaaaaaaaaaaaaaaaaagtaaatttattttttttcacatcccacattacatttcttgattagcacagtcaagggtgacagagaactactctcttaaggattacctggggtctgagtcatttcagaagattacacagaattttccacagttcctgaaggtgaaagcttttcaaggcaaaataaaatctggtctatagccttttggatgaagtcaggccgacatatcacagctttgagctaaacagtgtattgaagtcctactattttgctgtaagaccctgaataaagtcttacaatgtgtaatttattcttggcccaagtttcaattctgctcttaagtgaggttatgagagagagatttccacaaattctggtgaattctcttatttgtaaagttcttctgggaaagaagtggagtaatttattccaggacttgatccacaaagtcaagataaagtccacactttgtctacatatatctcttttcctaagctctaatttattttggttagtgtgccctttcatgtaacaccaattctcggcatgtcagaatcagattccagacatgccaactttacagacatgaacaggcccatataagtcccttgtattgcctaaattcagctcccattagccactgagagtcaggataattcttcattaggcataggtttttttccttttaatttcaatgtaaatcatcactctttatcttttaaaaaactgtcaccatatccattttttaaaaatttagtcttccgccaggagttcaagtccctaaatctcctgcttttgcaaatttttctcttgactcccccaaaggactttttaaaaacggattcttaagatcgtccccaaggccactggaaaactcaaaggtcatttttagattgactactcgagagtgtatacatatgcccacaacaaaattatctaacccgtgacccttaaagttgctttcagtaggcctttggggtggggggaagccgcaacaaatcaaccaactttaaaatgaaaactcctggagctggaaatgttcgacactcatctttacagctctctgcgtggtaatggagggtgacggaaaacccttctagccaagaatggcatccagaaagacacattaaccaaagactgctgaatgcttactaatatattttatagtcaactggttatcgcggggaaccaaagaagggtccaggtgcaccaggtaaccctcagagcagccccgacctccaccaccaccgccgcagccagggaaggaaaggccgaccaggccacagtgcgcacgcgcggccccggcctttgtattccggccgggatttaaaagacccctgcgtgcgcgcgcgcgcgccagccagcctgcccagcagtgaggggcgcaagggaggggcggcgctggccccggtattacctgcccgcgttctccgcttccattccccgaggccgctgatgcgggcggctccacctgccgggcacacgggcagccggtctctgtagtaccgcgtggtactcactgcggtaagacaaccccagagacctgggcccgatggctggcagtacccagacagtggctggactcaagctcctcctccaggcttctaccgtcccccacggaccccctttctgtgctgcacttccgcctcctcggagccaaatcccacgcgtactggccgtcacgtgatgtaggacagcccaatcacgctcacccccttctcgttggcgccccagctccgccgcttggcctttcgggaagggtggaggaccagaagacggggactaggagcgctctgccgacgtcagcttttgtctccagtattttcgggggctggtggacgcgtgggcgatagggtgctgtccttggggtgctgtgtatatgggatgatgacgcttatcagcattatctagtcctttccaccccgaaattcgccccgattaaagactgtgttgcattatcaggtaatgagatgtgagggagg

SEQ ID NO: 10338 - DNA, 2300 bp, Homo sapien
tactaaatcctttagaatggaactgctcaatatagtagccactagccacattgactactgagtacttaaatgtgactagtgcaactgaggaactgaatttttaattttatttaactgtaactaattttaattgaaaaactgatactctattcaattactggaaaacttttaagtacatttggaccaacctggactcgtgaatttacttttgttcccagtgtttttttctatttttttattgataacataatagatatacatattttgagtgtgtattcaaacatttaatattaatacattcatataatttgtaaagatcaaatcagtgtaactgggatatccattaccttaaatgaatctactttttaaatggtatttataaaatctaaatatatgtgaagtgtttctgcttaaatttagtgtttgaattgagatgtgctccaagtgtacaacacacaccaaatttcaaagacttagttaaaaaaaaaacactgggaagggcaggaggaagggagagatagggagagatttgttaaaggatataaaattatagctagataggaggaataggttctagtgtagtatggccatagttaacaataatatatagcttcaaagagctagaaggaggatattgaatgtttccaacataagcatcaatatttgagattatagatatgctaattacagtgttctgatcactatacattgtatattgaaacatcaatatgtaccccatgaatatgtacaattattacatgaatatgtatcaaaacaaattaaatttaaagacaaaacaaagaacataaaacatcttcttaataatgttttatattatgtgttgaaatgataacatcttgtatatattgggtaaagtaaaatatatcattaagataaattttacctctttgtacttttttcttaatgtggctactagaaaattttaaattatagccaggtgtagtgatgtgcacctgtaatctcagctactcaggaggctgagacgggaggatcgcctgaaccttgaagttcacggctgcagtgagctgtgatcacgccactgcactccagcctgagtaacagagcaagaccctgtctctttaaaaaaaaaaaaaagtaaaattggccggatgaggtggctcacgcctgtaatcccagcactttgggaggctgaggcggcggatcacctgaggtcaggtgtttgagaccagcctggccaacatggcgaaaccccatctctactaaaaatacaaaaattagctgggtgtagtggtgggcgcctgtaatcccagctactcgggaggctgaggcaggagaatcatttgaaccggggaggcggaggttgcagtgagccgagatctcatcactgcactctagcctgggagacagagggagactccgtctcaaaaaaaaaaaaaagtaaaattacagggtggcttgcattttatttctgttggagagcaccactttagaaagagacagtgagcagggagatccttatatccttataggaaataggaagaggagccattgcagaaataaattctgtgatcccagacaaagtgctggcaccatctcccgggtttgagaacacaccgcagagatacagaacagcgcagattgctgttgaggtcagctcccagctccctgcctcattcctctctgattcctcttttgttcaggcacaaaaacactccatcctgaaacttttgtcattattgccttggtagaagaagaccacagttgttacctgggttttgatttggggacaacagcatttcaatgactaggagatttcaggagaagctagtggccatgaagattctcaaaatcagcatgaactttatttttcactggtgttctttcaaagtttgccttcgactcaacgtgtggtagaaattcaccctgaaagcatttgctcttctctggttttgtgtcttttcctccagaacagcgttgttttttgcatgttttgcacttagccagaggaagtctggcgcatccgagccggccagccgagcacatctggaagtggtttctggggccgcccctctctgccagcgcaactcctgggttcccagcggcttcgcgcagaggtggaagaaacccgagacgttccgaagtcaacgcaagcaaaggggagtgcgggtcggggaggaatattcttttggaaacgtaatattggccttggggctctccagccctttgggacttccaatgggatcttagaagcagccgaagcagcgtgagggcggcagcccagggccagccacgatttgaacgctctgccttgcagctct

SEQ ID NO: 10339 - DNA, 2300 bp, Homo sapien
gaaggtggagaagcatgctgaggtttaagggagttgggtgaatgaggcatataagagaaattgaaaatggtaaaataagaggaaaaaagagttttaggaaatttactatacagtgtctgtgttctcctttgagtacctcttgagaatctgaggtagggatttaaattgctttcaattttttcttccactggacttgtatctcttatttatctctctttaataaaaatagagatgggatctcaccatcttgaccgagctggtctcaaactcctgggatcagtggatccttctgtctcagcctccaaaagtgctgggattacaggtgtgagtcaccatgcccagtcctttttcaattaaaattttaaaaaataacttgtattgtggatatttaagatatacaatatgaagttgatatcatatagaccaggggtccccagtccccagcaaccagtcctcggcctgttcggaacccccatgaccttcctgagctctgcctcctgtcagatcaaccgcgcattagattctcataggagctcgaaccctactgtgaactgcccataggagggatctaaattgtgtactccctatgagaatcttatgcctgatgatctgaggtggaacagtttcatgccaaaaccatagcccccatccccttgccaagtccataccacccactcccctgccaagtccgtggaaaaattgtcttccatgaaaccggtccctagtgccaaaaaggttggggacagctgaaacaggcagtcacaaggttactatagtgaagcatattaacatatccatcatctcatatagttaccaccaaccctttttgtgtctctgtggcaagagtggctaaaatctactcatttggcatgaatcccatatgcagtgcagttttattcctaatggacttgtgtgattatgtgtaggaccaaatcacagggcagctaggccttattaagtgttgcattggctgggtgcggtggctcatgcctgtagttccagcactttgggaggccaaggcaggaggatcactggagcccaggagctcgagcttgcagtgagctctgatcgcgccactgcattccggcaacagagccagaccctatctaaaataaataaataaaaataaagagttgcgtatgactgctaccagaggcagtatggtataatggttggatatgactgctatcagaggcagtatggtatatgatataagggcttgggggttctggaatcagaagccctgtgttggaatcctggccccagtcttttttttcaacacctctcctttgtgtccatcagaaaattaccttactgcactgtgcctcatttccccgtccatgaaagggagataacaggagccaccacactggattgctggatggattacatgagttaatacacatgaggcacttagggcatgccaggctgtggacagccctcacttgttagctagcaatgaaacagaaacctagaaaaccatctctcctctgcttaagccaaacaaaccaaaaatacctcttgtggctcacggttcccaagcttcctggcatggctccgcacaaagctgccttcggttcgcccggcaggctttgtagcgaccttccctgcccgggtcccagtcacggtcgggagcagccgccgtggcccgggctcgcgaggcaggctcccgcccgcaccctcccgtgcgaggtccccgccctgcgctcccagctcttcgaacctctacccgagcttctctcacgttgcttgtgagactgcctcgcccacacatcctagatgctcaattaaagtggacgtaaaggaagatgctgtggcttcttcccaaaataccgaacgggaggctctgggtggggatgggagacgtggtcagtgggaagcgtccttccaccctaaggtgcgttgctccgggtggccgctggccaagtcgcctggggtgggggcggggctcccctgtcaggaccccccttccccagcgtctctccactgcccgcgggcctccagcctggccgccggcgcccgcggccacgtgaccccagcacagctggaggcgggtccccgccctccccagggagcagccggttgaggcgggagcggtgcattgtgggcagaggggcgggggttgggaagatggcggctcccagcctcctcaactggaggcgagtttcttccttcacggggccggtcccccgcgcccggcacggacaccgagcggtggccatccgggagctgatgatcatctttggagggggaaatgagggcatcgcggatgagctgcacgtctacaacacgggtaggcg

SEQ ID NO: 10340 - DNA, 2300 bp, Homo sapien
catattcaaccattcccccaaatactaatattctggtaccatcacagacaaatccatgggcagcacagcctggagggatatctcctctaacagctggcagaaaccactgattcgtagctagttgccaaaataaaatgaaaaccgattataacaaacaacggttatcatatactatcagcaaatatatatcatcaatatcagtgggtctcaactggggatgattctgccccccagaagacatttggtaatgtctggtgacatttttagttgtcacaactggagggggctgttactggcatctagtaggtagaggcagggatgctgccaaacatcttacaatgtacagggcaatacagggcagcttcccccaacctcaacaaagaattacctggcccaaaaggtcgagagtgctgctgttgaaaaaccctgatctgtatcatttaattcttacaaaacgccctgctgggtgagtataaaaatctctattttacaactgaaaattgtgaggcttaaaaaggtttggtaactttagcgctgatcctgggcaaccggcagagcaagattcaaatcaggtctaatttgttccaaagccagggattttacactaagaccaaagtgtcagtaactttttaccttcatatgctggggcgctgggaggaggagagggtgaaaaaaataaaacttctcagactccactattttgttaaccttcaaattattcctgtgattaagttgtttgatcaaagaaaagttatcggtcatgaagtagacccaaaattccatcactgtctttacaccaaacagatttcttgtgacagcctgagcatttacaaggggaaaaaaaaattaaatccagtttcctttctattccacagaggtcctcaaagataggggctccctgcccaggggcacttgtgatctgcagtggtgctcaagttatgacagtcctctttccgagggccagtccagaagggcgtccacaccgagtatgcagacacaaggccgcctcaccacgtccccgccgctttagagcgcggctcacggaggggctcttgaccgttacctgccaaacaccgggttgtatttgaggcgagagtgccagaaggcctctcgttttccctcctcaccccctagatggtcttcctcctaaggaaggaaggcaggcaaagacgggaaaggccctaaggaactttggtttggagtgggttttgttttttgacagaggcgagatttcggggagtggcccaggcggttggacatggtcttctgtcgcctgcgtccgcctgtcgggctggggtgggggcgtccgggatcccccgcctgaaggccggtgcgccccgctcggggtccgttgcgccccaagggccccggagatcctgagctgcggtccgggacagagctgccggacccgggctgcccggctgagccgcgctccccgccgcccgcccaaggaagcagtgaccgggcggtgacagctgtcagggccgcggccgccgcctcgcctcccctccccctccgcagctccagcaggcggggccgacgagccgccgccgcgcctacccgtgttgtagacgtgcagctcatccgcgatgccctcatttccccctccaaagatgatcatcagctcccggatggccaccgctcggtgtccgtgccgggcgcgggggaccggccccgtgaaggaagaaactcgcctccagttgaggaggctgggagccgccatcttcccaacccccgcccctctgcccacaatgcaccgctcccgcctcaaccggctgctccctggggagggcggggacccgcctccagctgtgctggggtcacgtggccgcgggcgccggcggccaggctggaggcccgcgggcagtggagagacgctggggaaggggggtcctgacaggggagccccgcccccaccccaggcgacttggccagcggccacccggagcaacgcaccttagggtggaaggacgcttcccactgaccacgtctcccatccccacccagagcctcccgttcggtattttgggaagaagccacagcatcttcctttacgtccactttaattgagcatctaggatgtgtgggcgaggcagtctcacaagcaacgtgagagaagctcgggtagaggttcgaagagctgggagcgcagggcggggacctcgcacgggagggtgcgggcgggagcctgcctcgcgagcccgggccacggcggctgctcccgaccgtgactgggacccgggcagggaaggtcgctacaaagcctgccgggcgaaccgaaggcagctttgtgcggagcc

SEQ ID NO: 10341 - DNA, 2300 bp, Homo sapien
gtgattctcctgtctcagcctctcgagtagctgggattacaggcatgcgccaccacgcccggctaattttgtattttttagtacagacggggtttctccatgttggtcaggctggtctcgaattcctgacctcaggtgatcggcctgccttggcttcccaaagtgctgggattacaggcgtgagccaccatgcccagccccttctcccaattctattactttatatttcctgcctttgaacctttgaacacatcatttcactccttaatctccactttatgggtaagcatagagaaagggagaaattaaactcaggccaatttttccttttttttttctaagcaaataacaccttttaaatgtttgatggagattgaagaaattcatgctatataaagatcttaggataactttttttttttttttttttgagatggagtcttgctctgtcgcctaggctggagtgcaatggtgtgatctcggctcactgcaacctctgcctcccgggttcaagcgattctcctgcctcagcctcctgagtagttgggattacaggcgcccaccaccacgcccggctaatttttgtatttttagtagagacggggtttcgccatgttggtcaggctggtctcgaactcctgacctcaggtgatcggcctgcttcggcctcccaaagtgctgggataactttttttttttaaagggctttctatgtatacattatcccaaacaaccctgagaagcagacatttggccaagatcacaagcctgtaagaaggggagttggaattcaagtcaggttgtctgatgacagtggcattgctacttactcctcttgtcacaatttggggctttcatttgtcttttcttccatacttgccgcagaaatgtttaaatactctgagaaacagtaggaactctataaataaaagatctctgtatttttacataatcaaagctggagagtttaatgtggtgcaggccactcggttagtggaagcagagggcatgccatccccagctccggttgcagtgagtggatccagtgttggattacccacctctgggatggtcactgctaagcgaagctgaactcaggactgcagtttgagaaagacagcgaaggagcttggctgcacagaggcaagaacgggccacggattcttgcagccaaaatgtcatctggttgggaaaagccgcttgtcaatctgcagctactagaggggtgggggtgggtggaaaatgcagcatcttaagttcaagattcagggtgaaggctggctagacttagcaggggtctgcatctttagatgaaatgtgaaaaacacccaagctcagggaccaaatgacagggagcgctgtgcatgcggcgacgctaacagggacccaaggaaagaaaacacgaggcgctgaaggcgctccaggaggcccccgccgttcagaccctcccggtggctcgggcgcgtcgtcctagggggcggcttctgtccttggtttccccttcttaaaaatccaggcgcaggcaggctgagctcaggcggctgaggcacctccacgtggcgggggaaggggtgacaaagagagggacgcccgagagatcccgcttcgcacaggcccgggtcagcaccgggaaggaggcccgcctagacccgaacggcgcgcccgggcagggccctggaagacctcgcgcctagaggagcggcatccggagcggcgcggaggcctcacaggaacgcgggactgggccgggggcggggcggggccgggggcggggcggggcggggcggggccgcggcgggcgggcgcgcgggcggcgcggagggagggtgtcgcgccgagggaagcggcccgcggcggagggaggggaggccgagtcctggaagcggagctccgcgctgggactggttccttcgcagccattttctgtccaaccaaacagccgattggagacgggagccaaccagggctgcattggaggtttgtgtctcgcttcggccaatgatcgctcctaaaccgactccactttagctcgaatgaaatgtccgtctcctcccggcgccgtccccgccgccaacgccgccgcggccgggggcactagcctcccgccctcccgcgcgggccgaggccgggccccgcgcctgcgaggccgctcccgcagcgggccgggccggggagcgggcgcggggccgcggcgcggctctttgtgcgccgggctgaggagcggcgggacgcgggccaggccacctcaccctcgccgccgttgagctccgggcccggggccgaggaggggccgcggggct

SEQ ID NO: 10342 - DNA, 2300 bp, Homo sapien
aatttgaattaagcacatagtttagatccacagtactgaaatgataaactattaactcagaaaagtagtcatcttcgcatcttttggttcaccatccagaattgggagaaggattagtcatctttctcccaattcttttttttttttttttttccttttttgagacagagtttcattcttgtcgcccaggctggagtgcaatggcgcgatctcagctcaccgcaacctccgcctcctgggttcaagtgattctcctgtctcagcctctcgagtagctgggattacaggcatgcgccaccacgcccggctaattttgtattttttagtacagacggggtttctccatgttggtcaggctggtctcgaattcctgacctcaggtgatcggcctgccttggcttcccaaagtgctgggattacaggcgtgagccaccatgcccagccccttctcccaattctattactttatatttcctgcctttgaacctttgaacacatcatttcactccttaatctccactttatgggtaagcatagagaaagggagaaattaaactcaggccaatttttccttttttttttctaagcaaataacaccttttaaatgtttgatggagattgaagaaattcatgctatataaagatcttaggataactttttttttttttttttttgagatggagtcttgctctgtcgcctaggctggagtgcaatggtgtgatctcggctcactgcaacctctgcctcccgggttcaagcgattctcctgcctcagcctcctgagtagttgggattacaggcgcccaccaccacgcccggctaatttttgtatttttagtagagacggggtttcgccatgttggtcaggctggtctcgaactcctgacctcaggtgatcggcctgcttcggcctcccaaagtgctgggataactttttttttttaaagggctttctatgtatacattatcccaaacaaccctgagaagcagacatttggccaagatcacaagcctgtaagaaggggagttggaattcaagtcaggttgtctgatgacagtggcattgctacttactcctcttgtcacaatttggggctttcatttgtcttttcttccatacttgccgcagaaatgtttaaatactctgagaaacagtaggaactctataaataaaagatctctgtatttttacataatcaaagctggagagtttaatgtggtgcaggccactcggttagtggaagcagagggcatgccatccccagctccggttgcagtgagtggatccagtgttggattacccacctctgggatggtcactgctaagcgaagctgaactcaggactgcagtttgagaaagacagcgaaggagcttggctgcacagaggcaagaacgggccacggattcttgcagccaaaatgtcatctggttgggaaaagccgcttgtcaatctgcagctactagaggggtgggggtgggtggaaaatgcagcatcttaagttcaagattcagggtgaaggctggctagacttagcaggggtctgcatctttagatgaaatgtgaaaaacacccaagctcagggaccaaatgacagggagcgctgtgcatgcggcgacgctaacagggacccaaggaaagaaaacacgaggcgctgaaggcgctccaggaggcccccgccgttcagaccctcccggtggctcgggcgcgtcgtcctagggggcggcttctgtccttggtttccccttcttaaaaatccaggcgcaggcaggctgagctcaggcggctgaggcacctccacgtggcgggggaaggggtgacaaagagagggacgcccgagagatcccgcttcgcacaggcccgggtcagcaccgggaaggaggcccgcctagacccgaacggcgcgcccgggcagggccctggaagacctcgcgcctagaggagcggcatccggagcggcgcggaggcctcacaggaacgcgggactgggccgggggcggggcggggccgggggcggggcggggcggggcggggccgcggcgggcgggcgcgcgggcggcgcggagggagggtgtcgcgccgagggaagcggcccgcggcggagggaggggaggccgagtcctggaagcggagctccgcgctgggactggttccttcgcagccattttctgtccaaccaaacagccgattggagacgggagccaaccagggctgcattggaggtttgtgtctcgcttcggccaatgatcgctcctaaaccgactccactttagctcgaatgaaatgtccgtctcctcccg

SEQ ID NO: 10343 - DNA, 2300 bp, Homo sapien
gatgaaattggcagattctggattttgccatttacatccccatagtgttgtttaacttgttcctttatcttctttttcctataagctggatgtagggaatttatttatttatttatttatttatttatttatttatttaagacggagtctcgctctgccgcccaggctggagtgcagtagcgggatctcggctcactgcaagctccgccccccgggttcacgccattctcctgcctcagcctcccgagtagctgggactacaggcgcctgccaccacgcctggctaatttttttgtatttttttagtagagaggggatttcaccatgttagccaggatggtctcgatctgacttcgtgatccacctgcctcggcctcccaaagagctgggattacaggcgtgagccaccgctcccggccaatttattcatttttaaatatcatttgaaggtagagtggacaggacttgccggccaattgaaggtggagtatgagagagaagaatcaaggatgacgccaaggtttttggcctgagcaagtggaagaatggagttgccattttctgagatggggaagaccgtgggaataggtttgggaggggacaatctgcttggacattttaggcttgagatgtttattagacactcaagtggagatgccaggtgccaggtgaatatgtgagcctggagttaatgaaagtggctgcagcaggagacataagtttgggagttgtcagcagatagatgacatttaaagctctgagactaaaggagatcaccagagaagcaaatgcagattataagagagagaggaggggagaagttcgaggactgagctttagtacttcaatattaagtgccaggaaaattgaggaggaaccagcaaaggagactgagtaggggcatccagcacaataggagaaaatctaggttagtgtggtaccctggaagccaatcattctaaggaggagattatgaaacatgggtcatatgtcatggataggccaagtaagatgaggactgggaattaattattattgggtagaaaagagatgccctcccccaggcatggtggctcacgcctgtaatcccagcactttgggaggccgaggtgggtggatcatctgaggtcaggagtttgagaccagcctggccaacatgatgaaaccccgtctctaccaaaaatataaaaaattagctgggtgtggtggcatgcacctgtaatcctagctactcaggaggctgaggcaggagaattgcttgaacccgggagatggaggttgcagtgagctgaaagtgtgcctctgcactccagcctgggcgacagagtgagactctgtctcaaaaaaagaaaagagatgccctcccttttgatgctctttaaacaaatcatgtataattaaattaaaactcaatggccaggtgcagtggctcacgccactttgggaggccaaggcgggtggatcacctaaggtcaggagttcaagaccagcctggccaacatggtgaaaccctatctctactaaaaatacaaaaaagtagccaggtgtggtggcgtgcacctatagtcccagctactcaggaggctaggcaggagaactgcttgaacccgggaggtggaggttgcagtgagccaagacggcaccactgcactccagcctgggtgacagagtgagactccatctcaaaaaaaaaaaaaaaattaggccgggtgcgatggctcaagcctgtaatcccagcactttgggaggccaaggcggggggatcacgaggtcaggagatcgagaccatcctggctaacacggtgaaacccgtctctactaaaaataaaaaaaaattagctgggtgtggtggcgggcgcctgtagtcccagctactcaggaggctgaggcaggagaatggcgtgaacccgggaggagcttgcagtgagccaagatctcaccactgcactccagcctgggcgacatagtgagactccatctcataaaaaaaaaaaaaattaaaaaaattaaatctcaaaacaaagttcccagggaaacattcttttcatgtataggaattagtggagtgtgatgtcatagtaataagagaggttagtggttaagagcagaggcttggaaattaggaaacctggatttcagtatcaagctgtgtgatcctgtgcaattaatcccctaagcatcaggattctcctctgtaaaataggaataataagagacccttctaaatgtggctcttgcaggaaaaacatgagataagcatacttttatgccagtaaaggacttagcaggatgcctggctc

SEQ ID NO: 10344 - DNA, 2300 bp, Homo sapien
tgggtggatcacaaggtcaggagattgagaacatcctggctaacatggtgaaaccccgtctctactaaaaataccaaaaaaaattagcgtggtggtggacgcctgtagtcccagctactagggaggctgaggcagaagaatagcgtgaacccgggaggcggagcttgcagtgagccgagatcgtgccactgcactccagtctgggcaacagagcgagactccatctccaaaaaaaaaaaaaaaaaaagcctttggttcagttttatttgttttctgtgtttaagcaaataaacacccagtgttttccaagagcattttgactctgggctgctctccagagaagcaggatataagcttgtccacaaacccaaatgaaaacaaagggcccacacaattgccacgcatctggtgaccagacaagttcactaaatctcagctggggtggaagttccttgagaccagggaatttgagtcaccttgtaaccctaaacaaagccaggcataagttggatgcttaccatatgttagttaattgaaagaaggaaaaacagagcactgcactgatagagaacagtgactgtgcacctgatgtgccgcaatgtggtttggtgttaaaaaaaatcactctcattcattactagtaggagttcaaatgggaaccacagttccaaaaaagcaattttggcaacgtgtaatgacagccttaaaactataaacacaaagatgttccctgcagccttattcataatttttaaaaataaaaaacaaactaaacatctaataataggctatgtaatcgtccagtagctctagtggatggactattacattattataattattcaaattaatattttcccgcttcttccctgctttccttcaagaggtgggggaggccacctggcccaagctgaaggccaagatacaagaaaaaaatgcaaaggttctattttggcagcgtttacatgggcagggtgtcgtggggaggctggcggagggagtgggagcaggtgacagagaatatagggtaagttagaaggctctcagtgctggtaaaaataaaatagagtaaagtaaagggtgggggtagagttgaggggggcgtgatcagatttctgttcaaataggatggtctttttgctgtgaacttaagactgctctaaggccaggcgcagtggctgacgcctgtaatcccagcactttgggaggccgaggcgggcggatcacaaggtcaggagatcgagaccatcctgcctaacacggtgaaaccccgtctctactaaaaatacaaaaaattagctgggcatggtggcacacgcctgtagtcccagctactcgggaggctgaggcaggagaatcgcttgaacttgggaggcagaggttgcagtgggctgagatcgcgccactgcactccagcctgggtgacagagtgagactccgtctcaaaaaaaaaaaaaaaaaaagactgctctaaaaaataaagtgtattaaaaagaaactacgatgttcagtgtatgcttcatctacggtcaaagaggcaaagactgaagtgacagtggaagccaggtggttatctgggaggcttacaagactatgtgatagtatggaaaatactagtattaagtgaaatgctggatgcaaaactatgcatagaggggaaaaactggaaagaaatagtaaacacagcaaaagtagtttgtgtgaaggataaattttttaaaattattttttgtagaaacagggtttctctacattgcccaggatggtctcaaactcctgggctcaagcgatcaatcctcccacctcggcctcccaaagtgcacaggtgtaagccaccgcgcccagccgaaggataaggattttgggtggtgcgctcttttctcctttccatttctgcattttccaatttacctttagcgaccgttctttcctgttaaaaaaaaaaaattcacgaccttgaagaagatacacgggctatgacttcgctgttgtcaccgagcgccccgcccaccgcgttctccgacccgcggccggcagggggctcgcggcctccgccaggcgtccttcggctccgtcagttcccacagggccttgtgcgacatgggctgcgccgagggcaaggcagtggcggcggccgccccaacggagctgcagacgaaaggcaagaacggcgatggccgccgtaggtcaggtacgaccgagggcgaaggcctggtccccaggtcgacgggccgaagcgggccttccggccggggttggggataaagtgccccggagccctggccttgaagcccctcact

SEQ ID NO: 10345 - DNA, 2300 bp, Homo sapien
atgcgaaatgtatgattaaaacattttatgtttatgatttgctacggccaggcacagtggctcacacctgtaatcccagcactttgggaggctgaagcagacggatcccttgaggctaggagtttgaccatcctggccaacgtgttgaaaccccatttctactaaaaatacaaaaaattagccaggtgtggtggtgcatgcctgtagtcccagctacttgggaggctgaggcatgagaatcgctggaagcagggaggtggaggttgcagtgagctgagatgcgccactgcactccagccagagcaacagagcaagagactgtcaaacaaacaaacaaacaaacaaataaataaataaattgctgcatgatgagaaatggtggaagaagatgaggttcttcttccattaaccagcaactaaatagaactaaggagtttttcctctagaattcacgacaagggtaaggcatctgggctcttaacagcagcaagaaggatttgaaagaaaagaagatggttttaaaatggtgattttaatttaaagaaaaataactacatggtgctactctgggcatctttgctataatttgctcacttaggaacaatgtgaagttaaaatgccttatctagcctgttttggaatgccgttagaaaatattaattataatcactctgagctgtctatacaagatgcttttaatggcaagcctcttcaaatcaatccttattacttgcttttagtacattatttcaagttaaatgatccttctgtgtcctaagtcatgcttttgaaataaggtgtattttcaatatatttctaagaatgaggagtttatgaccctggttcatgggtcattcggtagactaaatgagataaaggcatataaaattattaatacagaacttggcttgggagccaggagtaaatgttttttgttctcccttagacccagtcttttcatgtttttccttctttcctccttaaatcacattgtttcctcaacacccacgtactagatccattctctgttctagggactccagaatcaggtgaaacactcatgtcaataatcaaacactcatgtcaataatcaccttacaggggaagtgtcaagttagtgtgtgtagtgtgtgtgtgtgcccatttagagggtgaagaagctaaatcaagcctctgagtttcaccttggaagggcctggcaggacctggcagtggttgcctgtttgtttagagggagtgtggcttctgctggctgttaggagcccgcaacgctctcagctgagagtgcttcaatctggcattatccaaagaagtgggaaagacattccttccttccttccttcattcagttattatgtatttattcagcaaatattcatagcctgctagtgcacagtgctgaataagaacatgagtaagagcagggaagcatgagagagcatggctcaccttagtagctgcaggtggctgggtgcagctggagttaaaagacactctgagtttttcttaaaaaaaacaataaataccaaacttagaatctaataaggaagaggtgctctcaggggaagttaggtgtgttcctaagaatttgtcatttcttttcaggattagtcaggatgaactagacatttcttttcaaaagcctaataacttcctttagggaactgccaaactgactaatccatgaccttaaggcagtgggtcccaaactttgctgccaactcaatcacctttggagttttttttttttttttaaacgcagaggcccaggtcacactccacaccaatgacatcagaatgtctaggggtgggagccaggcaccaggattctaaagaccctcacgtgatgacaacagctagcaaagttctgtagctactgccttagggcatagtctaatttcttcagtaaaaacacacttattccaaatttggttccagaattgccttaaattgtttttgctctgttcttaggttgggggcggctatgagcaggcagaggatgtggtgtcacccaattaggagctctcagcttacgaggcaattagcataggttgccagggctgcacgaggagtggatttctgctttgtcattctgactctggcagttagcccgcccgctcggcgcagggcgtggcttctcgtagccattaggaaacagcaaccctttcacctcagttttcttcactccggcatttgcagcagagcgaaaggtggtcgagtcctgaaggagggcctgatgtcttcatcattctcaaattcttgtaagctctgcgtcgggtgaaaccagacaaagccgcgag

SEQ ID NO: 10346 - DNA, 2300 bp, Homo sapien
ggtcacactccacaccaatgacatcagaatgtctaggggtgggagccaggcaccaggattctaaagaccctcacgtgatgacaacagctagcaaagttctgtagctactgccttagggcatagtctaatttcttcagtaaaaacacacttattccaaatttggttccagaattgccttaaattgtttttgctctgttcttaggttgggggcggctatgagcaggcagaggatgtggtgtcacccaattaggagctctcagcttacgaggcaattagcataggttgccagggctgcacgaggagtggatttctgctttgtcattctgactctggcagttagcccgcccgctcggcgcagggcgtggcttctcgtagccattaggaaacagcaaccctttcacctcagttttcttcactccggcatttgcagcagagcgaaaggtggtcgagtcctgaaggagggcctgatgtcttcatcattctcaaattcttgtaagctctgcgtcgggtgaaaccagacaaagccgcgagcccagggatgggagcacgcgggggacggcctgccggcggggacgacagcattgcgcctgggtgcagcagtgtgcgtctcggggaagggaagatattttaaggcgtgtctgagcagacggggaggcttttccaaacccaggcagcttcgtggcgtgtgcggtttcgacccggtcacacaaagcttcagcatgtcatgtggtaggtgaggccggcgcctgtaggctggcggtttccttcctcttggtctttgtagagacagtttgcagaacagcggagaaaatgggtattgtatcgtttcttacagagtccgagtcttgaaatgtagatgacaatgtgttgagtggactgacagatccttgagaatattaagaaagtataactatgtaagaatgcttctctaggaattttcacaccatttaatcctcagaaatcctgagacgttggcaaaacacatggggtctccatgtttttacaagtagggaaagcaaggctcagaaagatcaagtggcgtgcccagctggacacagactattaaatggggcggcgacgacgaccccagggcttcctcactctctcaggcagtacaggacagtgattaaacgcgtcgaccacattgcctgggtttgaatcctgccgctgcttttgagtagctccttgagcttggacaagtttcttagcttttctgtacctgtttccctgtctgtaagttgggcctggtaatacttacttgtagagtggttgtgaagttgaaatgtaaatatatgtgaagcagtatagacatgttagctactattattacaattaagcagctatactttgttttttgttttttgttggttttttttgtttgtttgttttttgagacggagtctcattctgtcgcccaggctggagtgcagtggcacgatctgggctcactgcaaccttcgccccctgggttcaagcgattctcctgcctcagcctcctgagtagctgggattacaggcacctgccaccgcgcccgactaatttttgtatttttagtagagacagggtttcaccatcttggccaggctggtcttgaactcctgacctcatgatccacccgcctcggcctcccaaataagcagctatacttttgaatgttggcgtgatttatgtctaatgaataggcctcatgtcagtgtaactgtggaatctgtatgttccactgagttcacccctttgtgaaattttaccattagtgcctagtttcatctgtagcgttgtgtattgcttcaggattctttttaagaatgcaccaggtaggcagagtgttcttaattttgctccacggtttcaaatgtcaaggaaacgttggaagttggattttggcattcagtatagatgcagagttgaaagcaagatcaaactgggaggtgttttgtgaaagttgagataaacgtgtattaagcttcttttttgaagcttttctgaattcgggatttaccgggaaagtaggacgtttaattttagcggagtagtgcaatgatttaaccctgactagaactctgacgtttacagctagccttgaggccatgttttcagccagtgtgcggatttgccggggtcagactccaagcttgattgtgagttctagcctttgtcagaaatgcagcaagtcatgctaacttgcaagggagtcaacagagggcacgcggtgcctgcggggccgggacggaagccccgcccccggcgcagttcccgcctgttagcgggggagaagcaccttacacgctccgctctgctt

SEQ ID NO: 10347 - DNA, 2300 bp, Homo sapien
gctccgctctgcttttgtgccacacagaggacggtcgggccctggaaggaacgctctcggaattggccgcggaaaccgatctgcccgttgtgtttgtgaaacagagaaagataggcggccatggtccaaccttgaaggtaggagagagtaacgtatctttttaaacgggggatgagctcgttgagctcagcgtggtcacagcctgccttttaaagccagcgtggatgtgaccctccaaacgggacgcagcgctgggaaatgacgaaaaacgctcgtgggctagcgcatgtgttaatcgaagttgatgagacgttggacaaatttcacatctcgggaaacttgaaatttctaacgctttttatcttttaaaatagctttttaaaaatgtcctttttctcctatttccccttcctctttccctcccagttgtaaataacattttttagcagcaatgtaatctgctaaatgttagttgtttagggaagtcctgagaaaaggggatcaggaaatgcttatctttgtcatcaaggtggccctgtaatcttcctcttaattctctcaggggtaggggacccggaaaccccagggtctggaggagagcaaccaggaagctcttggggtgacttcgttttccttcaggtgtgtctttttagcccagagttaatagttgggtgaagggaaaggaagaagtcttccctttggctggtagcaaacgcagtagaaatccttccttagacctatgctactgaggagttatagccactgagggatttatagcctacagtgttagaaaaatgcttggaggctgggtgtatgtatgttttatttatgtatttaaaaaaaaaaaacagtcttgctctgtcacccagagtgcactggagtgcagtggcgtgatcttgtatcactgcaacctccacctcctgggttcaagcaattctcctgcctcagcctcccgagtagctgagattacaggtgcccgccactacacccagcttcaccatgctggccaggctggtctcaaactcctgacctcagatgatccacggctgggtgcatgtttaagggaacaggacacctgggtgatgttctatctcacctgtggtagattaccaggttagaaaacttcccgtagtcccatcaccacgatccatgtgatttttgtccttatccatttatatctctgtaatttttaagaaatgaaaacattgccttcttagaagtaaacctaacgcctgcgttaaatgtaaaaatatatttagatgtgttgcagccttaggaaaaatactaataatttgaatttttatttattaccttttcttttaaaagtattttatttatttttgacaaatggttatagggaatggatctagacttcaaacagcaaattaatggaaaattaatggaaatacagaggcttttagctttagttaaaatatattgtgttactcagacctttagtttgcaggtaaaaagagataacggtctattatattaatattccttcctggccgggtgcggtggctcacacttgtaatcccagcaccttgggaggccgaggcaggcggattgctttgagctcaggagttccagatcagcctgggcaacacggtgaaaccccgtctctactagaaataaaaaaattagccagggcttggtggcacatgcctctggtcccagctactctgggactgaggctgaggctggggaatcaacttgaacctggaggtggaggttgcaatgagctgagattgcgccactgcaccctggcctaggtgacagtgagaccctgtctcaaaaaaaaaaaaaaagaaatatacatatatatatatatatatatatatatatatatatatatgtatatttcttcctgtctgattattctattattttcacctgtgccataagtttacatttacaaagttatatagtaatttgatctttatgtaattctactgatactcctggttttaatggcaatgggagtaaaaagagtcactctttttataagctttggaactcacttaattgatttggtctgatgttctgatgttttttctttttttttaattgaaaacttttttttctttagagatggaggtctcattatgttgtccaggctggtcttgaactcctgggctcaagcgatcatccggcctcggcctcctaaagtgctgggactgcaggtcacgacatttagtgaggtatagtgccatgaatgaaaagcataccatcaagaacacttaaaagaaatcatttagcatatttcttaagtaaacttattctactttgtgtcttttttt

SEQ ID NO: 10348 - DNA, 2300 bp, Homo sapien
tcagcctctcaagtagctgggattataggcatgcaccaccatgcctggctaattttgtatttttttagtagagatgtggttttgccatgttggtcgggctggtctcgatctcctgaccacaggtgatccacccacctcggcctcccaaagtgctgggattacagtgtgagccaccacgcccggcttgccttattgtttttgttttgttttaaataagctccctccaataatttttaggataaatgtcaagtttgagacgctttaatattattgtacatagggtagtttgatcaagatcatttgatgagataattagaattgcggaaaacaaaggactagtctttaatacccaaaacatatttgttagaaaacagcaaataggaacccaatgggggaggaacactttttgttgaacactttaacaatgaatagaaaaatagggaaccaagctgtttgcagccagggcttttgtatgtccatgtataaagttggaactagggacctccaagatggttaagaactatgaatagagttcctactgctcaaagatgtggctttcataaacatcttggtttttaaagcaaagttccagtattcttatagggaacctcttttgtatgtaaatcagcatctccctcaggattccagggttttgaaatcacttgtagagaggcctattggtggtactgagaggagaagcagagtgagtgaaaaagtatttactggaataataccaagtgtcagacatagttaagactttagtagtttgaggtaatcctgggagataagactaaaactgacaactcagggcttaaataatttcttcagggcaatattaggagagatgacaggcaccaagcaatgcgggattaatatccaggtgaattttgcagacagttgcggtggccccatgttccagtcttggggggtagatgctgagacaaaggcaggtctccttttatgttttgagacaaggtctggctctattgcccagtgcagtggcttgatattggctcattgcaaccttcgcctcctgggcttaacccatcctcccacctcagcctcccgaatagctggaactacaagcgcacaccacctcacccagcttatttttgtattttttgtatattgggggtttcaccatgttgtccagtgtagggaccagccccacagggtcggtgggtctctccctgtgtgcggcgacgagagagtgtagaaataaagacacaagacaaagagataagagaaaaggcagctgggcccgggggaccgctaccaccaatgcgcggagaccggtagtggccccgaatgtcgggctgcactattatttattggatacaaggcagaaggggcagggtaaagaatgtgagtcacctccaatgataggtaaggtcacgtgggtcatgtgtccactggacagggggcccttccctgcctggcagccgaggcagagagggagaggagacaaagagaaagacagcttacgccattatttctacacatcagggactattagtattttcactaatttactactgctgtctggaaggcagagccaggtgtacaggatggaacatgaaggcggactaggagtgtgaccactgaagcacagcatcacagggagacggttaggcctccggataactgcgggcgagcctgactgatgtcaggccctccacaagaggtggaggagcagagtcttctctaaactcccccggggaaaggcccccccccccgccgccggctttcccggtctgctaagtagcgggtgttgtttcttgacaccttttgctactgctggaccacgatcctcttggtgacgggcgtcttcccagatgctggcatcaccgctagaccaaggagccctccggtggccctgttcgggcataacagaaggctcgcactcttgtcttctggtcacttctcactatgtcccctcagctcctatctctgtatggcctggtttttcctaggctatgattattgagtgaggattatcataatattggaataagaagtaattgctaccaactaatgattaatgatactcatatataatcacatctaagatctatatctggtataacaattcttgttttatattatactggaacagctcgtgtcctctgtctcttgcctcggtgcctgggtggcttgccacccacagtccaggctggtctcaaaactcgtgagtttaagccatctgcctaccttggcctcccaaagtgctgagattacaggtgtgagccactgcacccagccaggtctcctttcaagtctaacttctaaagttaccagaa

SEQ ID NO: 10349 - DNA, 2300 bp, Homo sapien
ttttgttgaatttaaagtggatgtgagaagctcctaagaatatcgttcactgtaaaagcagacttttttggatttgggtcttggaattcttaactgtattttcacctaagatttaaaacaagttcaaatactagtttgtaattggccagactagggacagatacgatccttgaatgatcctgggtctcaacttacctttctttcatttttcctttattttagaagagggataagaactttttctgaagagcagtcaacttttcctttcagtgtgtaggattaattccacgaatctgtgaacttaaatctttgctgccaaataacttgcagtagatgctgggatagttttaaatctattttaagttatacattcagtacataagtgcatctccgtgtaaaaacagctatgtttggaagatctaaaacgcagcttttgtttttgagaagccaacaatctaatagggtaggatcatatatatgtacaactaaccgtaatgcatggtgttttgaaaaatgcacgtatctccctgaattacccctagttaataaaataattgggagcaaatggtaatataaggattttggagtaacttaatactactagattttgctgtttatacatttacaaaaaactttctgctaatgctaaagaaatagaacaagtctatatgcataaaggaaggtagggctaatttacttcctggtgctatgaaactggcaattggacaggtgcaattgtgggtgtctttttttttttaaggtgtacctgttgcaggtttgaaaagctgttgatgctcatgggttgtttgtgtgcatgttctctttaaaaaccagatgtattcattccctttttttttttttttttttttgagacggagtctcgctctatagcccaggctggagtgcagtggcccgatctcggctcactgcaaactccgcctcctgggttcacgccattcttctgcctcagcctaccgagtagctgggactataggcgcctgccaccgcgcccggctaattttttgtagttttagtagagacggggtttcaccgggttagccaagatggtctcgatctcctgacctcgtgatccgcccgcctcggcctcccaaagtgctgggattgcaggcgtgagccaccgcgcccggccattcccattgttatgtatactttgctatttgctgctggtgagacagataaggagtcacgtctttaactgcacttgagtttccagtgaccccattaaatccaatgggtaaattttcccacgcagattactcacccagtttacagattaagctttcatatccttagactgtatctgaaattttcatagctttgcccaccttttagggttcagagttactacccattcagtgtcggtggcctttagctgttggcaagcttccaagtaaatagctcttttgcagagatctctacccattctattcttccactcctgggtagtggagaaccaaagttcacctgagtaatgcccgtgcccagcacccagtttcctgcaggggttagcacggatattggaggctcccccgatcccacagatactcaggatgggtattggagggggcttggtttttaagaggacatgtgaaagtaattaacccgatttacatttgtataatgagtccaaacaccaccttgcaaaagaactgagagtttagcctgcttaatggagtttctgcttttcacggtccttggccttaccgacggtttacagtccagccagatttagttcacaaaaaaccaaaaccaggtcgacctcactgcagtatatgatggcagcgagcgttttaaagcgcaggacctttagtctcctcaatagttttgtgtaaagttgtccaaaagtgtttttttttaaagtgaggtgatccagtcggtaaacgctttgaaaaagaatagctgtcccctgagcgggcattagtcgcgtgtgaggtcagggcccatcattgcgcgtgttgggagcgccgcgctggtctatgagcgagcgcctcggcttgtggctgggccgggccggggcggggctgtcttcccgcggagcgtgctgggggcgggtcgcgccgggccgggccgctagtgcgcatgggcgggcgtcctcggctctaactgccgccactttccacacgctgggagggccgttacctcagagatacccgtggccggcatgttggttgaaaaagcttcccggaagggagacgaagagaaaggagaggagcagctcgtgatcatccccggtagcgagtacgcggcgaagtaggcggcggcggagggagcgctgatga

SEQ ID NO: 10350 - DNA, 2300 bp, Homo sapien
agaggctcatttaactatataagaaggaaagggaattcaggaaggaaatttttattatttattgatgtcaaataaaataaccctggatagtttcccaggtgggtttcgttttttttttttttttgagatggagtcttgctctgtcacctaggttggagtgcagtggcgtgatcttggctcactgcaagctccgcctcccgggttcacgccattcttctgcctcagcctcccaagtagctgggactacaggcgcccgccaccacgcccggctaatttttgtatttttagtagagacggggtttcactatgttggtcaggctggtctcgatctcctgacctcatgatcctcccgcctcggcctcccaaagtgctgggattacaggcgtgagccaccgcacccgaccccaggtgggtttctaagtcattatacctagtctgtaggttgttgttgacatctatttgtagtaggttggtatatttattctcctctgccatcactcaagtatcagggcttgctcatttctttctgcatccttaacaactgaaaacaccccctggttctgataaacacccacatctccttgcccactccgatttttaagactttgtaactgttacccatatcactatggacctgctgtaatgtaatctatcctttgttgtcaatgaaagctgagcatctgtagtcaaaagagaatctctgaatttgggcaacagttgccctccatgggattaatgattctgggtgaatcacaagatagaaacctgggaaaagcagtaagtcattggtttgattttagggatggtagtgtgctttctgtagcttgcttttcccccccatttttctctgaattttattgtttgagaactctttcaaagaaagcccctctagcagacaacattgagcagcgaaaaagaaggaaataatcatttatcatcctaataatgttaagtgagggagatgggacataaaagacttttcaagcacgattttatattttaactttgggttaaccagatggaaggggaaggtagagaatccaacttgataaatgtctttatttcacagtaaaactttatcactcttacaggttgaacaaattgaagcagggacaccaggccgactcagagtagtagctcagtccaccaatagtgaggaaatcattgaaggagaatataatacggtaaggaatgggcccaggttaatactttatcagaaagcaaataacatgcttattgggtatcttataggaacttaaaatggctcttagtgatttccaaatgtactggttctatgccaattcttagacatctcaataacttatgatattaaaatttgttttggtggccaggtgtgttagctcacgcctgtaatcccagcactttgggaggccaaggcgggcagatcacgaggtcaagggatcgggaccatcctggccaacgtggtgaaaccccgactctactaaaaatacaaaaattagccgggcgtggtggcgtgcgcctgtagtcccagctattcgggacgttgaggcaggagaatcgcttgaacccaggagacctaggttgcagtgagccgagattgtgccactgcactccagcctgggtgacagagcgagactccatctcaaaaaaaaaaaaaaaaagttgttttggtaaacggatggcttcagattttttccactgtaacttaaagtattattagtcaaatggctatacaaaggcaacagaatttttaaatgagccagaatttctgtcccgtgttctttcctttcatctccccacgcaaccacttaaaaaataatttagttacagactatgatgtcattgtctttaaacttggataggtttattaaggcattatgaattctctttttcctaatcagaagtggaaaataatttctactatatcatatatgttcaaaggatttttttctgaagattttaatttatttaaactcttgcattactttcttactgaaatatttatttccaagtttgaaaaatgaaatcagattagcttaataagcagagaaaaatatgattaggtaataaatgcaaagcctttttgttattagtcactaatatattaataatttttcaggtgatgctggcaataggaagagatgcttgcacaagaaaaattggcttagaaaccgtaggggtgaagataaatgaaaagtaagaaaaaaatctttattatgtcatatttgtgggattttttttttttttttttttttgagatggagtttctctcttgtctcccaggctggagtacaatggcacgatctcggctcactgca

SEQ ID NO: 10351 - DNA, 2300 bp, Homo sapien
ctgacttatttgtacctactatgtaccagtcattgtgctgggcattagaaagagacagagatgaagacaacttggatctccaggaaggagttcagcctagtgggtacagtggcccaaaagaggtttggacctagtgctcacagcgcagaggaggaaagttgcaatttcaggtgagaaaacagcaaagacttcttgggagaggtggtagcttatgtgtcacagccttaatcctcactgtgtttgggcaggttcctgattgtgggaatgcaagaatggatgttgggcatgattcaccatcctcccccaccatgtgggccaactccatgatctctgtgactcacagggaattggacttctgatctcttccttgaccctgtgacttcccaaactgccttgtgcatgtccaggctttggggcaggtaactgaagtctttggcctatgaggtgagaggtcacttgggtgacctgggagtaaatcccttcccctccctggctctgtaaagccaagtgttaaatgagagacttatattccaggcaaaggctttgtgcaaatgcccatctaagccatgccctctgcaaggaatcccctttcttagtgatgatggtggggaggtggggagggtgcagtgcaactcccattcctgatctcctatcaccagagcagaagaatcactggagaacgactctgtctgaagcttgttcagcctggcttccttgagcaagcaacttattcacaggtaagtccaaattaatacagcgcacaccggctacataaatattgtgctttgattgtcttctgtaatcaaaggcaaggctgctgagtttgttactttccccaccatgcaactgctggaggagaactctgggggaagggaactgaggttgcccaggtggtttttgttgcatgtgtctaactgcaagttgtgtctctgtctatcgaggggaggataaggcccattacattcagattcaataagaatttatcaaatgcctattttgtgagaggcattgaaagacacagtatcttatttcatttttaattgaattagtaatgacttgataaggcacaaaggttagtctaactaacattttttttttccctgacatacgagtgatccctacactattggctgtgtccactttattgattgtgaaacagcctaaatgcatggaattggaaactggaagtcattctacacaatacaagaaagcagcaccatctttccatgtacctgccagtgctatggctggcttggcttttccagcagttttctggacttggttgaggtggcttcctaggggcattttctcaccccctcccagctaagactgctgttaattttgaataatttggaggatgctctaccctttggggtagcagagttttgcaacccacagatcccttttgccttgaggaatggtggtgatggtgggtgtcagagattctgtctgtataagtccccgggaaagctcagctgtcgcctgacccgagggtcgtgcagtttccttaaccctgactttaagtcagccctctttaaccccgactcccaagctgggctgtcctttgaaagaaaaacgaaaccgcccagttctgagcgtcggaaaatgggcactcgctccctgggggtttggggcaacttccccgctacgtcgcccagggattttaaataattgccagccaccagaaaccccctaacccttaattcttccctccgagacccagcccgctgcttgccacttccctctccaaacgctggcgggggtgggtggcagcaccgaggcgattttcttcgtctttttttcctccgggttttgtcatggaaacgctgacacaacctccagacggcggccgagcccggccggggactgagggcttttgggaccctgcgggagcgcggcgcgcacaccgcactccccgggcaacagctggacgcgaccatatcccgggtaggggcggggggagcgcgacgctccgccccggcgctagggtccctccctcctcccggctctccgcaggcgccctcccctcgccgggggccgcgagttgcatttggtaaaacccagccccggaatatatagatcgttggagcgcaatgaagtagcctttggagagaagggagagggcccgtcggacagccacagcggccagcgcagcggcagcggcggcggcaccaccatcaccgctcgcaccccagccgcccggcccgcgaccaggcagcggcggccgccggcgggatcggaggaggcggcggagcggcgaggaggaggagcaggagcgcgcagccagcgggtccacgcat

SEQ ID NO: 10352 - DNA, 2300 bp, Homo sapien
gaagtagcctttggagagaagggagagggcccgtcggacagccacagcggccagcgcagcggcagcggcggcggcaccaccatcaccgctcgcaccccagccgcccggcccgcgaccaggcagcggcggccgccggcgggatcggaggaggcggcggagcggcgaggaggaggagcaggagcgcgcagccagcgggtccacgcatctcagcacttccagaccaactccggcaccttccacacccctgcccgggctgggggctccgagagcggccgcgaagcgactccgatcctccctctgagccttgctcagctctgccccgcgcctcccgggctccggtccgcgcggcggggtccctgctcctgcgccccgggcgcgcttcccggacaccccggtccccgcagccaggacaaagccatgaagccagcgctgctggaagtgatgaggatgaacagaatctgccggatggtgctggccacttgcttgggatcctttatcctggtcatcttctatttccaaagtatgttgcacccaggtagggggcgcgttagcgtggttttgttggatattttcttctctctcgcgctctagctcgctccgcctgatttctgcctcttccaaccctacctctccgccttcggcctcttcggggctcctggctgcccagagctcctggctgcccagatctacccgggtcaccgcgtcgggatggggaggagaagggaaggtgtgcttcgccctcttcttcctaccggctccgggctggaggatgggaccaggaggggcggtagtttttttttttttttttttcttcttctttttttctttgtgtcccttgtctgtctgtctgcgaggtagcagggaaacggagaggtgtgggaagcaaccgggggtgaggggctggtttgaggagaacgaaactccctccctgctgctgccgaggtcggaggatgaaagagttacccggagccggctgctctgcgcccgggcgagccgcctcttcctggttgccgggccgggggcgaagggtgtacgccccggcgaggttgcgagtccctgcagcaggctgggagcccgggactgggctcccacgtgtcccgggctccgcgcagagctgagcaggtgtggagagtggtcgggtgcccagcgttgcccctccaccacgcgccggccgtttgcccccggggtccgggtccgcagtgaccttgcggctggtgccccggggcctgctccagcccccagccctgagctggaaactccgagctcctgggtcacgccttgaccactgcagttttggaggaaactttggccaggtcctgggctgaccgtccgtttgcatcccccacttctgggatccgagcaacgggaatcccccgggcggcgtgggaatgaaccccattcctccggtcccttgtggctcaggcaaagttccacgtccgaaatctggactgggggagggacgaggctcgtcgcttcctaggggtgcgagggaaagtttgggttctggagagggaggggcgccctcgagcgcggcggccgggggtgagcagctcggctgcgaagcccaacaggtagaacgttccgagaagccttccgggtaacgcgggtctccccgccaagccgtggctcccctgctcccttttaccctcccttagcagccccctgccgggccacgttggctcagaaatccattttctacgcctccgagttgcctttctcagcgtagtcacagcaataatttgcttttctaattgcaaggaggagggaggtggaaacgcatttccttccagggaagtggggttggtgtttttcatttttgcctcccgccttctcctttcactgtgtatctaacactttaaacagacgcagtcccgaattcatcaagcctgcgtttgggtcgatggcagaggaataaagctgttctttccatcaaacaggcagggctgcaggctgcagattccttgacagcgcagggacagacggcccctttgccccactcggtctggagcagttgttaaggcagccacactgccaaggatatggtccgactctaccacatgtaacctcaggacgtccgagccagccctgttaaagatggcttttgtttgcagctgggtatttttagtttaatgtcagcaaactacagcggtgtttgtctcctcacccaaacctgcggttgtgaaacttataaaggaatttaaaaatggacctggcttgcattccggcaggcaggccttggttgcagtgggcagggccagacagccaggggtatctcagagtgccaagctccagggcccacc

SEQ ID NO: 10353 - DNA, 2300 bp, Homo sapien
agttttgctatttggtcaggttttcaaagcacagattttgagctttctgaactttagaatggctgaatggtgacactgtcatctctctttcttgtttacctacatttctctgcatttccattttgatcatcctggtaattctgcatcaggagggaagtttcctatcactggtcctcctatggaatagacctgtcttatagctcaatctctttggggtttgttttgcattttatttgattaaagatctattggggcagtgaaatactcactactttttaaaaaggtagatgagttgaaggaacagacacccactcaatctaactcatgtgaagctgaagggaatctcctaagttccagatgtatagctcagcctttcattacctggaaggctctctgcccttttctctctttcggggactacatcgttttatctctgcttcactctggccattggtttcattaatctgattttctttaaacaccaactttctgtctatactggccagcctataagtggcaaaaatgggaactagtgcttaatctactcattgcaagtccacaggaagtctgcaccataatcatcacatggaaaagttaaaaataaaaaagatttatgggcctcaaacacacacattctgagtcagtaggtctggtgtcctggaatctgtattttaaaaatgttcctcagaaggaattcccagatcccagacccctctgtaatcacaagagagaggaaaggaaagtgagtgagtgatggaattgatgaaccaggccctaacacccacttacgtcctacatagccccttctctttctccctttgccattccttgctattgatcttcctatccagagaggagatggatattctaagacattggaaacaaatactgaggaatatagtagttttcattaaaagcagcaatagtagcagcaacaattctcagtctagcttggcaggaacgcagtccagttaggttttggggccacccatcccttatcaaatcagtgccatttttttggtcttagatgctcttggaagtataagacaggcctaggtgtttctgagaaacacctgatagcttggaaagccttgccagctatggcagcaattgtcaggttttcttcctggtcaggtcgtgggtgaccttgcagcttcagtgcccatcactctttgatgtgccacagttatgtgtttgtgtctcttagttcaaagtcttcaaagagactctagtcactgagtggccagccagtcagggttctaccctgggattatgggccagagcagactgagaactatgaatggacagggcagggcataaataagtgcgttacaagctttcttctggctggtttgcaaatggaggtttaagtgaatatttgtaatttctttttagttttgttattcctaaatgaaagaaggtttatattcctaaatcaattataatgagcttttatatctcagaactacaaatatgactccagcctcattttatttgtgaaataaatgccctatatagtattcaggatacctaccaagtgtttttatagtaaacatcatccttgtctcttcatatcttaataataaaatgtatattatattaagttgtaaataaagtaatatggtttattatttaatgtttaaagtataatgccatatatcttttgttgtgtactgacagatgcaaagggtatagcaatttgattctgagtccttgcaatagtaataaaagccattactttatttaaaacatttgtccactgtgggatttcaagaggcagttgaagaccttacgtggatattgatcacataaagtatgcaaagataagaaatacttttaaccaagattgagcacaaaaatagctctgtattatatttctgtacacaaagcagttgtgtggcacaaaacagttatgttttaagcccacaaagtatagtatcagtaccgtagggttggtttaagaacatgtgtttttaatacctttataagaattgaagtatctatcttgatactgaaactatcttgtttctctgatttttaaaaattattttatttttccagatccagtccttctgtggaacttctgaacatcttttattagtggaaatattttctacacaatgaagtcaacaacttaatttaaaccagtgtttgtgcggttctgattcatctgctgtggttcccgaagcttgagatctaaggagtacagggtcttttgtgatgacaatatgactaatagtaaaggaagatctattaccgataaaacaagtggtggtccaagtagtggaggaggttttgta

SEQ ID NO: 10354 - DNA, 2300 bp, Homo sapien
agtggaatggggaataggaaaggggatggtgggggaagaaggtgatctttccctgaagtcgcaccatctgaagttggccgcagctatctgtagtctcttcttgtatccccaacacttagccattcatattgctctgtcagctggtccttttatgggcgcaggatatgggaatggcaggctaaaaaggcaacatttgggcgaaaaatggggtcagctattgtcacttagggccacagttccatgctttagagtggggtttagctgggagcccaataattctgtatcaccagtgccattacatacattttactccttttcctcttttattccttataacatccccatgaagtattattatcctgattctgcagagaaggacagacgctcagggagtgatctgcccaaagtcacagctactaaatgaataatatgacactggatttaatccactccaggctgattctggagcctctgcactgtcagaaataagcagaaaagattggtccaaggtttctgctgcttctgctttgaatcctatataagaggggtctgggcatactgcaggtggtcaataaagactgttaaaagaacaaacaggaaaggaagcaatagagtgaaaaggcaacctacagaatgggagaaaatatttgtaaatcatatatccgataaagggttaatatccagaatatataaataactcctacaactcaacaacaaaaacacaaataaccagattaaaaaatgggtaaaggagttgaatagtcatttctccaaagaagatatataaatggccaacaagcccatgaaaaggtgttcagcatcactaaatcattagagaaatgcaaaccaaaacttcaagatatcacttcacactcactgggatgctcactgtcaaaaagaaagaagcaaccaaacagaaaaaggaaatattgacaaggatgtggagaaattggaactcttgtgcactgtgggaatgtaaaatggtgcagccactatgaaaaactatacggaggcttcacaaaaacctaaaaagtagaattaccctattatccagtaatcccatgtctgggtatgtatcccaaagcattgaaaagcagggtctctaagagatatttgtaccaccatgttcattgcagcagcgttcacaatgaccacgaggtggaagcaaccagcacgcctgttgagagatcaatggtaagaaaatgtggtatatacatacaatggcatattattcaggcttaaaaaagaagagaatcctgttatgtgctacaacatgtctaaaccttgagggtattattttaagtgaaattagtaacaaaaaggcaagtactgtatgattccacctacataatgtatctgaagtagtcaagctcatagtaacagaaagtagaacgatggtagctgggcatgatggctcacgcctgtaatcccagcactttgggaggccaaggtgggtggatctcccgaggtcaggaaatcaagatcagcccggccaacatggtgaaaacccgtctctatacaaaaatacaaaaattagccgggcgtggtagtgtgcacctgtaatcttagctacttgggaggctgaggcaccagcctgggcgacagagcaaggctgtttcaaaaagaaagaaacaaagaagaaagtagaatggtggttaccaagggactggagtaggggtaaatgggtataaggtttcagttttgcaagatgaaaatgatctagaggtctgccaccactgaattgtacaactaaaaatggttaagatggtagattttgttacgtgttttttcaccaattaaaaaaaaatttaataaaaaaggataaagaggagggaagcctaatgttatgctctttatgcccgaatttggcgaaatcgagccttgcccgctgttttttcctatgacagtgtctgaacctttctttttcccaggagtaggaatggcccctgctcccgcgcagcctccaggctgcaccacgctcgccccgcctctctctccgctccttactccgcccaccgcagtttcctccaatcgcggccctctccccgcccccttacccgagcctttttcctgcatccgggcctgagagtgcaggcttgagggaagcatggaggtccatggcaagcccaaggctagcccgagttgttcgtcgcccacccgggattcctcaggagtcccagtgtccaaggagctgctgacggcgggaagcgacggccgcggaggtgacggacgggtgacggcggcatgggccgcacacgtgcggcagaggaggcgcggccggtgcagtttgggagccggcc

SEQ ID NO: 10355 - DNA, 2300 bp, Homo sapien
aaaaaaaaaaaaaaaaaaaaaaacccctccttatgcacccttctagtatacacagatcagaataaataaagggaatatcaatatttggaagtttaaaaaagcaagaagtcacaaaatgcagtcaggaaagtgggttgaattggcaagatgtagggctcaaagcaaaaccttggatgtttgttgcaattctccaagtttttttttttttgaaacagagtctccctctgtcgcccaggctggagtgcaggggcgcgatctcggctcactgaaagctctgcctcctgggttgacgccattctcctgcctcagcctcccaagtagctgggactacaggcgcccgccacacgcccggctaattttttgtatttttagtagagacagggtttcaccgtgttagctaggatggtctcgatctcctgacctcgtgatccgcccacctcggcctcccaaagtgctgggattacaggcgtgagccaccgcgcccaaccgcaattctccaagttttaatgatggttcttttttgtctccttactctcttaaacacattcatccgtttcaacaagtttttttttaacaagttattttttattttattattatttttttaaagctctggttagtgctagatactgtaaatcctgattaatcagacatggacttagcttgcaaggagcttccaacagagacgttaataggtatacaaataccagtagcagattgagacagccataacagatgcatagacaaagattatttcctgttaagaggagtgaacaattatttatggggaataaggagactaagagagaaaagaatcagaaaaaagcgcctccaggaggcagcatgtaagcggtacctttcagaaaagaaacggtcgtgccaagataattacaagtgacagatgacaagcttttctgggaaacattgtccaagaaggaataggcaagaactgcagtcaagcagaattacatatgcaaaagagcagtgagaaataagagaaaatggcaaattgcagacggccctgaatgctgggctaagaagtctggcttgagataaacgtccagctaaagcaggtctgagcgttttttccagagaggtgagggagaagggcacgtatctattaggttgatgcaaaagtaattgcgggtttgccattattttcagtggcaaaaaccacaattacttttgcaccaatttatttatttatttttaagacagagtctcgctctgttgtccaggctgaagtgcagtggcatgatctcagctccactgcaacctccgcctccccggctcaagtgatcctcgtgcttcagcctcccgagtagctgggactgcaggcatgcgacatcacgcccggctaattattttattattttattattttttatttttagtagagacggggtttcaccatggtggccaggctggtctcgaactcctgagctcaggccatcttccctcctcggcctcccaaagtgctgggattacaggcgggagccaccgcgcccggcctaccgtcctacgaggtaggcatcaggatccctccacagcgaaggcgcccccactacctatctgtctacaggcgtgccttttacgggctgtgctatggacagcacttgggatgtcagattgaccactaataaggtagatccgtatacactgctgcggggctgagtaactggtagagggtcccacagttagaaagcacctggaccttggctggaattggcggaaagtccaggcagcggagaggcgcggtccctgggactgggtgcgctcttggcaccagggtcagggcccacaggctccaggaagcccacgcgctccgccgggtcgcaccaggttggctgtccgaacgcagccagctggcggggcggggccttccagctgggggcggggtcttgacagctagggggcggggccttgcagctggtagggtggggcgggccgcgggctgtgggctttgggaggggtgcggactagcagaggccgagagcggcgagccgcgagccaggcagtccggggcatccagactgcaggccgcgcccaggccgcgcccaggctgcgccgcccgcctgcctcccgcgctgccgcgtcgccagtgctagcgctcctctccagcatgctgcggcggggcagccaggcgctccggcgcttctccactggccgggtgagtccggcccgggcgagcgtcccggctgtcaccctgtcctggtttccagactccggggcgggagggccggggcggtggggctggggatgagcagcgatgcttagactttgctaaacaccaagacagc

SEQ ID NO: 10356 - DNA, 2300 bp, Homo sapien
ttctctaacaaaatttgaaattataggctgtgaaatttgatttaaacatatttaagatcaagacagaaaatccctgagttttttttttttttttgagatggagtcttgctctgttgcccaggctggagtgtagtggctcagacgactttcctgcctcagcctccagagtagctgggactataggcaggcaccaccatgcccatctaatttttatatttttagtagggacagggtttcaccacgttgcccaggctggtctcaaactcctgacctcaagtgatccacccaccttggcctcccaaagtactgggattacaggcatgagccaccacactgggacttgtgagatctgggacttctgagatctttttaagataaatctatattgattcataatagcaacctggtacagtatgtggttggtattgttctatgtaccttatatgtattaactaatttagtcctcgtaagaatcccacaaggtgtttactagttttattttattttcattttatagatgaggaaattgaggcagaggttaaattacgtgacccaagatcacatggttagtaagtggcagagccaggatttggacctaggcaatttggcagtcaaaactgtgctttcaattattacatgacactgcctcttgctactaatctattaactttaatagattagtgtatttatagactcaaatttttctgacttgtaagttcaatttatcacaatgagctgctgggagattaattacagtgatttaatgcaaatgttaagaatccaggaaagtcaaactcatggtcacacagaaagtacaggaaaaaagtttgtcagccattagaccctaaggatgcctgttcttttcaagattttttttttctttctgaaatgcccactaagtctgccatagggtcagaaagcaattttcttacatgttttatagtttctgcatctagcctggtgcctggtacccagtgggcactcaataaacatttaactcagggcagatccaatgacctcagaagaatgctcttcaatagaccttttgcctacattgattagttcttttcggtactttttaagattacaagagtaaaaccctaataaattctcattgttaaggattcaaaacacataagtagacacatcaaaacttgaaaatcctgttactcaccaacacatgcttttccccaggtaaccaccgtcctctgatttgtcttcctatgaatttacatacacgtaggcacatacgcgtttgtataacttaaaaacataaatgtaatcacaaatacacattactctgcaactgtcttgtgtcggttgttcatgccattataaatatatttcatctattttagcagctcttcagtgattcgtagtatggatgtattgagctttatgtaattcacttgtaatgaacatttagatagtttcctattaaaaaccacgttgctataaatattcttgtgcaaatacgtgtatgcatgtagaattttacaccgatcccgattctccaaaaatccaaattgcaggtgggatcattttagaatgtacttcaatagcgttcttcatcctgcctcgcgtttttaaaaggactgagtggagagcggggaagaggtcgtaagatcccctgttagggtgttcataaagtaacttctcctctcgcacagaacgtcttgactaaaaaacaatccgtacagaatgtgcgggagagctgtaggaactcctacggtggcgacagagagggaaacaggcttgttggaagaagcgcctggtcagcgttatcctcgaggatcatgccttcctgttaattccccaccccatcaattctacctttttaggttagactggggagtaactttcccaggtattaaaaatcgtctagagagagcagggcgaaattagagtgccgaagtggcttgagaagcacagtgaatggtggcgaagcccgagccgggtcgcaagacgcccgctggcactgccggcgccatggcggccgccttcggccacggcggaggactcgctttcccaggggcccccgcggtcgcaggggcaacgagcccggccggccctcgcgagcggaggcggggccggggccggaagtcacgtgctgtgacagtagctggggtgaggccgtcgtcgccgcacgggctggttggggctgtgtctgtgggaggcgccggggtgatggcggtggagactctgtccccggactgggagtttgaccgcgttgacgacggctcgcagagtaagggagctgcagggcgagggctgcgggtggacgctccttcggcccgccg

SEQ ID NO: 10357 - DNA, 2300 bp, Homo sapien
tttatttatccattcatcagttgatagacattggatttttctactatttggctgctatgagcatttgggcacatgattttgtgtagacatatataagtatattgtatataaaatgtgtgtacattgtgtgtatattttatacatatgtatatatgggagtggaaatcctgggttatgtggtaactatgtttaactttttgaggaactgccagaatgttttccaatatggctataccattttacattactaccagcactgcatgagggttccagtttctctacatccttgccagcctttattgtcttgattatattcttcctagtgaatgtgaaagctcattgtggctttgatttgcatttctgatggctaataatgttgagcatcttttcatgtgcttatggccatgtgtctgttttctttggagaaatgtctgttcacatcctttgcccatttttaaattgggttatctttttagtattgcattataggacaagtattgacttttaattcccaccacaatcctataaagtagatacaatgtcatctccatttgtaaatgagaaaactaaggcatagaaaagttaagtaacttagtcaagtaagtgacacatttagttaaataatgaatatcaggcagcttgactccagagcctgtgcccttatccaataccctgaactgcctcacaaatactttatatatttgtaaactgaaattactttcctttgacttcttttcttgcaggctggatagacttagtcttactttaaaaatcatccccccccaaatttgtaattgtctctttttgttcctcaacacttctgtgagaatcattgtatgtaagttataggaactctactaggaaactgtcattctcaacctgtactatctctgagggtaataagtttcatatatctgtcacttggcattaagtaatacatgttgattttttaaacagatgctgttgggctttctcgccattaagtaatacttgttgatttttttaagacttgctgttgggctttaagggcctcttctagataggattataaaatctgttttttttctcaactctcagattttataaaagggtgaaatcatctcttagtttttatcttcccctacagaagctttctaatctttacaatcttattatatgacagactccatctccgcagttgctctcttcggaacctctgtttaagttctattattgggcagttattttattgtttttactatacaaggttcttagtattttgggaaaaaccacaaactcagataaaacctctgtaaacaaaaattacaacctaatgagaaagggtatataataacttacttgcataaatagttagttagtatgtaaccagaagggagatctgagatttcacttgataaatagatcacatatagtcaatgatcaggaagaggtggaaattgaacgggctttaggagtgaactccacatactattttaagtgtttctgagcatggatttatacaagaaaagatgtattttctgtcttgtttcattcttaatttattttgaccctttagctacaatatcttattaaatttgtggctgcatagaaaattcaaaaatgatgaaaggtttttccccatgatcataactaatggagtttaataatgttactattaccttattaccttgcattttcttatactgcactcataatcagccaccttatgctccataggacaagtagagtcgtgattgtgtcatgttgggccatttctttccttacgtgttgtctaatgagattgttttggatgaagtagttgatatggtgctaatgttgagtacaggatctaacacaagtttaagtcgaataaagctagcctcaatttgtgtttttaaaatttcagttatttttcaaattaaaagaaatgttcttttcctttgtttctgtagcttttgccttatgaacagtcctctcttttggaactcataaagactgaaaacaaggtacagaatcctaaatctaaaaaattgttttaaaaatgttttagttatctgtaacaatttactttttattttgtttttactcatgaaactaggtcttaaacaaagtcatcactgtttatgctgcactttgttgtgaaatcaagaaattaaaatatgaggtaattatttgaattcttgtcttaaaactttaaaaacatcatttagaagcaagtatgtgtttatatatgtacagtgtgcaataaatatttattgaatgttgaatgaattatttatttaacgtaatactaatacggactaccattcattgagtactta

SEQ ID NO: 10358 - DNA, 2300 bp, Homo sapien
ttcaagcaattctcctgcctcagcctcccgagtagctgggattaaaggcatctactaccatgcccagctaattttgtatttttagtagagatggggtttctccatgttggtcaggctggtcttgaactcccgacctcaggtgatctgcccaccttggaaattggtgtcactcatgtttttgtgctggttgggaactgaacctatggtttctgtgaggtgtgcctgtattgtgtttgctgttaacctctaggtttaggttttttttggttttgtttttgtttttgagatggagtcttgccctgtcacccaggctggagtgcagtggcgtaatctttgctcactgcaacctccgcctcctgggttcaaatgattctcctgcctcagcctcccgagtagctgggattacaggcgtccaccactgcactcagctaatttttgtatttttagtagagacgaggtttcaccatgttggccaggctggtctcgaactcctgacctcgtgatctgcccacctcagcctcccaaagtcctgggattacaggcatgagccaccatgcccggccaggttaaggtttttaagacaacccttaacaagtctgtttaattcttcctaggcccagggaatgtaatttgggtttgcacagtctagtatggtagcttctaactacatgtggctatttaaatgtaaataaattaaaatgaaatacaaaattcacttttttactcacgctagccacatttcaagtccttaatagccacatatagttaatgactagttatatcagacagcacagatacagaatatttccatcatcacagaaagttctgttggagagcgctgctttaagcaggttccactcgaaattgcattatattccatttataatatacttcaaggttacctttagtttatgttttacatgatcacagtttttaaccgattgatctcaactcttgtttacagttgaccctttgaataacatgcttttgaagtgtgcacgggtccacttatatacagattgtttttcaataaatgtattagaaaattttttgaacattagcaacacttttgaaaaaaacttgcagacaaatggcatagcctagaaatattaaaaaaacttgaggaaaagttaggtatgtcatgaatgcataaaatatatgtagatactaatctatttatgtgttaattgacttatgttatccataaggcttttggtcaacagtgtgctattactagttaagtttttgggtagacaaaagttatatgaagatttttgactgcacgagggtcagtgtccctaactttatgtttaagcgtcaactatatatcaatttaaatgttagttcattaggttaagaagataatttttttgttattgattctttttccaggagacatttctatacatgctataataaagtgctaggaaagtaattgtaagcagaaaacataaattctactcttaaaagtgcaaagtaaaataaaaaatatgctttatcttttatacatctctgaacatcgtgtgtatctctttatacaggattatagatttgggttcaattttattactttcacataactagtacccaaatatataaatacatatatatttttcattcacaaagatctaaatattagattagattaagaacctgagctttagttttagtaaaatttaaatgatgaatatagaaatttatcatacactgtatttagtgtatgatatttaaatgtttaatcgtttattattgagagtctgaatttctctttcaatgtttcctgtctaggcctgtatagaacaacaatttgattctctcaatggaggagtatctgtgtcaaaaaatagtacttttgctgaggaatttgcacatagtattcggtcaatttttgcaaatgtagaagccaaacttggtaatgtaaatcgcattttttggtttttgtttataaaatttgcatttccttaaaagcataattgaagtatatttgttctgctttctcttatgttattgatttgtaaggagaaccttctgaaattgaccagagagacaagtatgttggaatttgtggactctttgtattgcactttcagatttttcgaactattgataaaaagttttataagtctttattggacatttgtaagaaggtaagaacttgaaacttatttttcaatttgagcagattaaaaagattgcagataaaactaaatattttaaaatgcattttattcctgtttacaaaaataatttaaaagtattcacttgtaaaattcaagtattccagaaataagtaacttagt

SEQ ID NO: 10359 - DNA, 2300 bp, Homo sapien
tttttctttttgctttagttagtatgtgcttattttttaagaaattatttgccatataaaatcttatacttgacaacagtaaaaaattaggtgctgctaaattgctttataaaggaatttaccaccggggtcctgcttatattcagccttctgttgagcattcgagatatacatatatatttatatttatatacagcttttcagaaacactagaatagtgaagtgacttctgtagaattttaagaagttcaaagtcacatttaaggattttaagcctggttatagtatataaaatttagtatcttaggaaaaatggttaaatttacatgattacaaatgtgttttttgttcttaaaatgaggagtataggaaaacatttagctttgctaattcaattagttaatgtacagtatggcattgtctcatgaatgtaataatttatgttatcagataatttgcgtggagttctctttaagatgatccagataatatttaccaaaaaacatttattcagttctaaaatttgaggattctagttttccctttatcttgctgcatgtagggattatttctaggatcagtttgtatatcctttcatttattttgtatatcctttcatttattcatttatatatctgatatttattgagaacatgctaggcactgaactatgtttaggaatacaaagataaatataaatagtcccagctcatgtaatatcctctgggagaaaaaatgtgtaaacaaatttttagattagaatatgataaaagttataataaaaacttaaaaaggtattgtgatgctcctttgagctctaattagaaaaaactatggaacagtttatatgataccattgggtgttagagtaatatctatttaaagaatgaaggattcttaatagaaaacttgtactatttaaaaggggtctggtgtgatcaaaagaagcataacagtttggaattagactttctaaagtcccaaggccctgctgctgcctagctattttgcctcagagaacaacttccttagcttcttttttgtcacctgtggaatttagaagaatgatacctcatattttagaattacatataaggaaccttgcaaagtacctgaaaaatagtatgtattttatgaatgtcacagcacattctgactaccttttagaatctggctactagtttactttgtagaaaaaatgtagagaagattgttgaagagacaaatattctcaaggctggtggggagatgactgtgggtcatggatcttttaatatttaaacttaactgttcctgtctgcacaaaagataaagtaataagcagccaggtttccctaaggagatagtcttgatttgtcttttaacgtttgatcgtaccttttatatagttctttaaaataacttaaaaattattaggaaacagtataatcaataagtcattatgctgatacaagtttaactgattattttaatgaattataataaaacttgtatgtgtattatgttgtagggccttgatgttttagaaattatgagaaacattcatatatttgtgtcccgatacctctataatctcaacaatcaggtgagtagggtttataaattttttttttttaatgtaggtggagatagttggaaggctgaggggcaaggaattgatttttatgggtgaaaattaaatgaaacaaaaaataattgttttcgaggccttgtttatttttttgccttgattataccagttgtgtatcttttattcgaaatgtttaggacaagaagtgttttggatttcagatttttttttggattttggaatattcgtatcatataccacttgaggatccctaatctgaaaatccaaaatctgaaatgctccagaatcgtaaacttctgaccaccaacatgacgctcaaaggaaacgctcattggaacattttggatttcagattttcggattaaggatactcacctgtactgtcttgattgcattttcaattaaattgtctttaatgaaatagattctaaaattttctttggatacctgtttgaccagtgtttgctatgggttgcgttgttactgagcataaatttgtttcattgcagatttttattgaacgaacaagcaataacaagcatttgaatactattaatattcggcatattgctaattcaattcgaacacatggcacgggaattatgaatacaactgtaagaacttttctttgggggttgagtgggtaatagacccgtttaatagcttggaacgtggttttctcatagaatattgcggtaaacatacacta

SEQ ID NO: 10360 - DNA, 2300 bp, Homo sapien
attcttattttttttaaataattactggagaaatttgagtattttttaagttatatgagtatatgccatagaatctttgggcagaattattaatatataatcattttaagtgcttaatgtagaataactttagctgttattatagttttttctaacacatttcttaaagcatattgtttcaagataacttctttctattcagtagtaaatactaacatctggactaaatttttaatgcttcttagagtatgtaacgtgttcttgctctaactctgtagttgctatctaaaaatagttcaagttatcaaaaattgcattataaaaacagctgttccattagggaaaatggagttaagaatttttgagaggtatatattagtaataagagttgttttggcttaaggttcctataaagtttaaaaaaaattgtaagtagatagctttaaaatctaaatatcacccagcagatgaagctctttattatatttaattttgatcaagaatagtgacttttcatattgctgcccaagttgttaacacatcttcttacatattaaaaccattattacctattgaaagtagctaatagcctataaacagcttttttccatgaattttgtttcttttatacatttgttaattttctatcataattgtattttaactatgatatagcaaaaaatgttcatattcatcttgtaagaatcttttcatcttaagatagtgtcaaactggagggagagtgtcatatttggtaatactatagttaacttggggtgagttctcaccatatttttttaatttgaagggcaatgtactcaaaccattgtagacagcagttaacccattggtaagcttaggaaaaagtctggagttttacaaggcagttgtcagaattcgcttagtgatggagaaaacaaagtggattaaaagcactacaaagaagtatagaatactgttcttgtacttgtgtttgtagtgtagttccagaaaaaagacaagcataaatgagatttctaaaaaagattgaattaatgattgataaaaaattcacaaacaggtgattaattgctgaataagtttcacagtcaaaaaaatgaaacttggttttgtttccagcgtaggctattatagtacttagcacactgtatatcataattagtttttaaacacttctgcatttactcttctagagctgtgctatccatgtatagtcacatgtggctacttaagttaattaaaatttcataaaattaaaatcataaggcagggcgaaaaaaataaaaatacctttttaaaaattaaaaattcagcttgtcagtcacactagcctcatttcaagtgctcagtggccgcttgtgattagtggcttactgtatgtactggatggtgcagatacacatttctgtccctgccaacagtgttgctctagactgtgaactctagatagaaatcatttgtttaatcataagtacttaataatgcctggtatattgtaagcttcagtaaatctttgttgaataaaagatatgattagataagtcattttggaagagctgaattttcaagagacgtactgttttgaggattcacacttaagaacatgaaaagaaatagtattttcgaatgaattaggtaggtgtaagtaaggactgtcttgcatatgtttttaagagtacttgtgctttgaaataaagcaggcctactttgctaactccagcattcacttaatatatgactttgggtgagataataaatctcccaagcctcggtgtccttctctgtaaaatgtgcataatattttataatgagatatacaaggcactgttcttgggctaagtagtgattgagggagtgcccatatttaaaggacttggaaaggagatccatgaagatacacttgtatagattgtatcttcaccaagagggtacctaaggcaaatgtttcagatgaaaaggacaggaatctagattctattctattctatttatagtgattctatttataatttttaaaatgtctgttataggaattctgaagattttcttagcaaaattgtttttctaacatgttgttacatctttttagaccctcaactttgtagagcattccattagttgcaaggaaaaattaaataaaaaaaataaaattggagctgcctttactgatgatggctttgccatgggtaagcttaatggaattgtttttccattaattttatattgaccttgtaatggattcttagaaacatctgcttgagaataggtctatatgttctttatagatttttctttctttt

SEQ ID NO: 10361 - DNA, 2300 bp, Homo sapien
ctttaatgaaacatttttaaatgttcatgttgacataaaaattcctcttatgtagtttctcacagattatcaaaggagaggatatttgccttcagaatttaaatgagaatcaaacaagtgggagacagtgcttaacactgagcagtctatatttaatacatgaatgaatgattggatgaattaacaaatgagataaattaaaaccatttatgcatgtgttgtatttccagatctacttttgtaacttagttgttttgaatttgggatagattttcccatagaaacaatgttgtaaacagttcttaagttccaagaaatcccactaaggctgtttagcccataatgtagcaagaaaatgcagaaaagtaatgggatagcttaaacaatttttgaatgttgaatactagtatttgaagaaaagtaactttaattagaagatgaggtggtacatgaaaaatgctgtgattcccaaggggctgtctgagccctttcaagggttctgagggcactaacttcttgtaatgcatattttcaaattaaaatgtgcacatttatttccctgggtataatactatccttgtactgttctcgcaatcaggatgaaggaagagcatgagtctggccgtgaggaattagatttcagtgagaagagagtctgggacactggatgaggtaaaatgaactgaatggcaggcggtataaaatagaggaaagggaagaaatatggtgtgagcatgattccacctatagggaagacaagagtatggtggaggcaagaaagaatagggaagaaagaatactgtggaggaaaatatggtagatggaggccataaaatggttcaggtcaggttggcgctggccagaccaagggaataatggccttggagttttcaagtgatcaggcagcatgctactatactagactgtcagaggtgtcagcaatgcagattgggtcttgatatacctaagaggtctctgcagaatgcagaatttatatattaccatatcccctctgttgattttggtgacacacatactgcatgatttttttttttttttttgagacggagtcttgctctgttgcccaggctggagtgcagtggtgccctctcggctcactgaaacctctgcctcccgggttcaagtgattcttctgcctcagcctcccgagtagctgggattacaggcgcatgccaccacgcccggctaatttttgtatttttagtagagacggggtttcagcatcttggccagactggtcttgaactcctgacctcgtgatccacccatctcggcctcccaaagtgctgggattacaggcgtgaaccaccacgcccggccagtcttattaacttctaaagaaggaacttcagaaacccttgccttccgtgtaaaaaggtgtcacgttccacttgccagtcttcttccatccctctcccttccttcttttcttcctctggcgtttactaactgaccctgggcagaccacttatttctctgggtcccattttctcatctctaaatgacaacactggaacctagattatctagcccttccaattctaaacatttgattatgaaattctccaaaatcacaaaacataaaccaggaggacgagacctaattatgaccacatcaaatagctgtggtttccaaagtggttatttctgattatcacagacgagtcagttatccagcttttctcctcttttctttgttcccatagcataggcgacctctttgctctcagagctgtttcaggggcgtcgaaatttatctagaaaaagtggtgtgggaagtgtgggtttttccttccattaaaagaaaaaatctgttcgctccttcaactcaaaaggctttctgggtagccataagcagataaaaccttatctttctaccctcgagttcctcttttggacttcatatgcattgacttgacggaccttcagcacagagaacaaacacccgaagggttccctcagcaacgggactggcacccagagccccccgctccccgcgagccggcgagcgcaggcggaagcgcgggcgccacatttccggtgtcgggaccggagctcaccacacttccggtttccctgccgggcgcgccacacttcctgttgatccggctcggccgggggctgggccggcgggcaggcggcggcggccactggccaggcgtggacgcgcgcggggccgccgcgggcacggagtggccgccgcgtcgcctgagcccagagccggggagtgctctcggccgccgcgtctcctgccctctgtccttccaacccagccctcg

SEQ ID NO: 10362 - DNA, 2300 bp, Homo sapien
tctatgattagagattcttaatgaacctcatctctaggcaggaagacaagaacagggctaaaaccataactggtaaagcagcagcagacaatcctatcaggcaggatggggagatgtttggtgttttgggggtttgcacaatgaccttgtttttgtcagcacttagacaagattaccgagtcaccttgttttttgtctcatttcatagtttatagagtggccttgtgtgatattggtgttctatgcaactgtgtttaacaggagaatgcaaaggcccagctgttgagtgtcacagcttctaggccagtttctaggtgtcaaggtccattttctgtctcttacaagtgtcctaaggctggagtctagtgtcagcacagaaataagcaggagaatatctttcggctacttgatagttcccttttccccagttctggctatgtattaggatggacactgaaccaagacagcacaggctggtagagaagcagtacttctagaagtcaactaaaaaatgcctttatttatccaagaattaattatcctctcagcacatggctaccacagctaattttcaaatggagaatgctgtatattttgcatcctgaatgatagaacgcaccattgcctcaaaggccatgttcaaaaacctgccaagtccttgattctggttcatatttttatttttatgtaaacacaacagtatggtttcagggaagtctgttttttttttgttttgttttgtttttttgagacagaatctcgctttgtcacccaggcttgagtgcagtggtgctatctcggcccactgcaacctccacctctcaggttcaagtgattctcttgcctcagcctcttaagtagctgggattacaggtgtatgccaccacacccaattaatctttgtatttttagtagagacagggtttcaccatgttaggctggtctcgaactcctgacctcgtgatccgcccgtgtcagcctcccaaagtgctagtttacaggtgtaagctaccatgcctggccttaggcaagtcttttaactagcatcccagcatcctctgggactctatggcacctgtattcctctgttaacattccttctatattgtaattaatttattttaatctatctgcctggttagactgtctcccacatatttgtatccccggaacttaacaaaggacttggcacaggctaggctccctacaaatattaagtgaatttaaaatggagctttaattcctggcttgaagtcacctcacaaaacatttagtgagtctgtattacaagccaggaggacgctatgaaaaatcagatagtctttccctttaaggaatttgtattcatttctattagagttaataataataatgataatagctgatatttactaaagatagggaactttgttaggtactttatatgtacctgagttactgtcattttataggtgaaacaagggatgtacccaatgggttaagttactttcctgaggtcacgcagctatcacggggcagaacgaagactttaactcagacagtctgactgcagtaacgctggcccaactatcatgttgaaacgtacagcaccgtgcccatccacagttctctcatttatcagagaggaggtcctgaatccaagttattgaaatcgttgcagacatttgttttaaagaggaataggtcaagatgaccaatctggggaagaacttttgccaggcagtgcgtatggggaacagagctgcgttggccttctgttaaagcagctggggatttcggttttggcttcagacctgcacaacattcagtcaatagcatttattgggcgtccactgtgcagggtgccccctgctacttcctctcctccccacatcctggggcagggaggggaagtgaggaaagaaaagcaaagacaaggcgaggaggatgctgagggtgggcaggtgggcacccccaccccgctgcgccggccacgccccttgccgctccctcgccccggggcccactttaaactcccgcccctcgtaataacgaccaatggccgaccgcgaagcgcgcaggaggctggggattggccagtgccgaggttgctggggcgacgggtgggtccggcgggtccccgggcggggcggggccggggcgaggggtgccgggtggtttccgcccggcagcccgcagcccgctgcgccccgggccgcgtctcccggcggtgggagggggcggcccccactcggttcctggcccctcgcggccccgtcagcctcccgctcggggtgcgccgcccttcgtctgggtctccg

SEQ ID NO: 10363 - DNA, 2300 bp, Homo sapien
taggaatgtctagtcagaggaagagagttctaaggctgtagttgctgctgaagacacatagtaaataggggttctgctgtttcaaaaaaaattctaaaagggagaaatgggctaaatttatcaagcatgcttaaaaacaacctgactcataaattggctagaccaattttctacaaaagattcccaggatcataggcattggtatcacctgctgcactttttcaagatgtagactcctgagccaagccctgtacctactgggtcagaagctctcgacatgaggcctgagaagctttattttaacaggtatgaaagccactgagtgttgagactgtctaccctgttcactgctgtattccctgcacctagcagaatgtctgaggagctcagtaaatcctgggtgattaaatggacgaacagatgaatcaataacatgactctgacaaatagggcagagtaggagttctgatttctgctctttcttacatatgccttaggctgcaagttgccttctcctctcttctttttccttttaacgctgtccttagggtcgtcatcacctgattttactgcagagacttggtgaggcagaaaaaggtgaaccccgggcttttccctgcctgagaagtcccaacctgtgagctagatttatatacagcagtggattgagcagtgcttctcaatcctggctgcactttagaatgacctgaggcttggcccgcaccctagacaaattaaatcagaataactggaatggaggtccaggtattgaaatttttcaaaagctcccaagtgattctgtttcatagtgaagttgagaaccactggcaaaccataatatggatacctctaaaaatcttagtgttgagtgcaaaaggtggtaaacgatttatagcacgttactacttaaggatattaaactttaatatacacacaaaaccaagttctgtgttttttggagataatctaaggacatataagaaatcccaggaaggaagacaggagagggaaatgggaggaaacaggagcgagaatagagaataaatggggaaatataaaataaaacaagacagcgagattacacagaccttaaagactaaaaagcgtggctcccaaacatcaaatcaccatagttagtatgaacagggcagtcatgtgtactagacacagtgtaattggtttacacaccttatgtctgttaatcttcataacaactctgaggtaggtgttactatttagagtcattttatagaggaggaaactaaggcttaaccaagatcatacaactagtaagtgacagatttgggtataagccctgtctacctggatggagtccaggctctgtttgctccattcatcacctctttgagtcctctcgagcacctgctggaaagaaaatgtcctcctccccaagcccacgtctctgctaggcagctcaggaaccaccagcacatacttcatcccagcccttgccaaagatgggaatgagaatgaccatccaatgttctgtgcccaatgcagaagaaaacctacacatacaaccttcctgacctggaaacatccaaaatcagcctcagtttcctaatgagcctttccctgcctgaaaagtcccaacccgtgagctagatttatatacagcagtggattgagcagtgcttcccaatcctggctgaagacgagcaatgtttgttgggttcaaggaatagaaaaaagcctcgcatggctggaatagaagaggaagatggtgggtgctgcagcagagaaggcaggggctcagagctcttcacttcccaccagacattccttttcccttggggatggactgagcatgtggaagattttccatgcaacttcatatccactgttcacaacacctgcctctgaggacgtgatcttcctaccaatctcaggacctttcaaaattaattataataaaaatgtatttattgaggcaggcataaatattagtctccattttcttcagagaaaacagaagcatacagcggtagcttgaacaaaatttcccaaccagaaagggatgagggaggagagaccggaagtacaagctcctcttatctgagttgccgccgtctagaggtgagctgattttctgacagccccttctcctctcctcactggatatccagtttccaggtaggtccttccaggtaggcgcccccctgacctcaatgcgtgctccagctctggggtgcattcacaggggtaggacatagaaggtaaactctgaccagctgcatgtgcagctacctctgcagaaaaaatcaagaggcgctggaagc

SEQ ID NO: 10364 - DNA, 2300 bp, Homo sapien
tggtctcatctaacttcaagaggatggggtagtggatttctaccacatcgcaggggaggggaagaagtagaaaatattttaaaatactactgtagacacaatgtgtttatctctacaatagatctgctaaatccatatcttaagagaaaaccgaagctctgagaggttatgtcatttgaccaaggccacacagccaatcctctgggaagccaggactcaacctgcatgccactcatcctgactgtgggatctataggcacaacgtccacaaactgtatagaagcagaacagtttcaggatgggggtgggtggcagggaggccctgcaaatgcggtggacagaataggaattgaataggcatgatgcgcctttgtgtctgtgttctgtcattgctcctggggaagggaagaaggggcagggaagtttgtgtgaaatatcagtagaaggaaagtttggacaggtaagaatatcacgcgtcagagtacagcagagacacgtgtggaggatgagggcagtgtttcaggccattactctggcagcagtgaggaggctcccggggagggttggggagagcgggctgttgctggagtccggggtaaggtgaccaggggtagacaggaatgaaggcggcgggaatgtagaggaagggctgcacctgagagctgcagaggaggccccagtgaggtccactggtggaaaagaaccgccatgcgatctgcagaacaccagaccttcttcagccttcactcttcccaccctagtctggtacattgcaccacttgttaaaaaaaaaaatttccctaagacctctttttctctagccttcttccttatttttcatggtctcttcttagaacggcggcagccacgccgcggtgggaggcccttcctgcctgacccttaccgtgcggggtaccgttcctgtcaccatcgccaggatctggccctttcagtgaaaggaaatctcccaaggcctaaggaggcaagaggcctgcaaatcgcctcctgctcagcaaacgggttgctcagcaggcccggggtcctggtccaccccaggtccctggtttgcccacctccgatggcggccttcgctggcagggtgggcgcctctggggagccagctccgtcccggcgcctttagagccccatctcttccacgtccctggccttcctccccttccaggcggctgtccccgccggggtccagatggtgtcggagggccggcggttcgacggcgggcccggggttcagcctcccggcctccctccgtccctgactctcctttcttcggagagggcgcgggggccggggccaaagcgccgctcttggggttctcctggactcggagttgccccaggcgggcgcagctctgccccgcggggtgccagcctcgggcgggcaaggtccgtgagtcaccgcctgtaaccgaacaccaggcctccctgccccctcccccagctccggccgccaggctgcggcgacacctacaagaaaatgaaggggcgcccaggcccgcggcggccccggccgtatcgcgagcaggtcccggcggcccccggctcgcggcgctctttcttccccggccccggggctcggccagccgcaaccgccgccccggcgccagcaggaatccaggccgagcgaccggccccggagcccgaggcggcggagggcccgcggtagctgcgactggcgagcccgagagcgcccggggagggggcgcccggcttggaatttcccggtcccttccggcccagcgaggacaaagcactcctggccgccgccgccgccgccgccgtggcctacgccgcgccgcacaaagggcgagtcgcgacacgctcccatccccctcccagctcacggcggccccggccccgggtggctgcagggaggtgggggaagccctggctgcaccgcccctcgctccccctcccctggggccgcgcgagcgccgcccccgccccgtctgcgcgtcctcccggggaggggttggggggcgcggcgccccacataacactccccctcctgcgctgcgagccaccctctcccctccctcctgcaaacaccaccgcctcccctgccaccgccgccacctcgcccgacgctccacagctcgccgcggccggggggcggtgcgcggaccgtgcgcgccgcgggcgccagatgtgcagtccccgccgccgccagtgaccgagccgcagtccgagcggtatcgggccgcctccctgatgctgcgggggcgaccttgagcgtacagcggcttccctcggtggggaccccgacatcccagcgctgtgcc

SEQ ID NO: 10365 - DNA, 2300 bp, Homo sapien
tcctggctcatcctggctcaaaaagctcccccactgagcacctcacgacccccacccctgcccgccagagaacaacccccctttctttgactgtaattttcctttacctacccaaatcttataaaacggccccacccctatctccctttgctgactctctttttggactcagcccgcctgcacccaggtgattaaaagctttattgctcacacaaagcctgtttggtggtctcttcacacagacgcacatgaaagttaccatcgccactttgcagattagagaactgaggcatagagggggaaaacaattatccaagatgatcataagaggtggaacagggatttgaacctagtcactctgcctctagatctgaagctcttaatcaaggagcctgggctcttgttggagaaaatgctttatcgatgtgaaaacattcacacacaatgcctgatagcattgtgctgaagtgtggttccaattataaacgtggtaggaattcagtctggagaggaactcccagtgcctgggcatgactgtgtgctaggcattgtactgggtgtttttcatccttcccatttaaggagacggagcatggcatatatgaaaggagaagggggagctttggaactggacaggtagggtttaaatcctggtcctgccatttacaaactgtgtaacctctgggaaattacttaacctttctgatacggtttcttcaattgaaaatagggattgtaaacagctactttacagaggagggtttactgtcataaaacagtaccagcctatggtagatgatgctgttgattcaatagatactgatgaagtcccacatatctgggagtaacactatcagccagaataagccaggttatgctgctttaacaaatcccactgacttaacataaataaagtttaatatttgctgacactacttttccaatgcagattggctgggattttctgccatctttacacagagactcaggctggcttggggaggctccaactttgtaccaccatgattgtcaagataggaaaaagaagacatggggatttgctcactggctcctaaaggttccaagtgaaagcaacacaatcacttctgctctcattccattggcctaagcaagtccgatggtctcatctaacttcaagaggatggggtagtggatttctaccacatcgcaggggaggggaagaagtagaaaatattttaaaatactactgtagacacaatgtgtttatctctacaatagatctgctaaatccatatcttaagagaaaaccgaagctctgagaggttatgtcatttgaccaaggccacacagccaatcctctgggaagccaggactcaacctgcatgccactcatcctgactgtgggatctataggcacaacgtccacaaactgtatagaagcagaacagtttcaggatgggggtgggtggcagggaggccctgcaaatgcggtggacagaataggaattgaataggcatgatgcgcctttgtgtctgtgttctgtcattgctcctggggaagggaagaaggggcagggaagtttgtgtgaaatatcagtagaaggaaagtttggacaggtaagaatatcacgcgtcagagtacagcagagacacgtgtggaggatgagggcagtgtttcaggccattactctggcagcagtgaggaggctcccggggagggttggggagagcgggctgttgctggagtccggggtaaggtgaccaggggtagacaggaatgaaggcggcgggaatgtagaggaagggctgcacctgagagctgcagaggaggccccagtgaggtccactggtggaaaagaaccgccatgcgatctgcagaacaccagaccttcttcagccttcactcttcccaccctagtctggtacattgcaccacttgttaaaaaaaaaaatttccctaagacctctttttctctagccttcttccttatttttcatggtctcttcttagaacggcggcagccacgccgcggtgggaggcccttcctgcctgacccttaccgtgcggggtaccgttcctgtcaccatcgccaggatctggccctttcagtgaaaggaaatctcccaaggcctaaggaggcaagaggcctgcaaatcgcctcctgctcagcaaacgggttgctcagcaggcccggggtcctggtccaccccaggtccctggtttgcccacctccgatggcggccttcgctggcagggtgggcgcctctggggagccagctccgtcccggcgcctttagagccccatctcttccacgtc

SEQ ID NO: 10366 - DNA, 2300 bp, Homo sapien
ttctgctgtctccccgcgccacaggtcagagacctgtgccctgttgaacctagaggctcctacaatagctcctggtatttagctgaagtagggtgttcctctctgtctggggcagatggttgtatttctagtccagaacctgctataatttactctgtcctcccacactaatagcgattcttctatctgccagcttggcttctatagccttctgcaatctggacccgctccacccagttcatctctttcttctctacatgtagaacacaccctcatggccaacaggtgtcctgggctcaccccatttccgccacagaaatatcctccctgctctcctcatatgcaaatcattcttcaaggcactgctcaaggtctttctgcccccaaagcctgcccatgtacaggccaatggtttgctttccaaatctctttacatttatgttcccaatttacctaagttagccctcaacaggtttctgtatatatctccaagtgtagtgcaggctccttgagggcaggcacacaagtgttcattcattcactggaggcttttagcaacaccttataaagcgagaaagaaggagaaatataaactatggttgcttccagtcctcagggaggggagacatacctggcacacagtgggccctcaacaaaggtttgctatattgaactaacatatatgcctctcgttgcaattacttgctaagtcccatgagaggtatcaaatggtgttatagggaaagcatcatcaaagaggtggcatttgaaccctataggctttaagggcagggcatggttttgtctttgtttacagaactgggaggaggttacagacagaagaaacagcattcctactacacacagtgccaggtgcacacagtgccaggcacacatcactcaccagaaactggggaaagcagtggaattgagtgagttctgtccctgccccggcaccaattagactgagtgagtgggcaagttgcttaacttccctgggcccccgtttccttcccattctgaagtgattaagctgcacagacttcagaaagaagcagactgagtgaggttcgaatgatgactatatgtgaccttgagccaatccgaagccggctcgctcagtctcaatttccttcctataaaatgggtaaaataatttctacctcacagggcttttgtgagatttcgagaacatatgtgagtcgctaaccacacagcctggcaataccagatttccttttacaaaagtaggggtgacaacgctgatctgcctctttctgtgtggctgctgctgcctccgcagcacccatcccagaggctgtcaggagtaggggccgtggacaaacttcatgaccccgaaagagaaaacagagctgaaggggcttcggggggaaaaagtaaagagctggccacagcaggctaacttggctaacggggacacttggtgaatgcgtccccttgaacagacttaccacagtcgagaatctttgctaactcgcatcaaccatgcctcccaagctggctggattttggacagccttttttgtctccgccttcaaacccaaggcaaaggacaaggcccaaccccatggcgggctgggagagtgaaagcagggggagtcccccaattcccagcggaaaggaagggcgatctgttcccacccgctgactcccactcccggggccagggctccttgggcgccccccttcatttctctcctctccgcacaggtcgggaagggagggggtcgcgcttggcccgcggcgcaggttcaccccggctttcgtccctccgaccccgcctggccgcccatccccgacccccgtggaccctgctcggccgccccggctggggtcgatctggccctccgcccccagcctgcgtggaacccgccgggccgccagccccacctcggccgcgtcccctcccctccgctccgctcttctcccctcccctcgcggccacctcggtgcccaccccggcctccgcagaccccgccgggaccccgccccgcgcccagccacccccgcgccggcttcccggcccccgtagaccccgcccggccctccctctccggggtcgtggcggcggggaggaggggccgccgggccggcgtgcgtggcaagctctcccggctcggctcgctcggcctcccttaccgggaggcggggtcggcgccgcggcggcggaggcaggccccctcctcccgcctcctcggcccggcctccttccccggccgcgcgtcctctcgccgctccgacgccagcagcgcccgcgtgccgctcgcccagtcccgggg

SEQ ID NO: 10367 - DNA, 2300 bp, Homo sapien
ataaggctgagaggttgcaaatccaactgtaattacatttttagatttttgtcaatgatttattataatttaaaactcagatttcagatgtgtaaaaagaaaatgagtatttctatttcttcatcgaacaaaaattttgatctgcccttagtcttttgccaagagtgatagaccacatttagtctaccgtgtaatttacagggagaaaaaaaaactgtattactgtgagttctctaagtggttcaaaaaggtaagttagaaaaactaggtgtaataatatgtcttcttcaaataaaatgctaattattttacttctaaagaggttgccttttcagattttgttgttttttttttttcctcagaaagccataaacataacctgagcagggaagattttgtgttatgactgtctgagccctctgagcaacaatgtgatacaaggctcatttttgagggaactgccttatattttacagcactccattttttcaaagtgttgtttttgttttgttttgttttgagatggagtctcgctctgtcgcccaggccggagtaaagtggcgtgatctcggctcactgcaacctccacctcccaggttcaagcgattctcctgcctcagcttccagagtagctgggattacaggtgcgtgccaccacgcccagctaatttttttgtatttttagtagagacggggtttcaccgtgttagccaggatggtctcgatctcctgaccttgtgatccacctgcctcggcctcccaaagtgcttggattacaggcatgagccaccgtgcctggcccaaagtgcttttatacacaagtcaggccaagggcagttggtcaggtaattcacagaagggttttcagatagcaagttatttaacattaaagtaacagaagatagtatttccagcatcttttcttatctcagcttggttctctgatgttacagttgaacttgctttgacaaaagctgctttcctggtggctttgagagctacatatctgaactttaaaagaagtgtcatgcctaggatcaggcagctggtcactccagtataaaggacaactaccctgactcatggtcacctgctccaacttatgtcatagctcaaaacaatacttaaatccttacaaagctaacaaaggaagtaatgttgccatgtgtcattgtcacagaattaccagaagtttgggggatttgggtgttcatctttctattgtggagtttttagggtggtgatggcagttgtgtggtggttgtcatttggcaggaattgaaattggaggcttctgtcattctgattacttatccaacgaatgacacaaataagagcatgtttgtagggaagaactcaggtggggacagcaccttctatttaatctcttaacctgtattattaggttgtatattttaggagaagagaggaaagtggcaaaaggaggcacagatacaaatttatacagatcaccagctaagtttggccacagtggtttgccaaagaatttcaataactaatacttagagtgcttactgtgcaccctgctaagcacttcacatgctttatttcactttatcctcaaaataacccaaggaaatagctatcattgttatccccagagaccaagatctcatggatagtgaatgtcagagccaggactggaaccatagaggagtctgtgttgtaaccactgaacaactgactttctaccctgctttaaaatgttgcctgttgtttgttgttgttgtttttgaacggtggtggccaatctgcctccacaatccagacataatttcggcactaaacagaaatactttagtctatacaaacttcatgtaagtagttcctgcatgaaactatttcccaagtaatacagcaccgatttacacctggcagaaggcatagttttgatgtgaacagttgggggaagcttgtttctctacaccctcaagcacgcccacagcaggagctgagcagcaggccagacggcacagagccctcctgggactggttatttacattaaccaaggtggaaacttctcccggagataggtgctgccaagaaccctagaggaagtaagacgctttatcttttgcacgcacgccaagtcttcagagggcctggatgggtgtgactccaaggagctaatcgtcccgtgcaggtgcaaatctagacccgtgtttatgtggaggtgtagacgcaactggagatgacccggttagtggctgacgtgcgtgggaaagcccaccagcagcgttgttggttgggttgtctctgtaagtgtggacagtgtgtt

SEQ ID NO: 10368 - DNA, 2300 bp, Homo sapien
agttatttaacattaaagtaacagaagatagtatttccagcatcttttcttatctcagcttggttctctgatgttacagttgaacttgctttgacaaaagctgctttcctggtggctttgagagctacatatctgaactttaaaagaagtgtcatgcctaggatcaggcagctggtcactccagtataaaggacaactaccctgactcatggtcacctgctccaacttatgtcatagctcaaaacaatacttaaatccttacaaagctaacaaaggaagtaatgttgccatgtgtcattgtcacagaattaccagaagtttgggggatttgggtgttcatctttctattgtggagtttttagggtggtgatggcagttgtgtggtggttgtcatttggcaggaattgaaattggaggcttctgtcattctgattacttatccaacgaatgacacaaataagagcatgtttgtagggaagaactcaggtggggacagcaccttctatttaatctcttaacctgtattattaggttgtatattttaggagaagagaggaaagtggcaaaaggaggcacagatacaaatttatacagatcaccagctaagtttggccacagtggtttgccaaagaatttcaataactaatacttagagtgcttactgtgcaccctgctaagcacttcacatgctttatttcactttatcctcaaaataacccaaggaaatagctatcattgttatccccagagaccaagatctcatggatagtgaatgtcagagccaggactggaaccatagaggagtctgtgttgtaaccactgaacaactgactttctaccctgctttaaaatgttgcctgttgtttgttgttgttgtttttgaacggtggtggccaatctgcctccacaatccagacataatttcggcactaaacagaaatactttagtctatacaaacttcatgtaagtagttcctgcatgaaactatttcccaagtaatacagcaccgatttacacctggcagaaggcatagttttgatgtgaacagttgggggaagcttgtttctctacaccctcaagcacgcccacagcaggagctgagcagcaggccagacggcacagagccctcctgggactggttatttacattaaccaaggtggaaacttctcccggagataggtgctgccaagaaccctagaggaagtaagacgctttatcttttgcacgcacgccaagtcttcagagggcctggatgggtgtgactccaaggagctaatcgtcccgtgcaggtgcaaatctagacccgtgtttatgtggaggtgtagacgcaactggagatgacccggttagtggctgacgtgcgtgggaaagcccaccagcagcgttgttggttgggttgtctctgtaagtgtggacagtgtgttggtgggcacccagttccgattgccccgtctagacaggggtgtgcgggcactcaatgttccacgcgcggccgggagctcgcagtgtggtccacgccagtgcgcctggaagcccaggggatctgtccggcactccactggaggcttggcccgcggcttcgcccacctccccagagccccgctcagcccccgctccccccgctcagcccccgctcagcccccgctcagcccccgctcagcccccgctcagcccccgctcagcccccgctcagcccccgctcagcccccgctcccccactcggccccgcccccagtgccctggcaggccccgcccccaacgccgggcgctcccgtcggctcggcggcctcagttccgtaaacacttctcaccccgcccccggcagcccggaccgcaccactcgccgcgcgggggaaccgtgccctctcgcatccgaaacaccctcccatccgagctgttctcggcctctctggttcaaactgacgaagactgtttctctaataggttcagtctgtgagcgctcggctttcggagactgaagggccctggatccccttgccccgtcgcgccgtcgtccccccgctatccggttttgtgatggccgcgccgtggctgcctccctagagtccctcagggccctttaaataccgcgttgggggggacactggggctgggggggtttgttgggctggtgagttttcgaggtgactgtgctgtgctcggtgaggggacgcccagagagccctgacccggggtcactccgtcgccgttctcctcttgtctacgtgctggacccggtgcgtatccatcacgggggaggcgttgccggctcggaggtgaccggccaggtccaacgga

SEQ ID NO: 10369 - DNA, 2300 bp, Homo sapien
tttatttcactttatcctcaaaataacccaaggaaatagctatcattgttatccccagagaccaagatctcatggatagtgaatgtcagagccaggactggaaccatagaggagtctgtgttgtaaccactgaacaactgactttctaccctgctttaaaatgttgcctgttgtttgttgttgttgtttttgaacggtggtggccaatctgcctccacaatccagacataatttcggcactaaacagaaatactttagtctatacaaacttcatgtaagtagttcctgcatgaaactatttcccaagtaatacagcaccgatttacacctggcagaaggcatagttttgatgtgaacagttgggggaagcttgtttctctacaccctcaagcacgcccacagcaggagctgagcagcaggccagacggcacagagccctcctgggactggttatttacattaaccaaggtggaaacttctcccggagataggtgctgccaagaaccctagaggaagtaagacgctttatcttttgcacgcacgccaagtcttcagagggcctggatgggtgtgactccaaggagctaatcgtcccgtgcaggtgcaaatctagacccgtgtttatgtggaggtgtagacgcaactggagatgacccggttagtggctgacgtgcgtgggaaagcccaccagcagcgttgttggttgggttgtctctgtaagtgtggacagtgtgttggtgggcacccagttccgattgccccgtctagacaggggtgtgcgggcactcaatgttccacgcgcggccgggagctcgcagtgtggtccacgccagtgcgcctggaagcccaggggatctgtccggcactccactggaggcttggcccgcggcttcgcccacctccccagagccccgctcagcccccgctccccccgctcagcccccgctcagcccccgctcagcccccgctcagcccccgctcagcccccgctcagcccccgctcagcccccgctcagcccccgctcccccactcggccccgcccccagtgccctggcaggccccgcccccaacgccgggcgctcccgtcggctcggcggcctcagttccgtaaacacttctcaccccgcccccggcagcccggaccgcaccactcgccgcgcgggggaaccgtgccctctcgcatccgaaacaccctcccatccgagctgttctcggcctctctggttcaaactgacgaagactgtttctctaataggttcagtctgtgagcgctcggctttcggagactgaagggccctggatccccttgccccgtcgcgccgtcgtccccccgctatccggttttgtgatggccgcgccgtggctgcctccctagagtccctcagggccctttaaataccgcgttgggggggacactggggctgggggggtttgttgggctggtgagttttcgaggtgactgtgctgtgctcggtgaggggacgcccagagagccctgacccggggtcactccgtcgccgttctcctcttgtctacgtgctggacccggtgcgtatccatcacgggggaggcgttgccggctcggaggtgaccggccaggtccaacggaggggacaccgctgcagcccgaaggctcccctgccctatctcggaactccatcctgggaaggcggggtcaggggccatcaagctcggctcctagttcatgtcttcccactccgcgtccccttgtttgacctcgaactgccgtcccgcgtgggagcggggagcggggcaccgagtggccgccccgcgtgtcggggtggacacggacttcgggcctcggaggccgcttcgccgctgtttaaatcctgctggacaggtaccagcggcatcccgccatcaggggcccagggcacccccttcccccacactcctcggccgggctggagtagggaactgagccagggtagaggcagggcgggcccggcagcgtgtgtttgggatttgttgccgtggtttccccggcactcagctctgcctccgccgtcccctcccccaagggtttgttttgacaggaaacctggtgctgctggaggggaggggcggccagaggacgtgggtgaggtcgtgcagactgctgctgcgtccccttgccgggacctttggttaaggggaagaggtggagaaaagccgattgggcctgggctcgaacgctgaaccctcaggtgttgcttgtgcttcccaaagctgctactgtaggtggcaccactgggggtaatagcaatgatttgaggtggcatatggatgaacatagtta

SEQ ID NO: 10370 - DNA, 2300 bp, Homo sapien
gcggctgaggcaggagaatcacttgaacccaggaggctgaggttgcagtgagccaagaccgagccactgcactccagcctgggtgacagagtgagactctgtctcaaaaaaaaaaaaaaaatgcaaatttgcagccagcgcggtggctcacgcctgaaatcccagcactttgggaagccgaggcaggcggatcacctgaggtcaggagtttgagcccaaactggccaatatggcgaaaccccgtctctactaaaaatacaaaaattacctgagtatggtggcacgcgcctgtaatcccagctactcgggaggctgaggcaggagaatcgcttgaacctgggagggtacagtgagctaagattgcactactgcactccagcctggacgacagagtaagactccatccccgccccccaccaaaaaagcaaaatttcagccccaatttaccaatcagaaagctgagattagtttaacaagctctccaggtgattctgatacaccctaaagtcggagaatcaccttgataatggaaagcaaagaagactttggcacagacaaccaacacacttgagccaaccttgagatcctctgccatctataaatcactttcacagtcccttctaggctagatgctaaattggttgcaatctggtaatgcacaatgatgagacacaagttgtatcttgtctctgtaataagtaaattgtaagaacttcaaaggcagggttgattctacttttggtgttttttccattcttctcgtatttcagatatcagtgcaatacttagaaaatacggccgggcgcggtggctcacgcctgtaatcccagctactcgggaggctgaggcaggagaatggcgtgaacccgggaagcggagcttgcagtgagccgagattgcgccactgcagtccgcagtcccacctgggcgacagagcgagactccgtctcaaaaaaaaaaaaaaaaaaaaaaaaaaagaaaatacaagtactgaaatttaagtagctctttagtaaataagaataattaacctggtgcaagggttctacctttatgagggagaaattggaaagcatatatgtacttacaaattttcataacttttcttatcgttgtaaaatatacataaaacttagcattttaaccctttaaaatgatgtacaggtcagcagcattaaatacattcacactgttgtgcaaccatcaccattctccatttacagaacttttgcatcttcccaaaccgaaactccgtacccattaattaattggtgcattttgccttgttttttctaataggatttttctttctgttgatttgtatgagctcattttaaattagagagaccagccctttgtcttctgccaatttattttttattaattctatttgttggtgattttttaaaatctgttcagaaaattaaaaattttccgtggaatcataaaatcgtgtttagattataaaatcctttatgatttgactgttgccgtcttgaaagtcttcaacatctcaatgttatgaatatctgcacttacattttcttctaagtttttgttaacatttcaatatttaatccacaaaagattcacttacatgtattttttccccaaatgggtaatcagctcttcaaacattatttactggacaggccatccttcccctactaacgtaaatgtcatcttttcatattaaatttctccatgcgctgggtatttactcctacatcttccatctagtgcttttgagaattttcaacactcttccattacacgcatgtaccatcatttatttaatcaatcttctattggtaggcatttgggacgtttcctgctcttccatactaaacaatgcatagaattttggactacattaaataattctctgcctcagtggttcaagttgcgtaaattatgcgtttacacttttcttcggattacttttaaaatgacaaccactatgttttgctggtctcaattaccagagaattggcaagaaacctgacagctggggcttaggattccctgcgccagacctccgagctacaccagagggcgtactttccttactcggcctcggccacatccgggttccaccgcagattcgggcagggagcgggcggaacctttctaccgcgtctctagctaacacgcacggcggggacagtttaggcctccgcgcaccgttcgccgggagtcttgcagtttgcttggtgcagggaaggcgggcgcggaggttctatctgtttcttcctccttcgtgagcagcatggacgtgctagcggaggagtttgggaacc

SEQ ID NO: 10371 - DNA, 2300 bp, Homo sapien
agtaagactccatccccgccccccaccaaaaaagcaaaatttcagccccaatttaccaatcagaaagctgagattagtttaacaagctctccaggtgattctgatacaccctaaagtcggagaatcaccttgataatggaaagcaaagaagactttggcacagacaaccaacacacttgagccaaccttgagatcctctgccatctataaatcactttcacagtcccttctaggctagatgctaaattggttgcaatctggtaatgcacaatgatgagacacaagttgtatcttgtctctgtaataagtaaattgtaagaacttcaaaggcagggttgattctacttttggtgttttttccattcttctcgtatttcagatatcagtgcaatacttagaaaatacggccgggcgcggtggctcacgcctgtaatcccagctactcgggaggctgaggcaggagaatggcgtgaacccgggaagcggagcttgcagtgagccgagattgcgccactgcagtccgcagtcccacctgggcgacagagcgagactccgtctcaaaaaaaaaaaaaaaaaaaaaaaaaaagaaaatacaagtactgaaatttaagtagctctttagtaaataagaataattaacctggtgcaagggttctacctttatgagggagaaattggaaagcatatatgtacttacaaattttcataacttttcttatcgttgtaaaatatacataaaacttagcattttaaccctttaaaatgatgtacaggtcagcagcattaaatacattcacactgttgtgcaaccatcaccattctccatttacagaacttttgcatcttcccaaaccgaaactccgtacccattaattaattggtgcattttgccttgttttttctaataggatttttctttctgttgatttgtatgagctcattttaaattagagagaccagccctttgtcttctgccaatttattttttattaattctatttgttggtgattttttaaaatctgttcagaaaattaaaaattttccgtggaatcataaaatcgtgtttagattataaaatcctttatgatttgactgttgccgtcttgaaagtcttcaacatctcaatgttatgaatatctgcacttacattttcttctaagtttttgttaacatttcaatatttaatccacaaaagattcacttacatgtattttttccccaaatgggtaatcagctcttcaaacattatttactggacaggccatccttcccctactaacgtaaatgtcatcttttcatattaaatttctccatgcgctgggtatttactcctacatcttccatctagtgcttttgagaattttcaacactcttccattacacgcatgtaccatcatttatttaatcaatcttctattggtaggcatttgggacgtttcctgctcttccatactaaacaatgcatagaattttggactacattaaataattctctgcctcagtggttcaagttgcgtaaattatgcgtttacacttttcttcggattacttttaaaatgacaaccactatgttttgctggtctcaattaccagagaattggcaagaaacctgacagctggggcttaggattccctgcgccagacctccgagctacaccagagggcgtactttccttactcggcctcggccacatccgggttccaccgcagattcgggcagggagcgggcggaacctttctaccgcgtctctagctaacacgcacggcggggacagtttaggcctccgcgcaccgttcgccgggagtcttgcagtttgcttggtgcagggaaggcgggcgcggaggttctatctgtttcttcctccttcgtgagcagcatggacgtgctagcggaggagtttgggaacctgactccggagcagctggcggcgccgatcccgactgtagaggtcagtgccaggcacgcagggagcgtcagggacaaggatgcgccctgagggggcgttgcccggagtgctcgggccgccaagggggcgggctggcggtttgtgcgcatgcgccgggcttctgcgcatgcccagagcgtcgcgcttgcgagtcttttttccagagccggcctccgcgtgcgcgagtgaaggctgatcccagaggagctgtcagccgctgcgggggccgagaagccccgctgctggctctagggttggagctcttccagcataggtgtgcgtggggaggactgaccctcgcacttactgtgggggacgtattgcatgtttgcagtcttacagaggacacgggg

SEQ ID NO: 10372 - DNA, 2300 bp, Homo sapien
cacatggacacggggtggggaacatcacacaccggggactgttgtggggtggggggaggggggagggatagcattgggaggtaatacctaatgctaaatgacgagttaatgggtgcagcacaccaacatggcacatgtatacatatgtaacaaacctgcacattgtgcacatgtaccctaaaacttaaagtgtaataataataaaattttaaaaaaaagaattgttgaatcagagagcagatatgtatataatttttatatataccttgttccaaaatgattgtaccattttgcatttacaccagctgtgtatgagagttgttttttgtttttttttttttttgagacagagcctcactctgtcacccaggctggagtacagtggcatgatctccgctcactgcaatctccctttcctgggttcaagcaattctcctgcctcagcctcccaagtagctgggactacaggtgtgcaccacgatgcccggctaatctttttgtatttttagtagagacggagtttcgccatgttggccaggctagtcttgaactccttacttcaggtgatctgcccgcctcggcctcccaaagtggcaggattacaggcatgagccaccacacccagcctgatagaaagttcaggttgcttcatgtcctcataatatctggtgttgttagtctttttaattttagccactctaatgggtgtatagtggtatctcatggttttagtttttatttttatggtaacaaatgatgttgagcccttatgtgtttattggctatttgtattttcttctctgtgaagtgtgagccaaatgttcatttttcttagtgaattgtctttttattattgactttaagagtccttttaaaaacaaatcctggatgtaacttccttgtcagcattatgtattttctcccagtccattaactccctatttgttttcttaattcttttaattttgaaaaaacttaggaggatttttttatttgtttagcttttatatttattgctctctgtgttctgtttaaagaaatcttgcctaccccaaggtcagaaatatattcttcaaagttttcttcttgaaactttatagtttttatggttaggtctaaaatccatcttaaactaatttttatatttgttttgaggtaggggtcaagattaattttttagtttatggatagttgtttcaacaccatttgttgagaagatttttccttcctcattgaattgctatgatactttcatcaaaagtcaactgaccatttagtatgtgtttatttctggactttttattctctttcattgatttatttgtctatccttgtgccagtatcacactgttttgattacttaggtttagagttaaaaatcaggtaatataatactccaacttttttctttcaatcctgttttcgctactccaggtcctttgcatttccatgtaaattttagaatctagaattttagaattagtcagtttttgctttttaagcctgctaagcgtataatgaacagttatgaatgtattggtcagtttggagagaattttaacattaaaccacttttaataccattgaatcatccagtccacgaacatgtcatgacccttaatttatttaggttttgttttctgtcagcactgttttgtagctttcaatgtaggggtcttacatggtatgattcatttttgagaggaaaaaagtactactataaaatttacctgtggttttctctgggtgaaggactgatggctgctatatgtctacacacacacacacacacacacacacacacacacacacacaaatatattttacttgtgtctgtattttctaaatttcctacaatgacaatgtatcattttttttagtaagagaaaaaagggaaccagtgtgttaggcagtatgctatgctttttgtcattgatttatgataaacgttgattttcaactagacccagtacagctttctctataaccagggtctttatctctttcgctcatactgtacatgtggttaggtgcttgctaaactacctccagtgatgtcattcaaacattattgtaatctgttttttataggcattaaaatatatagggaacaaagtaagaaggcaaaggatgtggggaggtggaccaaagaaaaccaaaatagaagaagcaagagagctcctggcttccaccattctgacccatgtcccagtgagtaacacttcgttattgtgaataaggactgtggggtctgtgaattcctgttagagaactgtgataagagtttaccttatttaaag

SEQ ID NO: 10373 - DNA, 2300 bp, Homo sapien
agcctcatgacattgaacaatactataatctatggatcttattcaaattttgccagttgtcccactgttgtcttttttctgatccagaatcacacattgtttttagttgtcatgtctccttgtctcttttcatctgaaagagtttttcagtctgtctttatttacctttcgtgaccaagaaacttaagggcactggccagttattttatacagtctctcatttcaggccagaagttttatatttttatgtagctgcatttattaatgttttcctttacttattttatacaatgtcatcataatgactgtaatgttccaatgtctgggagtaattgttaatgtaatcagttttgttgggcatttatgatgtcgtcagcatttacaattacaaatagtactgtgctgagcatttctgtatctaaatctattttatatccttgcttgttatgaagagaaattcccctgagttaagggatatatatattttttaaaggcatttgtgcgaatcaccacagtatcccctacaaagttgtactgctttgcattgctgccagcaaagtagtgagctattttcagatgtaaactgtactttgtattactaatgttcattcttagaaatgaccatcttttgttttttaggcatgtggtttggttaaaaacttggcccttatgacacacatcacaactgatatggaagatggacccattgttaaattagccagtaacttgggagtagaagatgtgaatttattatgtggggaagagctctcttacccaaatgtgtttcttgtctttcttaatggtgggtatattatagagacatgttggtcctagatagtctgtgaagagggggagggaatccattattatcctggtatttaaagcacagatagactttaattctgggcccaggttgaccttcacttaaaggtagaaaatacaatgataacagaaacagttactttgttggctgggttatccaaggttctgagaggatatagctatcagagctaaagggtaactttgcagaaagtggctgctttctccccttttgcagttgctggcatatccttagtggaatacggttcaacatggtatctttaagtacaagtcaaatattggagtcattctgcaaaaattatcagatcaactcttataatgaattgactttgtctagccatctgataatcaatatgtcagcagcctgtgataagaggatccctctcctttggctcacactccagttatttctttcatatacctcttcccgtctccttcgaagtcttccagagacttagcagcaagtgtgctctcttcctttctgcttttgatttggtgctgtgtgcctgttctctccctagtatgctccatgagcttatcccttatcacttgtctgttctctcttcctctcccccttcctctcattctaggaggcattaactcttttttatatctgctggtgaggaaggggtcagagcctcagcagggctgttaactgactgcctagttcattgtatcccagaggctaacattgagtgagcttttactctgcactttcacccagtgcctctttgaatcctcccgctaaccttgggaagcaaagttcattttcctcatttcacaaatgttgattacaacaagaagcagtttaataatagcagttagtaggtgctaggcagaattctcagtactttaaatgatcagctcgtttaacctttactgccagcctgtggaagtgatggagccagtgttcaaacccaggttgtttggaccccaagttcatgccccagcactgtgctgaaagatgaggaaaatgaagctgacttttccagtattcctcagcctgcatgtggaaggactggcccttaagcattcttcctttgttgcttccctgcaaccttgtggactggctgcaggtgttaataatggtattttcaaataactgcttagtgctgattactatttttattggttggatatattaaatcaggttgcatttattttttatttctgtcttacctgttctttctttttgcctaggtaacatcttaggtgtcattcgagaccacaaaaagctagtgaatacatttcgactcatgagaagagcaggatatatcaatgaatttgtttccatctcaacaaatcttacagatcgatgtgtctatatttcttctgatgggggaaggctatgcaggtatatatgcaggttactaaaaagagtttttaagaatctctttatatttgctcttgaaagaaatagacttgtttttatttttgaaactgttttaacctctttcatt

SEQ ID NO: 10374 - DNA, 2300 bp, Homo sapien
aggtaaaataaatcaagggagggaggtggttggacttgattcattctcccagtgctacatgcaagagactgcctgttaaacctcattttctggattcttggaactgctctcgttccttttctttctgaggctgagcatttcacctttttctttgattcttatccttccattaaattatttttttttttttgagacagagtctcactttgtcacccaggctgcagtgcagtggtacgatcttgagtcactgcagcctccgcctcccaggttcaagcgattctcatgtctcagctccccacccccgtccctgacccagtagctgggattacaggcacacaccactgcccctggctaattttttgtattattagtagtgatggggtttcactgtgttggccaggctggtctcgaactcctggcctcaagtgatccacccacctcagcctcccaaagtgctgggattacaggtgtgagccatcgcacccagcacctgtaaattcttaatgcttccagtaaacttcatttttgcttaaattagccagaattggtttctcttctttgcaaccgaagaatggttagctgatgatatacctgtgtttgaatcctaacttcccacttactgagttgtgtgactctgagtatactacttcagtctctcagccttggtttccttggctgtaaaatggaaacaataatgcctgcctaagattgtcctgagaactagttgatagaaggtgtggtaagtgctcagtagggtgccaggcacacattaggtgcttatttataacttaatagcatggtccagttaagggcaggaataacagtgacattttctaggttactcttttttaggatttcattacatccaacataatatatattcaaaaataaaactcttttatagaagcaactttataatggcataacagatctagcaggaaaaaatagtagaatgcgttgagtaacgtaaggataactgaggcagctaaatgtgatcccctccctctcctccgccggtttctgtcttctcatctgaggcttaacctgaatccactgcagcgctcaaatgaggcattagtaggctctgcttccctaccaagaaggagccagaatttcgaggtactgtggatttccatgaaaagctcacccagttcatttttcaacaacttgtgttccccttttgtaattgtgcagctcctcttcttaactgttgaaaagtgctcattagtcctcaaatagttatttggactttagggtagagcgcacaagtgtctggtggttacttgctcctctctgtaagagctgcttatccaaatagcaacagcccttgacgtttcagtgccgcatgccatcctttgtgtccgggtttcctcatggtggcaaagccctccgaggcaagtccccactgacagttacaggttaatctgccagaatgccttctccaccttccacccattacgtcactgaaaaccacaaagtaagaaagcttcattctctgccaacttttagccactctctttggtaatgtgtagctttaagtatcttgctaacctagctcagtgatgtttagactaaatcaaactactctaaacatctggatattcatcagaacctcacaacacaacgccgttattaccctaggtgacagtgcttctttgcctgttaactccatgagtagtatgcaaaattttccaatgtgaaatcgggaagtttttagattgatacattacaccgttttttaaaatatggcattaaaggttttgtttccttttcagactttgagtatcatttttgtgttgccttttcattcaaaaccaaatgtttcctaagatacttgcaggaagcactgtgtgtgtgcatgaatatgtccacacatactcacatgtacacatgggcttgggtatgtatgtgtgtgtatgtgagagagagcatagtcccctacaccatgctcatccatacaaaaattacctggtgtcctcagcaatccaggaataggtttgtttgtatttacatcttccctcatctcactttggtaaactaacttgcctgtgtaatttttccctggaactattattaatttggtttgctgtttccattctagaccctacataattgtcaagaaacagaagccagcagtcacaaataaacatatggaagagctggcccaagggtacaggtaagtagccaaaagtaaaacttaccaatctccttaatacccacatacatgatttaagaaaagtgtattttcattttagtgttttaatttctttccaccaaattaccagcctgttaaaaaccta

SEQ ID NO: 10375 - DNA, 2300 bp, Homo sapien
taaggtatacaattggaactgaaatctcaacataaattttaagtgatttcataaaaaaggacaaacttattgtcagtgaactttaccataatcccagcagtagtaatcttatttctaaaacagtaagtgatctattgccaggtatcctgcccagtttattagttggcactaaaataacataaatcaattggcaatttatagtgcaaccttgataaagttcatgagtttcagtttgacttgtttttcagctgaatctttttaagtttttagagatttaagcacatactgtcataaaaagtataatagaattcttcaatttaatttgcttgacatttattgagcatctataataagcatggcactgcactaggtattccctacatatgtactatttctttcagtagtaattgtcaagtaatttttgctgcttgaatggtttattttctttttcttttcttcttttttttttttttttgagacagggtcttgctctattgcccaggctggagtgtagtggtatgatcttagctcactgcaacctctacttcctgggctcaagcgattctcatgcctcagccacccaagtagctgggactaccatgccccgttaatttttgcatttttagtagagacatggttttgtcatgttgcccagtctggtcttgaactcctaagctcaagcagtccacccacatcgacctcgcaaagtgctgggattacaggcatgagctaccacgcccagcctgaatagcttattttcatccccaaaatgaaatcatcattgatttaatgacatgagtatggagaaaaagttaaaggaaataaatactgagttttggtgtctgcataccctagggtgtaactctgtgaaatggcacttaggtacttcggagtgtgtgtgtgtggtgtgtatgtgtcactatggaagcgtgtgcaagagagagagacttaaagctgccttagctattcacagggggagaaaagagatacctaggagaagttaaagaggctcagtagcccacactcaagctcagcagtagagcaagcctgagttttccaactttaacatctctttgtagcatcagttctgtgtccacaagccgaggagactgaaagactcatcttcaggcaggtgcatgaaccccagtgtgtttataaggggaaatgagagaaagggttaacattctgatttcatgttcagttgacagtgacccaataacacccatccgaggaacaatcaggtggaaagactgattgctaaggagggaagagcccacccctgattgggctgtaccctagatttcttaaggaaggggccaagccttttctcattttatctccagtttttggcacagagtagatgtttattaactgcttaatacatgaatcatcaaataaatgcataatccactcttccttgctctcacttgaattcctctttgttcattctttttcttcccttctctcctgtattctttttcatttagaacttttgcaattatttctttttatggaatatacctgtttatccattttataagctcctcggatgtgaacactgggcgttgttcttacattacctctccccagcaggcctggaacacggtagaaccaaataaagaattgttgattgtgaaattaaccagtggaaactaaatccctcaaatgggataatgtaaatccaaaaagtctaaattatttagattaaaatatactttatatttttccttctttgtagaactttaaatattagtgagaaaagttgcttttgcaagttgttaagccaccatgagagtattgcttttgaaatgttgaacctgaagattttgttcattttaattagtgatgttaatgtatttatctctatattcattactaccttattatttcacataatagaatgttgtattttgttttctcccatatcaatgcaggtactataggatacaaccagcgaaacagaattgatactctcatgtatctactagcatatccacaaaaacccatggttaagacaaaaaccattgaattgatagaatttgagaaactgccagctggacagaatgcaacagttgctgtgatgagctatagtggctatgatattgaagatgctcttgttttaaacaaggcctctttagacagaggtaagtgaattttcaaaactaacaccaaagttgctttttgcagaattagatatagggatgattaatgtaaaaatcacttggttaatgtcagttttaagttatttgaattttatgatatagaaacaggaggtggttgggttttgatgttggctttct

SEQ ID NO: 10376 - DNA, 2300 bp, Homo sapien
gatacatattattaacaacaaacctgtttgagagggcagtagcaatatttggatgtaaaaggctgtttcttatttgtgtaacctcataatttggtaacttctttggccaagtgacgaaagttaaaaatacacggccacaaactctggcgtggagtttttctgcttttctttctgtttttgacaatactttcacaagtcaccacctcgtggtttgttagacatcacctgatctgaagtctgacttctctattcataatctcgatttctctttttccttcctggcgtacccactatgccttccccttccctctttgtagttgctaggcagccataatagtactcctagacatgtgtctttggcattaatgttggccacacttaatttatgcctctttttttcctccaaatgacaacagccatgctttaaaactagatgttttcctttctgattaactggtaacgtttatgtggaaatctgaagactttgtgatgtctgtcagaaactctgcaacccaattcagtgatctgagtttactatcccctagcttttaagctatcacctgtaaataaaatgtctgtttacactttgaagaaaacacttcttgatttcatgcagttaagattcacattgcactccagcatgttgcagttaatggctactgtatgaaatttcaagatcatgtaatgtttccaaaccagctggcattctgagccgagtttattatggccatacacaatttcctaggagccatgatgactacggccttgcttaaagacacaaatgtcttcatctgacgtccaattttagaaattcgttacttcatctcacagtcaccttcatatttaaaaaattacattacagccctgagattttatttataaatccacttttacctgattgatttctaaagtcacattcttagatttctgtttttggtggaaaattgttaagtgaaggattttactgccatgcatttatttcatcagtaataagcggcatttaatcctgagacatttcttatttaagtgaactctggcatggctcagtatatcctgaggagattagtaagagaatccagtttaaaataactgcttggccaaagggaaaaaagaaagaaatgcagccacagaatcaggaaattatagtgttgaaggaatgacagctgttttgggtaactctacaactcatggattttttcttttagggattcagtggttgagtttttttgccccacccaaaggtttttcttctgtcctttttgcttatttttcttccttttcttttctgatccattgctagacagcttatttttcttgatgtttagattgttagttgatttcacagcctttccctcatccactagataaatgcaatctaaaaatgtaattaaactccaatctttagggcagaggagaactatttttcccattgaaataatttgattatttcttttttcattctgtctcttctctggagaaaaattattgtttttacttgttggcttagaacttgctctaaatgccaaattttaaaaaggaaaactttccagggaagtttagcagaagttatgcaccaaaaggatgtgtatcctggctcaggagtcagtggacttgtgctgttcaacacaattctcaactctgctgccaactttttggatgaccttggccacttaatttctctagacctcactcctagtgcctgtaaaacagataggttaagcaggtgatttctaagggcctttccaattctaatattctatggctctgtcctctgaaagaatcacagcgccagtcttagatttctctcaccgttctccagtatgacaaggtgtattccatgcagaaaatggttgtagagattccagtgtttacacagacagtaggtaggggacaagtcctgtgctgcttcttcagattatcagatttttatttggtttgtactggtcccagattattatcaaatacagagaagttttgggatttgggggagggtgaggtggagtggattgttgagtagcacaaatccatatttccttatagctttgggttactggtggttctaatgcccatcttggtttcattttaggctttgggcgttgccttgtatataaaaatgctaaatgtacgttgaaacgatacaccaatcagacttttgataaagtgatggggcccatgttggatgctgctacaaggaaacctatctggcgacatgaaatcttagatgcagatggtatttgttctccaggtaaaagccttttaaaagaaaaaattttaatactttttgacatcatatgttattc

SEQ ID NO: 10377 - DNA, 2300 bp, Homo sapien
gttggcctgtgggcggtgaatgctttatcaagctgtggttccaaagagacacagagtacgcgacttctcctccctccctctgcctttgtttcttggagaatttttctcaccctaacactggtcagtatggcttggaaaatacgcgctgtgacagtactacaggtagttggtctttgaacttaccaggaagagatacaaagcaaaaatgggaataacagcataaccaaagaaatattttgatttccttgttgcccaagttaaattggtggtggcttattactggttgaaataactataaataaaaataagtgaccaaaacttaacaccctaagagatatataaaattgctatttactgagatgatgtttctcatgttcatgtagtactctgaattattttcttaattttatatagactatgatgtgtgtgtgtgtgtgtgggtgtgtgagtctcactctgttgcacaggctggagtgcagtggcatgaccatagctcactgcagcctcaacctaggttcaagcagtcctcctaccgcagcctcctgagttgttgggactgcaggcctgtgcatctttgcctagttcgtaatctttgtattccacacagatgataacgatgtgcctaacacttttctttttttctcaggtgagaaagtagaaaacaaacaagtgcttgtaaataagtccatgcccacagtgactcagattcctttggaaggaagtaatgtaccacagcaaccacagtacaaagatgtacccataacgtatgtattggttgtgccctggtaatatgtagaaaggttagaaaaagagaagaaatgggagaaattcgaagttaggtcttggcgtgttggagaactagaaatagcaatttggggtagcattacttgtcatggaaaaagcatggcatagaagataaagctagtctatggaatcatataggccctaaactgggtttgaggtgtggaccacataggcaggggttcctggtggaattaacaacaggatgaagggcacatggcataaaagtgcctgggttttggaggatcagtgtagcttgctggggctaggttgtgaaagagttgggaattgatactgcagagagtgacatgataagagtcatatttttaaacagtaaaacacactggccacagcatggcatcacagtatactagaacatagcccagctctagtagacgttgttttgtgtatcttacatgagtaaagcatttaaattctgttagcttcagttttttcatttgtataatacaatgaaagagttagacttgttaatctctaaatttcttctaagctctaaaatttaataaaatatgaacctagtgagaagggccaatgatagtcaccacattgtgatataaaaaccaaactagaagagatatctaacctagccaaggtgaactaggctgagtttaggaggtggcagtgagggtgacataggagaactggattcttgagttgtgatggcagttttacaaatgtattcaatacacagtagctgaggcctgccatgtgccaaccatcctgcctcttgtgccagcgatatagagctgaaataagccacaagcgttgcctgcaatgagtcatatttagttggcaaagacccccacacaaaaaaagtgcaataatgaccatgatcataatagcatattgggaatttacactgtaccagttactgttctggacattttacatgtgttagctcagttaatcctaccagcatcccaggagctatgttctcttagtggctcattagaaagataagatggaagcaaggagaagttaagtaacttaccaaggtcacacagcaataaagggcagcaccaggatttgaagtcatgcaatctggcttcagagcgcttctcttgaccactgtgctaaacccagcaaagcattgtgggtgccacggatttgtctctggaggaggagcaccaaagagaagatgggcagctctgcttaggggatgggtccagactctacactgacttctacagtatgaaaagctattttgcagttacagaggtgcctctgctggttggctctcttcccgtcttgaaggaggatatctctttttctgtgcgaagttcatctctccttttggtttcttaatttcattcactcttttcagagacctttttctgtcatcttctcttttatcctcccatattttcaacctgtttcctattgattccttctccacaggctagaaaatgtgctcagatactttttacctttaaaggaaaatgaaagtttttcctggtctttgtgtccctttctagctg

SEQ ID NO: 10378 - DNA, 2300 bp, Homo sapien
tgacgcaaaggtgtcggccggttaggcacctgtgaggaaggaggagccggcagagtgccaagtagagggaacagcaaatgcccggctccttttataaccactgcttcagttatcttcccccaaagcttgagagggggcaactttgctacatttcacagacgaggaagctgaggcccagaacgatgaaggaatttacagagctgggattcgaaccccgcgctaccgtcagtccatcccgggctctgtccagccggtaccgcgcgccgccttcttcctcccgcaccgtgaccttaactcggcacgtgctggcccctcgggctccccagtctccgtacattgtcccactcagctctgattgtggggagggggcggaccgagggggcggggggcgtctttccgaaggatcgcggaaagccgcgcgctgccaggggcccggggttagagacccccactcccgcacggcgttagggactccgcgcttccccgcccccgccgcggcccgccggctctgcctctgtccatggtcaaagcacccggggtaatccgcctttctcttccgcccgccgggccccattcatattctaatcacagcgcggccgacccgcgaacggccactttatcggggcccgcaggagacgcagcttgctccccctcacttccacttccagcaccccccggccctcgcccccctctttctgcactttcaactccgccgaggagggggtccctgggaaaaccgcgtccccacttggatgccggggcttctcacaaacttcgaggccgactgggggacggcggtggggtggggagggcagggggagggcggaggaacagagacagacagactgacagagttacgggaagaggcgggggaggggggacagtacagagagaccgagggggatagagacagagaggggcagagtcctagggggagacaaagagaagtggaggcagggtctggacagagacactagcagccaaggaaggagaaatggacagagacagagacacagaggacgagagggacagagagctagaaacagacaccgggagacaggcggagagagacagcgagatggaaggagagaaacaggatgaaggacccaggcccagaggaagacagaaagttctggaggaggcgaaccagccactcacctcctccccgcctagcggccttgttacgctcatattggggcatggggtcttagggattcagttccccttccccaccctttccccttcaagctcgcttcactccccacgcgtgtctgcggatccgcgtgcaaggggtcaagacataccccctcccgcattctcagggccaccacccgaaatctaacccaggaccaaaatggggggtgggtgggggcgcaagagaaggaagggagtggggccccactcgtggtagcgcaggcgactccccaggctccaggagttccccgcggctccccccccgcccgcgcccccctcccggcctgccagcacggcgcggggcccgatggtggggaagggccgggagggggagggggccacatctaagccaattttgatttcgcctataatgagtgccgggcgaaggctggagaaggcctctggaactttaaataagaaaaacgttgctaatgctataatagaagggggaagtcggagggctgggattgcgtcgctctgagccccccttttcggaggcggcttttcttattcaaaacaggcccacaatgggcttcacagtgcgcctcgccacggccccatctgacgagcggccattcatcaggccggctggcctatcaatgacattgctcccatcggggctcctataaaatgatgctttttcccatgaaacatccgcaaacattttgacgggtttggctttgcccggctggattactgagtgtccccttgctcgctcgctttttctctctcccccttctccgagctcgctcccttctctccctctctctcctcttttcttctttctcttttctttcctcttctttttcttttcttttcctttcctcctttatccttgtgccccctcactttctgcgtctctctctctccccttctccctccctccctcccttcctccctgggcatctctagcacaggggatccccaaacatcaggacttttggggggcgcctgtgctgtccatgggaagagcatgcattgtgggttactggaggaacccgacatggattccacaggttagtcctactggcggggttggggggatacattgggagggaaggagaagggagagggggaactttagaaagaagttgggaaaagttcag

SEQ ID NO: 10379 - DNA, 2300 bp, Homo sapien
aggttgaattttctctagtttctgaagactcttggtgagttcatgatctctgaacaaacggcatttgtgcatcgttgggagtttcctcgttcttttttttttcctcctcgttgtttttttttttttcttgtacattgcaggcaatgacccttagttaatttccttgcccactttagagttttacatattgagtttccctaaagtgggaaagggcagccacattattgagcacctattgtacaattggtgttatgttagacacagcttagaattcacaatgagactttaatgtatatataattacgagtatataaccacaggtgagtagttaggttcgagtcagattcaaatccctgctcagcagcttaacaactgtgtgatcttgggcaagtcatcgctgtgatgatgatgatgatgatgatgatgatgatgatgatgaaggtgatggtgcttgtgttgggaagccatattccaggagaatgatattagcgtcatctcaggctcacctgtgtcctattgtgattgagactccagctgatgaggaggagacatagagccagtgatcacatggattggctggggagtgaacacagttaactggaaagagttcttatcttttctccactacattctttttttttaaacaaattacttcatccctccagttcaggtctctaagacataatgagcctctagcggcctcctacagagggggacaagtaagtctcggtttgcctggctcaatcctggtttatgcatgtgatcctggcaaaattattaataatattgcttttcaatctcaaaatgttcaggtttggatgataagggatacggtcacccttactccgtggcctcctcttccattctctcccctctaaaatatgtttagcagcaccagatggagctgcccacagaactgctttgcttatgccccactctactcaaaaactttatgagcttctcaaccacctactgaatacaatctagactccttaacccagcattgagtacagaagcaaggcttatgtatgtgcatctcctatagcatctcataaagtgctcatcaagcaggataatatcaggaaacacgtgttgatacctgaatcaatgtgtgtagtcatgctcaggctgcttgtcagtttcttgaaagcatctttcttctgcctgcttcaagaacttcgcacatgctgttccttctgccaggaacacgcttcctccctctctacctggttcatgccttcgcattctttagctgccagtttaatgctgcttcctccaagaagcttcctaactcccccagattagacccaacccccctttttttctctcgcgtggcactcttggtaattgcatctctgtttgtatgattatttatagttgaccacactaaactctaatcttccaaaaagaactgtctatcgaggctgtgtccctcctgtgtagccagcccctggtgcatggtatcccataaatagttgccaaatgcagacagggatgaatgaatgtgggttaccctttctgagccagtgcagtccgcatcacctgtttaaagtcctccaatagcttcttagcgcacttggaataaatgtgaagttcctaggagggtctgcgagtccctacatactttggattcttcccaactttctacctcatttcctgctgctctccccacctcccgcttcgtcatgctggcctcctggctcctcctcacacacccaagcccacccaggcccttgcactccaacatcacctcctcagagaggccttcagtgtccccactgcccaaaaagcacccccacctctcttgatctcccattctatggctttattttcttcataacactcactttctgctgtcttcttgctaatttgtctctgtctccgccacagaatataagctctctgagagcagagaccttgtctgccatgttgatcactagctgctcagagcctgtcaaacagtaggttctaaatcaatatttggtaaatgagggaaggaatgaaagcagaggcagggcagggccccttcctggaacccagcagcccctggggcaggacctgtggcgttgccatggcaacccactgacctgagccaccccctggagaggccacagctgctggcttcctgggcttctccaaactcctgtgtgtcgccactgccaccggcagggagccaggagagagacagaaaggggctgagacagaatgatcaaaaggagagcccaccctggtgcgggaggcgacaggaccaggcctcgacggcgccgttccactggtaatgaccagggcccagggacagg

SEQ ID NO: 10380 - DNA, 2300 bp, Homo sapien
aggacaggaccattgttttgttcaccactgtttccttaatgtctagaacattgcctggcacttagtaaatatttgttgagttaaaggttatctgtgtctttgtccatctgtctaccattaatctgttcactgtatgcaagcatggactatcttgctcactgtgatatccccagcgcctggcaggtgataagatcaataaatatttgttgaatgaataaatgactgaaataatctatccataagacacttactgagcccctactgtgtgccaaggaatatgctggacctcaatgatgcagaattgactcagacactatcccagcctcaaggaatttgatcacctagaaaggattacatcaactctttctgggaacatttctaaaaactatcccaagttactcaatgttccccatcccagaagcgcgggaagtagatgagatgatcggggactattcagcaccaggttttgtcttggtgctgacaggtctgtgtccctagggttgtattccccctctgtggggtttgggtatgaaatgattgaactgatgttcttgcaatcacatgttggaataagttgagcgagtgctgccctttcaagtgggcaccttggggggccgtgtcctcattccacttcacttacgacagcgctgggccacttctttggcaaatgctctcagagggagttttgaagccacttgaggacatttatttcatcactttggaattatgccttatttttgaccaaaaaattgggggtgggggatggttttccagtcactttatcccccaaacttgcttccaaataactttgggttgtttcctaaaatctagttaatgatcaaaggagaaatgtttcctgttggtgcattgatttagcagtaggtgccccaggcttcgaaggcatgaccctaagagaagttcccaaattgtcttgtgccacagcagttttcttgggaaaggtatttaactttccagagtgcctaggacaatggaggcaagatttatttggatgcctacattctggtgtttgggttaaagaataataaattttttaaaccctgtatctaatttttgtttatatccccaatatttagcacacggtcaggacatatagtgcccaaaaatgttttctggagaggaagaacgaatcatgaggaggtctgacgtcttctcagtgcttcccatgcacgtgccaggcaccatgcggatgcttgtcacacgttacctcgtctgatcattataaccactttaggaggcacttacaattcaatcccaccaaaaggaaactgaggcctgagcttaagtaacttgcccaaggtcaccaagccagcaagtgacaaggctgggatgtaaacccagttgtagaaaatctctcctacagaatccctaatggagactcactaagaaggtgatgggtatagaatcattattcctagcacagcagaggagaagaggattctaaagtaatcatggggccaacttcctcctctggtcatgagacctcccttcagtcagcagatcagtgtctgtacagctatacaggcctctcctggggcattggttttcccagacaatccccctccatagcatttgtcagccaaggagctccaagatgttgacacatcctccttgggcttttagctgttacaaatggctcctcaagttggtctgtggttccattcctggctgattggggcacccacaagaccctatgtagtttttggagtttgcatgtatctgatctagccagaacaaggccaggtcaatgacagtacagagtagaggatctgggaatttgggctgaaaaagtagcctggtgtcatacccaaaggggccaggattctgacactgccaagccactaatgccaggcatgaccttgggcagcttgctttgtcttcctgggccccagcttctccacctgtagaaagaacgttatttctaaggactgcccatctctggaggactagaaagaacagaccgttcttgcttggggaaggtaacacattttttgctcattgggcgtttatttccctaggctggaggagaactatgagattgcagagggggtctgcatccctcgcagtgccctctatatgcattacctggatttctgcgagaagaatgatacccaacctgtcaatgctgccagctttggaaaggtgagtccagcctcatcaggcttgtcctccctaccaccccaactttaagtaatttatgcacagttttaaagcattttagttattttttttaagttatcaaagtacttacttactttggtactttgacaacttcaacttca

SEQ ID NO: 10381 - DNA, 2300 bp, Homo sapien
acacaggagcaaatcagttgctgccctcatggagcatagattccggtgggaaacagacaaaacagagaatcagattgtgacaaagttgtagcagagagcaacaaaagaggaatggccagggaaggtctttcagaggaggttacatttaagtaaagactaggggagtgcagaaggctgtgcagacacttgtctgctaggtgtgagtcagtgggaagggaatctcttcctgtactgctcgaccttcattaaaatctgcatttataggacttgcctctaaggatgtttcaaaaattgttggacgataataggtgttccatgaagaagagcagcaggccctataagtttggttaacactaagtttaaacagtttcctttactgcaagacttctcagaacccttattatgctaatgtacaaggtgactccactagagggtgccttattatgcagcatttctaagcattttgaccacgttgagcaggtcagcacatagtgacctataaaacactgtaactttttagaaaggcaaccatataggacttttaagacttgtcttgaaggatgtgtcaaaagcatgtccagtgctctcaccctgggccaaacccctgtccctcaccagctcctctcatccctgggcagcacattcccatcctccaagggtgggtttgattttggagccaaggtagggaaagaaaatggatgatcgaactgggaaaaacccttttttggtattctgaaaataatgagactaatttttttggtgtagctcagaagcttttgaaccagtctctaaaggaatttccagaagactgttgaacaaaggacctcttggaataaattcctaataattttccaagatgactattctgaaaaaaaaaaaaaaaaaaaaaaaaaaaaaacaaacctcagttataattttaaaattctggtatttgtttaaaagtaaggtttcagccttggtacgattatagattacaaaagccaggttcttccttgtttgctggtaaacacatagtaggcaattcaaaatgttggtcaaacagaagagtggatggatagaacgatatggaataaatgaaaataaattatttttctccagctcttggtctttgaggaatcagtggctccgatagcttgttgctcatttctaagaagagcagaaatagtaaagacacacagtaaagagagagcagaaaggtttcccatcctgcataaacagagaaaatttccttctgtccacatgggagagtctgtttttgttttgtttgtttttctttttctttaacctcgaggttggcaaaataccctctttaaaaattctgtataatcaattttattgtatcctcttccataaggatactccaaagttggtcacaccttcgaccagttgaaaggcagtaagaagctcttgtctccaacctgcatcatggccttatagagaaactcccttggcaaattgacaatgacagaagaaatctgggggggtgggccaggtgcagtggctcacgcctgtaatcccagcactttgggaggctgaggcccgtagatcacttgaggtcaggagttcaagatcagcctggccaacatggtgaaaccccatctctacaaaaaatacaaaaattagccgggcatggtggcacgtccctttagtcccagctactcaggaggctgaggcaggagaattgcttgaagctgaaaggcagaggtttcagtgagccacgattgcaccactgcactccagccagggtgacagagcgagacctgtctcaaaaaaaagcacattctgcacatgtatcccctgcctttttttagaagaaattaaaaaataaataaataaatctgggggtggctggtgaggaatgtgttgttgtgccctacagaactgaaatagaagaactcaagatcagagcagtagcttcactgtggttgttgattttagctacgtgatctctgaatagtcaagaagtggtctggtctgaacatattagatgatctggctcttaagaagttataaaggtgaactttttaaggttacggtggtgtgtcataactgtcatcccacctgaagccaccggaaccatgctcctcccccacccacagagtgagttccaggtgggaaggcagttatgacagttgagaagtagtagaagacacggaaggcacagaaggcagacttcgctcagcacaaagaattttctgataaccatactggcaaaatgaactgggctgccttcggagggtctgaattcttcatcccagaaggcattcagatagattcgagatgcccactaagcagaaata

SEQ ID NO: 10382 - DNA, 2300 bp, Homo sapien
tgagtagggagtgttgcccaaggccaaggaaagctggggccatcctacctggggatagaagagttaactctcctgtaaggctaatatcactgaaatatagaattaaaccaaagtgccagccatcaatcaggcaggtaaaaataaccaaaattgcctcctacagaaaacgttaagtcaaatactttgcaaagcagagaggggatgaaaaattttccattagtacttgatctctcatgtctagccaaatgggataccagcacttgagggtcccttctctgtggggacccaagcaggatatgtttgtgactactaactgcacctctaataaaaattcatttggcctgtgttttccttttcttttttctttctttttctttttttttttttttgagacagagtctcgctctgtcacctaggctggagtgcagtggtgcaatctcagcttactgaacctccacgcctcccgggttcaagcgattctcctgcctcagcctcctaagtagctgggattacaggcatgtgccaccacacccagctaacatttgtatttttagtagagatggtgttccatcatgttggtcaggttggtctcaaactcctgacctcatgatctgcccaccttggcctcccaaagtgctgggattacaggcatgagccaccgcgcctggccttggcctatgtttttcttaatcaataaatggtagtctcaaagaactgtatttttaaaaaggtaaattcagtgcttcagttgacactgaatgtaaagcgaagaccagaactttttattaactcaaaataggcttaatattagcaatgttttcaattaagactaacaagggattggaggctgcattttgtttagattttagctataatctattgagcattatatattggctacatgccaggcagtttgcaaaggactttgcatgcattaatttgtaaaataaccaataatggaaattattacagtctttctacacatgagaaactggaggcaagaaagctcaaataatttgtttaaggtcatatagctgtttaggggaggaacaggttcttgaacacagacaggtctttttgactatgaagccacagtgctatcctactgaaaacactgcaagatagtcttataaactttgatcttatcagaatcatttttaaagtttaataaaaatacagactcctgggccctctctcagtacctactgatttagaacatctgggaatggggcccaggaatcagcactgaatcaagcaccataggggtaattctaaagcacatcagtttgagatctctggtactgagtgcttgacacacattatcttatttaatctcacaaaatccccataaagctagaattaattattatccccatttttatagataaggaaactaaggcccagagaatttaagtcatgcacccaagatcagccagtgagtaaggagcagaggcaggatttgaacctcccaagtgctttgaaccactaagccagtgattctcaaaccttactactactaagaatcacttacaaaacatattaaaatatccctggtagtctagtagctaggactaaaagaagaagaagaaaaaaaaccattaaaatagagactcctgggccctgctccccccttaaagactcctatttagtacgtctagagtcgattttcacagtcccgtggcaatacaaatgttaggtcatccgtggacctcgctttcagaaacaccgcacaacatattaactacttttctctacccatggagatacaatgaaagtcacaaaatcatacagatgagaaggcattttgaattatgggaagggcttttgcgaggagggaagagatgagcacgtcaaaaccttccctctccccaaccctcctttactcctgataccattccgtgatatttctgcttagtgggcatctcgaatctatctgaatgccttctgggatgaagaattcagaccctccgaaggcagcccagttcattttgccagtatggttatcagaaaattctttgtgctgagcgaagtctgccttctgtgccttccgtgtcttctactacttctcaactgtcataactgccttcccacctggaactcactctgtgggtgggggaggagcatggttccggtggcttcaggtgggatgacagttatgacacaccaccgtaaccttaaaaagttcacctttataacttcttaagagccagatcatctaatatgttcagaccagaccacttcttgactattcagagatcacgtagctaaaatcaacaaccacagtgaagctactgctctga

SEQ ID NO: 10383 - DNA, 2300 bp, Homo sapien
cacttaattctgtactggacacagagcaggcacccaaatactttgttaacagctctcagtttttgtcccagttcttgttacttaactcatctgaccctgttttcttatctataaagtgggaacaataccttccccaatgatccattgagattagaagtattaaaaagttctgtaaactgttaaaaacaattgcaagatgttactattagcttagaaaattagctaactattccatgaccttactaaaatgtgctttttggagagatggattaaaatctttctgacttaatttattacagagcacctaccccaatgcctgactcaaatatgctcaataaatgtttgctgcatggaaagtataatatacagaaagaccaaaagctccataaactcaggtcccatgttcgttcttatttccgaattcccagtatctagcagaatatctaccacagcatagaagaaattcaatcattagataaataaacttttgccccctctagttcctcttcagcacagctcaagagggagagactggtaggggagacatcaaggatgattatgggtaaaggctgcttggaatggaaaacttgaaattacttggagaattcatccactttccatcaaaaaaaagcttgggagagcagaaagagcacaggctctgagttcaaattcagtttccaaaaatctgcaattttgataaattaaccaactaacctctccaagactcagtttcctcatcttaaaatgagaataactcatatgggtgctcactagaatggaagctccatgaaggcagggactttactttgggcccactgtatccacactgcatttaacagcacctgggcacagcacaggctctcaaatatttgttgaatgaatgtgtatgaaattgattgagctaacacaggtgaagtattaacagagtgcctgacacgtaattaccaccggggcaatgggaatctttgtcatcaccaccaccgctactgtatcggtattattacagttcccggaggtcgtagagcggccgcttcggggggaaaggcctggtttcaaacctcgactttcccattctctggccgtgtgacttaggataaattactgaaactattcgggttcctttttatttccacaaaaatttgtgttgggagaattagaggatatagggaaattacctaagagagtctggagccccggtggcacgagatgcatgctagagattagtattaaggcagaaaatcgccgagtcctcttttatccagataactgccttcaattatttcccacattactgtagctgagtacataacaagaacgcaaataagggtggaaggaattcccgagaccgaaaccgctaaatgagaaaagggaattaaaccgtgcttgacagttcccaccaagggatggcagtttccgcgaccgtcggccagtccagccagcccagccagccgagactgaagcaggacagtcagcgacataacgaacaaaaccgaagcagacgcttagaccctccctctaacggtctccccgccgctggcctcaggcggccgccagactcccgtttccggccctcgcggtaccacagttcccagcatgcccttggcgggaattctttccggctggatgactaccaatcccagcatgccattcggcacgccagtaaattagatggaagagcgggatagccccattgcatgcagggaattgcagtccatttagcggctggttcatagatgggcggggaagagccgggttgctctagtcctttgagaatgattcatagaggagggtcaggaaagaagaacggttcagtctgtgaaagcccccttaaaagactggacagttctccgagggagggagaggcaggagagcaagcagggccttgggcctgactccgcctcggtccgctagccaggcctcgaccgagtcctgggccttgtcaggggcggccgtgaggcgccggttgctgggggagcggtgacgtcgcggggtgaaagttgaggggcggtgacgtcgggccggcccgggcggaggctggcgggttggaggcaggacggagggagggaaagagggaaggaaggaagctgggaaggagcgagcgggggcgcgaggcgtttacctggaggcagcggcttgggcgcgcagagcggccgcggctcccccgcacctgcggccatggatgaggagcgcgccctctacatcgtccgggccggcgaagcaggggctatcgagcgggtcctgagggattacagcgacaaggtaaagagtcctggccccgggcgtgcggtatcgcacccccg

SEQ ID NO: 10384 - DNA, 2300 bp, Homo sapien
tttatgaccactttcatttacagttcaccaaaaatagaaaattaatgactaggtttttcttgaggtttagcaaattagtgcaatttgttcattttagattcatgcctcagtgttaaattcgtgcctgcctgctgatgccatcagcagattaatttggagtttgctttccattcagtgggaaatgtagctagccttatttccacatgtggaatcagcctctgtctccctttcctaaagctagtgtgttttaaaaagccaattgatttatttagcaggatataaagtcagttttagaaaagttaattgaaatggtcttgtcttcctcctgttttaacacttttctaaatatctctgttgatggaagagagcatgttattctagggactgtaaggggtccctagaatgaagaccacattcccttctcccgtgcttccaaggtatcagtgaaacgtaataagaaagtacagaccagcagacatgttagaaacagacaacccagtgcacacagagaagtacaagtatctgagtagtcaaaggataccatttaaatgagataaaacagtgagtgtccatagaagttaattaggaatgtcacaaaagaggttagttccatgcttattttaaagactttgaaggaaatatgcagtagtagaatctgtcattaagatgtgaaagctatataaagagatcccaaagaatttcctgagtttttttctccattttaatgttacctcatttcgattttcactatcacaaccaagcctgcttgctgtctttctcttcctttgcccttcatccttagggacttcttttctctctcagcctttgaaggtggtatcatttcaggaggagagaatattgatgccctgaaaatatcaaaactaaatcaggaaacaattagtaaacagttgtataagctgtgtttgtataatgctatggaaaaagcaattgcatttctttgctggcatctttgtgagacaggagcattaacccaatttgacaaatgaggacagtgaagatcagagagtttaaattacttaaggaaagtcacacagtagaataaccaacagtagaaaatagtgtctactttaagctttgttaagacttcttaaatgatagcactcatctaacggatatttatggagacatagactaatggaatagaataaatagagttgatacagtcactgacttacaggtaacattgaagtgcagtagtgaaagaatgggctttttaataaatggggctttatcaattgtatggccatatgggaaaaaagtgaatttgaatccccatcttataccatacacaaaaaattaatttgagatggataagagacctaaatatacaaggtaaataataaagcttactgaagagtatcttcatgactttatctcatgcaagtcaaacatttcttatatgagcaaagatttctaaaacagggcaaaataaggataaaattattaattaaagaaatgacatcgattttcattaaagtgaattcatcaaaagaagcaaaaagacaagacaccaggaggagaagatatgtgcaatgactctcttcagaatacactaaaaagtcctacaaacccataaaaataaaaatcagacaccccaatagaaaaataagcaaagggcgttcaggtgcggtggctcacgcctgtaatcccagcactttgggagcctgaggcaggcagatcacgaggtcaggagatcgagaccatcctggctaacacagtgaaaccccatctctactaaaaatacaaaaaattagccggctgtggtggcgggtgcctgtagtcccagctactcaggaggctgaggcaggacaatggcgtgaatccgggaggcggagcttgcagcgagccaagatcgtgccactgcacttcagcctgggcgacagaccgagactccatctcaaaaaaaaaaaaaaaaaaaaaaaagaagaaaaaaaaagaaaagcaaagggcttgaacaggaacttcacaaaagagatatccaaatgagtaataaacatatgaaaaggtgttcaactttattagtcaccataaacatgcatactacaaccaagaaatcactacacatccgtgagaatgactaaaatgaaaaaggctgactctaacaagtattggtgtccctgtagagcaactggtggggtataaattggtataagtactttgaaacactgttcagcagtacctggtaaagattgacatatggatataacctgtgagtcagcatctcctctctagggtgtatacctgtagatatcaaatgacatgtaaaaattgtgttcaca

SEQ ID NO: 10385 - DNA, 2300 bp, Homo sapien
cagcctcccgaggtgctgggattaaaggcgtgagtcatctgtattttattttaacaatctaagaaagggaggtcacagaatgggaatcaagaacttagaggagttcagactataaaacgaagaaatactacaagtcatgtatttgtttgttttataggctgaactcctacaccagaagtttctgatgaactcatgacctcccaaaggagctcttttaaatcttagttagtttatgaaacagattcaactgctgctttgagttatggcttttaataaccgtaaaaatgcaaaatctcccaggagtggctacaatcttgtcagtcatttgtactttaataataattagattctcttgtaaaacgacgtgcaaagggaagaagaaacaagacgtaattgtgcacttcataattttacctagagttcaaccttgaaaggtcacatattaaggatagaagtttgtgtaataacgagaaaacagaggatatccgtttcttcacatactggataaacaacaatccacggatcctgctaatcatccaacccatatgttgaattgacaagagtatttaatttcctctttctgctttgagaaactaaatatcttgacagtctgagcacagtggcttaagtggccttaattctctgatttcataagttaatgattaggttgaagctataaactatagtccattccatttaagacctggatcaaagttagcttcatccagcatgttttagcacgtcctttctgagctatgttgtcagtagttaccattcagttccaccatcctgaatattctgcagttgataaaccattttgtgaattttttttttttgctttctgtgtatgtttttgactcgcgtgtttttgcttcgctaatcagattgcgaaaggaaacatctcacgtttgcataggacttcacagttcataaagacctttcccacccaccacaaaaaaagtatgacaagtttcccgtcatcttcattttataggtgtggaaagggagtcaaagaaaagttaatcgataccatttatctagttaagcaggctttgagcagttcatctcctcccgtcctcaaaacgaccttctgaggtgtctcctgcaaccctgctctgaagctcagagcgagacggcctcacatcccagggggctcagctctggcggggccgccacgcgcctccccgtgcctttggacgggtgaggagagctgctgccccggcggggaccacgtggaggggcctggtcagcaagtggcaaggacgcggcgcaaagccaggctttctaatgtacaatccgcggctctttcgatactgaacacccacctcttcaacaaattcgagcgcctggcaggccctgcaccaagcctagggtgatggcgacccaggcgggtttttactctcaaggagctcaattctagggcagggagaagtaaaattaaaaaaaaaaaaatcataacaaactgaaaaacacataaataagccacgtctctcctcacccctagcacttaatcacaaaggcctgtagagagtcccgacgagaacttctgagcaggccccgctgtcagtccctgaggacagcatgcaagggaggttgacgtccctggacgaagaaagtgctggagaaactggcgaccgtcccaccttccctaaggcgaaggctctgaattccgaagaccgttactcggcgcggaacgcgggcaccgccgacgtcaaaacaccgggcctgggggccgcggcctacgcgtctcccgggcttcgcgcccctcgcccgatttgattggatggtggcgggaagaaggcggggagacccccggaggaggggcgcgcaggccggccgggggttcccacggaggcgtccagggggcgaaggggcgggagcgggcctcggagcgtcgcgcgtgcgcaattgggacacagccggctggggactgctgggagggccggaccctgcgagaacgggtgggcgtgtgcccggtgggcgcgggaggggcccgggctgcacgagcgcgcgtgcgcgtcggaactggagccgcgggaggaggcgggagctgaggaggcggcggagggggcgggtcgcgtcgggcgccacgtccgcagccagaggcctccgcctccaccaccgccgccacagtcttccagctccacatcctgagaggacgcctctggagccgcgactgcccggggttgtgccggccgccgctgccgcccaggccgcctcagctctcctctgcgccggcccgctcactccgcccggccccagccctagcgctggccgcgaccccggcggtgagtgagtcg

SEQ ID NO: 10386 - DNA, 2300 bp, Homo sapien
ccttgtgaacaagcatacaaaggtcttattctcaagatgtttatatataatccagtgagatatcttccggaaatagaaaaagagcaaataccgaataactgaaacaaaggtaaagattttcctgtagttaaaaaaaaaaaaatcaaacccatgcacacacaaagaaatctgtatatttgtccaatgtagcaaccgttataatttctaacgatgctttctataaatggacaaatttttactgaacttggtttctggtacatctgttctaacaaagactaaagaaatgaaagtggaaaaagcaaaacaggatgcatatgggtttatcaaaggctacttctccctttctttttaaaaagttaagcatgggcgcgagcgcgcacacacatacacacacacacacacacacacacacacacacacacacacacacacgggcgcgcgcgtttacctgttggtgttgtatcgatattcctggggaacccctgagggcactcacaccagcagaagtttcaaaggctaaacaatagcatacagcaaataatcacatatagcaaatattttcatttggaattagcacagtgttcacaaggacgcaaaaatcaaattaagaacccttcccttttctctaggtgtttctaaacccttccgggtggccccttctctccctactgatccctttaggcactagcaaatcttttttttttctttagcagtgagtgacgtggcaggaggcagaaaatgaccctggaggcgccgtggctagcactgagcttggcacctcctccctccgctccacgttgtacacccagcactccccccactcccgaagggctccagaatttctatgtaagaagggtttaggacaggcgatctgattggaagtgggagctggggggtcggtcttgaagctgcgtgtgcagagcaggcagtttttatttagactgggaggcagtgacggcacggatgggtgctccagccctccctgtcacccctgggcgcggccagcaccctctccattcccacttttactttaggttaggcgtggagatacagccttcctacccaggaagagctatgggggtgtccactgggaaaaagtcttgtgtgcctgaacccaaaagggaggtttagcaacaggtcaggagttggcagggcgaggaagcccggtacccaagcccctccgctgcatccctctcccaggctgctgatgcccctcaccttcctcctccgcccccaaccccgaacccccagatgctaagaagtcaggcggaggctttccaggggtgcgcaagctccaatcgcggcggggcagtcagcgacgtataaggaggagtagccccagaagcgaacctccatccgcccccaacttcgtcccgcccctccccctttcccgctggggcctcgccaaggccccgctgggcagccaggccgggcactgggaggtgaggggcaggggcgccgacggcagagggcgacggaggagggcaggaagccgggactgcgcccctgccctcgcatcccgactcactcaccgccggggtcgcggccagcgctagggctggggccgggcggagtgagcgggccggcgcagaggagagctgaggcggcctgggcggcagcggcggccggcacaaccccgggcagtcgcggctccagaggcgtcctctcaggatgtggagctggaagactgtggcggcggtggtggaggcggaggcctctggctgcggacgtggcgcccgacgcgacccgccccctccgccgcctcctcagctcccgcctcctcccgcggctccagttccgacgcgcacgcgcgctcgtgcagcccgggcccctcccgcgcccaccgggcacacgcccacccgttctcgcagggtccggccctcccagcagtccccagccggctgtgtcccaattgcgcacgcgcgacgctccgaggcccgctcccgccccttcgccccctggacgcctccgtgggaacccccggccggcctgcgcgcccctcctccgggggtctccccgccttcttcccgccaccatccaatcaaatcgggcgaggggcgcgaagcccgggagacgcgtaggccgcggcccccaggcccggtgttttgacgtcggcggtgcccgcgttccgcgccgagtaacggtcttcggaattcagagccttcgccttagggaaggtgggacggtcgccagtttctccagcactttcttcgtccagggacgtcaacctcccttgcatgctgtcctcagggactgacagcggggcctgctcagaagttctcgtcgggactctctacagg

SEQ ID NO: 10387 - DNA, 2300 bp, Homo sapien
tcaccttactcttttgtccagtgccttttactagtttcccatctcactcagttaaaagccactctccatcatcaccttcaagggcctatgttgatccagacctcactctttgtcttcctctcctactgcccttgatgcgaccctgccacactttactggctgttccttcttgctgatccaggtaagctcccacatcagggcctttgctcttgccatttcttcttccgcaaagactcttcacctaaatatcttgtatccttaccttctttgagtgtcatcgcagtaaagccttcacagactatcctatctaaaatatcatatcctctccccatccatccttggccgggcgcagtggcttatgcctgtaatcccagcactttgggaggccgaggtaggcggatcatctgaggtcaggagttcaagaccagcctggccaacatggtgaaaccccatctctactaaaaatacaaaaattagccaggcatggtgatgcacgactgtagtcccagctactcgggaggctgaagcagaagaattacttgaacctgggaggcagagttgcagtgagctgagatcgcaccactgcactccagcctgggcgacagagtgagactctgtctcaaaaaaaaaaaaaaaaatcacacaaaaataaagtatcacaccctctcatccatccctttttctccatagcatataaataccactgacatatagtcctctctttgtatttattttgtatttatttattgcctttccccattggagtatccatttcatgatggcagagattttttccatctgtattgatatatacatatatatatattttatagtaaattttgaattctgttaactgcctctgttcataagagctttaagaacagcaaaaagtcatcaaaattgatctgttactgattcagattggtggtgtcatcattacaagagagggatgtcttttttttaaggactttctcagatagaacaccttagtatttatttattaactttttcaaattttagggtcaggagtacatgtgcagattcattacgtgggtaaaatcgtgtgttgtgggggttgggtgtacagatgatttcatcacccaggtaataagcatagtactcaatagatagttttttgacccttactctctttccactcaccacctacaagcaggccctggtgtctcttgttaccttctttgtgtccatgtatactcagtgtttagctctcattcataagtgagaaaatgcggtatttggttttctgttccagtgttagctcacttaggatcatggcccccagctccacctgtgttgctgcaaaggacatgatctcattcttttttatggttacatagtgttccatgatgtatatgcaccacattttctttatccagtccactgttgatgggcatctaggttgattccatgtctttgttattgtgaatagtactgtgatgaacataacacgtgtgtggtagaatgatttatattcctttgagttatatctagaaatgggattgctgggttgaatggtagttgtgagttcttttgagaaatctccaaactgttttccacagtggctgaactaattaacattcccattagcagtgtataagcattcttttttctgcagctttgccagcatctgttatattttgactttttaataataaccattctgtctagggaacaccttttttagttctggtatacttttttctttaagtctattgtgaaataaattacaattaaattaaccagtattctgtaggaggaaacaacatttttgtcggctaacccccaccttccagctctctttcagtgagtaattttcagttgtagttgaagcaccacagtaacaacataggaaaacttatactatgactgccactctttggtgagtgtttcacataagatttatattgtctactggtataatttaaagtatttattaaatgccgcagtttgaagtaggagagaaacaagatgaagactagttgtatagtgggtacaaaatgttgtttatctgaataatgttgatgaaatcgcaatttagcatgtgataagaggtagtctcacatgttgaggttaaaatgaaatgtgtttgtatgttttttttttaggagatcatgaatcagacagataaaaatcaacaagaaatcccatcataccttaatgatgaaccaccagaaggtaagtatgcatctgtaacactaagaatggaaaaatatactgaattaaagttctgatagtttttattttttacttattttattttatttttttttgagacagag

SEQ ID NO: 10388 - DNA, 2300 bp, Homo sapien
tgtcccgcgctctgactggctgcgttgggacgcgggggcgtgtcttgggggggcgggggttggcggtcatctcccgagccctgattggccatgggcgaagggactgatggcctggttggcgctgctgagaactgtcgggagcttcttgagaccgaggaccgaaatcccggctccaggcctcggggactgcggactgtggggaggctggccggagagagagggaaggacggggcctggcccccgggactccctgtgccttgcttggagctgacgccgacgggtgagtcgcccccttcctctgctcctgggcgtgttcctcaccagcggcgccgcagcggtcagggcccgcaaaaccccacgcctcgccagacgctcagctcagcctgccgggtttctctggaaaagcggaggccccacagtgaatgtgcggccttttgatcggtcctggagatcttccgtggaccctcgtttttccttgcttataaacgttggtcaatttgaaactggcagcagggcatatgtgttacgaaagaagaactttattgaaaccagtggtggtgtagagaagaccatactaaccataactgtgtattacagaagtgaatttcactccccaaaaatgcttaagaaacaagcatcctagaacagcccacattgtgatttaacaaacatttaccaaaagcattgctatatgtgggggcacagggctaagagcaggcaggactctggagccaacctgtggggtttgagtccaaattctgccggttttttgttttttgtttttttttttagctgagtaaccttgggcaagttcctttacctgcgtctgtttcctcattttaaaatgagttgttgtgatgatttaatgatttagtatatgtgaagagttttctgcatattctaagtgatttatggtattaactcgtttgatctttgcagtcacccaggagatagtatcaccattttcctgatgccaaactgaggctcagagaggtgaagtaacttcttcaagtcacaacacaactgttgtccaggaatcaggcagtctggctctgctaacccagttttacccactgcattaatgtaccgcatccacttgttcactcagtttcacctgacaaatactaattttgtctctctgtggaacaagttctttgctgggtgcagggaataaagcagaacaccgttcagttcctgccttcccaacgcttgtaaatctagtgcaggtcattcatggccgggctgcagggtgtccatgaatcctgctaaaatcatttgcgaaatgttgtgagcgtgggtcttttcttctggaaagagagtctgtgactctcaggttctgagttgatctgtgatccaaacagaggtgtgaagaagtgttgttttagcagatctgtgcctagtatgcctgatacacagcttgaacttcaaacaaacagcaacaaaattcctactggttggaagaatgaagaacttgtaagagcataataagtgctgcagtagcgtccggagcagggtgctgtggaagagcacacagaaggccacctgcccaggaatgcctcctagaggcagtgaaggcagctgggtgaaggatagggaagcagttcattggaacactgtggtgaccagtctgtccatgtagtgttgagacagaaacaacacgtgaacagctgcagctgttgtaccacttgtgcgcaagtgtaaaagtccatggtgccatgaaatcatgtaatggggacaggaggcttcatgtattcgtgaaggttagaaaagtttccttgagaaagtgacacttaggcctaaaagttggagcattttgggcatggaatctggcccacagtcttcaaagaccacatggtagaaaccagtagagcaccagggactgacaggaagcaaatgcagctggtgcaggagagggaaatgggaattagggtggtggcagagcccaaagaggccttgtaggccatggtaaggcatttctatgttttattttactttgtctttatcctaaaatgccattggcaagtttattgcagggaactgacaagatcacattttgagaagaagttggaaagaatcccaagtggatgaactgaatatctggatgaggacaagatctgtggggagagactgtaaggtaagaagaagagaggtctagaaccaagccttgaaggtgagcttgtatgggagacagatagagggtggcgagaagtatagaaagggagaagaatcaaaaaaagtcgagtgtccaggaagtcaaatgagagaatatttcaaggagaaagtggtcaactctgctaaaa

SEQ ID NO: 10389 - DNA, 2300 bp, Homo sapien
aaatagtggtcaaaatgaatcactgaaagggaaagaaaaggcatcagtcatcatgctctacttgagcagatacatgatgttcgaatcagtgttctccccttaactagaaatcctacttgtggttaagggatttaagacattttactcattcagcaaatacttcttcaattcttattgccaaaaactgtactgacaacttgggaaaattatattgagagaaccagggttttgaatgaactgtacaaagtccttatgtttttcatatttgcttaaaataaataagtaaatttgagatataaaagtctatcagtatttttaatgcatctcttacatactagaaatttcaggatcttctcacaattcaaatgtgtttgtaattttcttgtacataatatgcataattgtaagttcttttccccttttcttcattcaaggttttttttctgattatatggtcctagaaatgcactgtttaaatatttgggctggaaaaaactttgagtagcatttatttaatacagttggcatagctgatttgtcagtttcaagttttgattacaatgcacggggtcatatgtattgtaattccttgcacaattacgtggagccctaatacaagcttccagcaccctggtgcacatttctgctccctccctcctgaccagtgatggcagcttgcagttctaagtcctgagtttacattccttaacttccttttctgtatcctaatttccttttcctaagtgcaaatgacacactttggttagtctggaccccaaatcattttatttcaggaaaaagtgtgcaataaatctatgcataatagagtttttatattcggataactcaggagttgctggacaaacaccccccagctgtacacatgagttgctcagatcattctagaatatcctagagatcagaggtgggtgatcttgaggagccaggattcttgctgctactcagtggagttaaatgcacgtgtgagctcctctcaatatagcctgttgagcctaaactgcatagtgagactagactcaaagatttagttaacatttcctgagttcctactgtgtgcccagcattgttgacagaaaaaataatcagtagcctcaaggaattcactccacagggtgcgagggcagtctgtatgccagtgccaccgacggcagaactgtgcacagtgtgctacgaacacctgacagcagacacctccagctgggaaaaccagttttcctgactccaactccacacaaacagaatcaccaggcccagctcagggcaccctgtcctcgataacacttaactaggtgtgattagtcacgttattagttgttgatatctctgccctccactagaatgtaagctccataaggacagggaatgtgttttattccccctctattttctcattgctgtttcaatatgcttggcacttagcaggcctgccataaatacttgttttttggatggataaatgtgaaaataaatgagagagacattcagcctggctttaaggagaaattaacgtgtttagtgtatgaggttgggcatcaccggtaataattagaatggaaaccacttggcagtttatcagaaaaggggagtatttaggtgaaggtggcaaggagggagagaaaggagaatggcttttaaagacagtcgctaactgctggggtagggtgggggcggggaagagttcagatgtgtttcaaagaactttgggggttttttaaacatttcttttgtaagttggttctttacctaactgaattattttgggaacagtgattggctctatcttaaagatatagcggtttctgttacttcttttttttcttatattttctaagcgtcaaagctactggaactccgcttcctaaaatgctgggaaggaaagggtgtgaaaatgccagatgcccccgccagcacaggctgggctgcctggaaagccgattcccactccgactcgccctcgtggtgcggggagggacgcgtagttgtgtcccgcgctctgactggctgcgttgggacgcgggggcgtgtcttgggggggcgggggttggcggtcatctcccgagccctgattggccatgggcgaagggactgatggcctggttggcgctgctgagaactgtcgggagcttcttgagaccgaggaccgaaatcccggctccaggcctcggggactgcggactgtggggaggctggccggagagagagggaaggacggggcctggcccccgggactccctgtgccttgcttggagctgacgccgacgggtgagtcgcccccttcc

SEQ ID NO: 10390 - DNA, 2300 bp, Homo sapien
atatttgatacccagaggatgtctagaagctcaggagaatgatttttggactcattaatcattttggacacatttcttggtcattataacaagctaacaccctcaaagacttcagtgattaattttattttctgctttttaagccttttgggagcttattagccaaaatgtattgtcttttttaatactaactacattttactaactcttgttataggatcatagaactcaatggtggacaaccgcctctaacttataaaagattccagactctcatcagcaaaatggaaccactagagataccagtagagacaattacttcagaagtgatagaaaagtgcacaactcctctgtctgatgaccatgatgagaaatatggagtcccttcactggaagagctaggtgagtgtaaactgtagtcagtgtgaggcttgcaagttaataaatcataaattactcagaaaattccccttttaattttgccatgtaaagtattttgcattaggagagaaagaaagggcagggggagaagaaaaagaaccctttaagaagtgatatgtttgttcatcatttatgtgttttataaatatgtgatctattgttaccaccttaagatgtacatcctgaaaaattgaaaccatgtcatatcctctataggtgagggcttatttaggccttcagttcatttttatggtactctcttaatttttctgcaaagtaatttgttctcccagttattggggttaaataaaaattagtttcggaagaatgatgtttttttcttttctttcttgtaggttttgatacagatggcttatcctctgcagtgtggccaggtggagaaactgaagcacttactcgtttggaaaggcatttggaaagaaaagtatgataatgtagattatatagctatgcttgtatttccaaactgccatttaaaaaataatttttctctcttttaaaaataacaaatagattgttgaaaggggaggattaacagaaatggttaaaatagcacaaacctaattgtttgaaagttaactaccatctcctcatttaaatgctctttctccttctcttctaattatttcccctttagctactaccgcactacctcttctgttctttctacctaagctagtatctagtggccacaatttcgaaactagaatagaattatatttcacctttacctttgtgttaaagagaggttgaaagccaggcatggtggcttacgcctgtaatcccagcactttgggaggctgacgcaggtggatcacttgaggtcaggagttcaagaccagcctggccaacatggcaaaacccccatctttactaaaaatacaaaagttagccagggtggtggtgtgtgcctttaattccagctacttgggatgctgaggcatgagaattgtttgaacccaggaggcagaagtcgcagtaagccaagatcgtaccactgtactccagcctgggtgatggagtgagactccatctcaaaataaataaataaattttccaggcctggtggctcatacctgtaatcccaacactttgggaggctgaggtgggcagatcatttggggtcaggagtttgagaccagcctggccaacatggtgaaatcccatccctactaaaaatacaaaaattagccgggcgtggtggcgcatgcctgtagtcgcagctactcaggaggctgaggcaagagaatcctccacccgggagctggaggttgcagtgagccgagattgagccactgcactccagcctgggtgacagagcgagaccctgtctcaggaaaaaaaaaaaagagagagagattgaaggtgctctcagctttctgttggaaatttgaaggaaatttatttcacatgagtatgtgctgcacaaggacgactgaaacaaaagaatgctcacttttttatcctgtcttattttttattaaaacatgtaatttgtggctaggataagattttattccccaagaactatgtaactttaaaaaaaaaaatctccattctgagtgttcttttaaaatgaaaaagacaattagttaatataattttctctgtgtgttttcaggcttgggtggcaaattttgaaagacctcgaatgaatgcgaattctctgcttgcaagccctactggacttagtccttatctccgatttggttgtttgtcatgtcgactgttttacttcaaactaacagatctctacaaaaaggtattctctaaaattagagcttattgtttaatactttaaaaaaaaattctgataatacttctttgctttttaacca

SEQ ID NO: 10391 - DNA, 2300 bp, Homo sapien
tacttactctacccattttatagactaggaaacaggcatggagagtttagcagtttgcctaagtagttgagccagtctttgaacttaggaagtctaacttgttagatcctgtgtttttaaactattctatactacctcactataaaacaaagaaatagaatgcttttctattctcatcttagttttatttttaaatttcaaaaatagcaagttcgtactaacaaatctgagcaatgcagcagaatgtaaaagttatcttatttacatgctcaaattctattcctcaaagtcaacagcccttaatttcttgatgtgcacttttcaggacttttaagaaaggaaaaaatttttaatgagatactatttttttcctaatagtttagcagacatttaaaaacaattactggctgggcatggtggctcacgcctgtaatcccagcactttgggaggccgaggtagatggaggtcaggaatttgagaccagcctggccaaaatggcaaaatgccttctctactgaaaatacaaaaattagctagttgtggtggtatgtgcctttaatcccagctactcgggaggctgaggcaggagaatcgcttgaacctgggaggtggaggttgcagtgagccaagatcatgccactgcacttcagccactgcacttcagcctgggtgacaaagtgagatgtcatctaaaaaaaaaaaaaaaaaagattactaatacatattattggcaagtgtgtggagatcaagccttaggtgcactgctgatgggaatataaatttgtacagtctttctggtacataatttgacagcctatcagaattttgaatgtgcttatctttgatccatcagttgtttttcaagggattatttctaggaaaaaattggataaataccctataatttgtaagatgtgtgcataaaggtaaagatatatactgtaaagtttataatagcaattttttttttttgagatggagcctcgctcctgtcgctcagtctggagtgcagtggcacactgcaacctccacctcccgggttcaagtgattctacttcctcagcctcccgagtagctggaattacaagcatgtgccaccatacccagctaatgattttatttttagtagagacggggtttcaccatgctggccaggctggtcttgaactcctgacctcaggtgatccacccaccccagcctcccagagtgctaggattacaggcatgagccaccgcacgccgcctagaatagcaatttttttaaacccaccattggaatagcccttgtctaatctggaggtgtttggtgaattatagtatgttaccatataggcagttaaataatggtagaattttttctttatgagataaatcagaatagacttagaataaaaaaaaaactttctccttaagaaaaatcaattcctttaagtcacagtttcctcatttaaaatcagtataaggagatgtacagaacttattaacatagctcctgataataagtaactgctattattattaccatctccaaatttttcagttaacgttttttagtaatcagaaagaaaatatttacatacacacacacacacgacctcagccaggcagcttataccatatcaatatcaaaggttagttaaagaccagttcttagactcaacagacataaattcaggtggtctggctttctgtgaactctggcaggtccctaagttttaaaaataaacttatctccaaaatggaaatactaaccaaagtgccaaactctgagtgttgttttgaggctcaaatgaaataatgtaagtatgagtaatttgaaaaagtaaagtgctctacaaacacatttagtataagagctggttttaagcatattgctttgctagattgttgcctagcataatgcctagaatctaatgggttatgcattcattacttatgtattttttaattgataaattgtttactttttcctgcatattcaaagtttgatttatgtataatcctttgatatgtagattttcagctttttcacttttcgttataatagaaaaaataactattacaattggtgtacattgttcccctttctcttactttaggaatggaacattactaaactttcaattgagtatgattctgagccctttggaaaggaacgagacgcagctattaagaaactggcaactgaagctggagtagaagtcattgtaagaatttcacatacattatatgacctagacaagtgagtcctttttttttttttactgtgggaaaatgcgtataacataatatttaccat

SEQ ID NO: 10392 - DNA, 2300 bp, Homo sapien
aaattgtaggaagtttgactttaaaaaaccacaggtgtgtttctaatatctagtacagtctttagtacataagttctcaataaatatttgttgaataaataaatgattataaagtgttattcaagggactgcccttgtggtaaagaggtactgtcattttaggagagtctcaaatctaattacgttagattttttagaattctctatagtaaaaggctgctaatggtaaactctcccaagtttgtctgaagataccatccttatttacactgggtatagaattctaggttcttttatgaccttcttgattttctttttcttgtctttctctttaaaaatcatccttaccaagtaaccgttagaaaaacctcgtgcaaacttgggatagttgtttacaatttatatcataggtcagaaaaatcagaataattttcagcatttttgaataatttttttgagaagggaaatttcttttagactacagaaaatcattatatatagttctaatttgccttttacaaatgcttaacagattttatttaattttatataagtctcctaaagtccccaagtagatgttctgctgattttccctcccctttggagtcacaatatagtgttctttaaaaatagataaaaattagtaggagccttagattacaattacctctatgtggtttttgaaatcatggtggcataagttatatagacttgtgctagtgtaattcaactctagaaggtatatatacttctattacagatcattttatgctgctgtcacaaagtgaaatgctatgatagttaaaaggcccatatcaaagattatcttcgtgaaactttatggaccttccttgacagattgactcctctgtgccatgaactttaataatgcagtttgataggtaatatccatatcttattctcattaaatttgggaggcttcaaggatgggaattctgtatcttcttatttatctatttttaaagctttattgattttttttaactcaagaaaatacccaaatgttgattgaaagaatgagtgaatgaaagtgcttcagatacaattttctgcattttattggtcactaatattttaccataaaaaggacataaaagcagtaggactataagaatatttaaaaattaatacaggcctaaatgtaactttttacctaaataagataatgtgactcacaggattagttaagaatagttctgttgtttctgtttgtttgtttgttttttctctacataacacatgtttttcatataattacataacagctatatggttagggaacatttttattttcaaatgtgtaaacgcatgtaattgaaatttgttttcagtccatgacaggttcataaccctcttgtttgaaatttttaaactgtttctccacctttcttttgaaaaccacatcatatttagtggctatcttaattggatttattttgttgttctttcattattttcttttttctagagctctcatactcacttcctgttaagtctccttatcaaagtgtctgaatctttctgtcctgctctttctcatccattccactcttcctttctttcatgctgccccctccttctttcataattgacatccaaacacccatttgtcctttctaagactggttagtctgtccttccaaggctggttagtctgtctctgtcatctttacaaagatccatcttacaaaggtctgtcctttctgtcagcctttcttcctttttgtgttatttctgtttgtgctgctatgagggaacatctcagactaggtaatttataaagaaaagagatattttggcacacacttctgtaggctatactggaagctgctgctaacacttgcttctgttgagggcctcaggaaacttacaattgtggcagaaggtgaaagggaagcaggagaatcacatgacaagagagggagcaagagagaggggaggaggtgccagggtcttttaaacaaccaaatcttacatgaactaatagagtgaaaactcacgcatcatgacgatagcaccaacccattgatgaggtatctgccccagtgacccaaatggctcccccctaggcccacctccaatactggaggtcacatttcaacatgagctttgtaggggacacaatgtccaaatcatatcacttattctgtctctcccttccttttttggtgctacctgcctatcctaccttccttcttccaaacttccctccccttgccatctttcttcccagccctcctcattgtttttctctctacctttccattttttctagcttt

SEQ ID NO: 10393 - DNA, 2300 bp, Homo sapien
gaaggtgctaagaaaggatctgttccaggtctttctcctagcttccagtagttccttggcttgtggcagcacagttccaatctttacatggtattttccctgtatgtatatgtatttctgtgtctaaatttctccactatatgaggccaccaatcacactggattagggtgcaccctaatgacctcatcttaacttgagcatgtacaaagaccttatttccaaataaggccacatttatagtcattgagagttatatgattttggggacacacaattcaaccaataagaattgccatctccttctttcttttaactttgccaaacacactggtggccaacagcactcactcactcactcattcattcattaaataagcatttgcctatgtcaggctctgttctggtgttgatgcaaaaaataaaaacaaaagaaaactgaatacagacccagtccttgagaaatcacacttcagagggaatcagaggcacattattatgataataagtactattactgagttggtattgctaggaatgggcacttttcaactaattttcacggtagtgtgaaaagtgatgtaacagaaacatacttggagaacccagggaggtcctaaatttgccctagggatcaggaatactttcagaaattagttattatttcatctgagtctaaagggatgcgtagaaatatcctaggtagctcaaaggtggtaatattgagtactggattccaaagaagagtattttatagaggaaaaaacagcaaaggttaagagacaaattgtaaaccccaggaggggtggggttttagtctgttttattaagtatctcctgtatctctagtgctttgaacagtgcctagttcattcaaaaagtaatcattgaatgaatttaagggcatcatatatctaagggatgccatggcctgcagttcactgtcgctggaaaagtagacaaacgtccagtttcaaagagaccggtaaactacattaaatgtaagagacgaggggtgaaaggttgatgatatatatcgctagtattaaaaaaattccaggaagtccaggaatgcctggcatccgtcctgccaattacccttttccccagagtatgtacaagggggaggaggcacccaagggccaggagagtggaggggcacagctccacaatctccaaagtagggttctctggccaaagcaggattgaagcacatggtttggacttgaaatgtacgtggagcctcccactctcctccttccactccatcctcccctcactctccgcccgactccaccactggctcctgaaggaaaccggacaatttccaggccctccccaaatcccacgggaggaatcgccgagcgcgctcctgcccgccggccccgcccccttaccctctggaacgcagcgagagcgcacgcgcgcctaacggagcagcgcgcgcgcccgcaagctccccgcatccccgtgctcatccgggtctcagcgagcctcggccaatggtggccgctcatggcccttgggggcggggctaagccttccctcacaaggggcctgtggtcaacgcgatttgcttccaagggacggccaccagtcggcacaggaaaggggcagaggcagtgagttcagcgtgtggacgagggtcaacaagtttgggatcaagcggctgccgctcctccaaaagcgaccgaagcgcgagcagattacccctccgagccagtgtagtaaacacacttcagaaacgtgaggtgccggtggtcacgaggggagcgcgccctccaatgaggagccgggggcggggccgaggccgctgacgcggcggcggcggcagagtcacccgggcagcctcgggaccggtcaccggccggcaaccgtccagcggcctcgaccaccgcctctagcctccgttcccggtcctttctcccgggccgagagacagcgtcgccgacaggggctcattcccctccggttctcctcggtgactcacctcgggcgggccgttttgtctttaggggccgccttggtggggcgaggtttccgtgacgaatctcctggggccgtccgtgccggctcgggccgtcgtggcggctcgagctcctggaacttgctcaggctccggaggtccgaggccctcgaagttatgcgtcgcctccaggcggttgcggcgggcgcgggctcctaaagggcgtcacacccggactccgccgactaggcaacctccattcatctttccactgcgcctccggcgcccccgccttctccggtcccctcctcggagtcattttttcctgttccccct

SEQ ID NO: 10394 - DNA, 2300 bp, Homo sapien
ctggggaggcctcagaaaactgatcatcatgctagaaggggaagccaacacaaccttcttcacatagaggcaggaaggagaagtgctaagcaaaagggggaaaagccccctataaaaccatcagatcttgtgagaactcactcactatcatgagaacagcatgaaggtaactgcccccatgattaaattacctcctaccgggtccctcctacaacacgtgtggattatgggaactacaattgaagatgagatttgtgtggggacacagccaaaccatatcattcatatatataattttaaaagtattcttacagaaccaaagaaaggctgatatatacttcttgtggcaacagaagcagaagtagggaagactattcagacagattggctctctagagtattgaatttactttattgctgcactagtttgctagggctgctgtaaaaaagcaccacaaattgggaggcttagaacaataggaactaactgtctcgcagttctagaggccagaagttcaaaatcaaggtgtcagcagtgcgacagtcctgtgaaggtgctaagaaaggatctgttccaggtctttctcctagcttccagtagttccttggcttgtggcagcacagttccaatctttacatggtattttccctgtatgtatatgtatttctgtgtctaaatttctccactatatgaggccaccaatcacactggattagggtgcaccctaatgacctcatcttaacttgagcatgtacaaagaccttatttccaaataaggccacatttatagtcattgagagttatatgattttggggacacacaattcaaccaataagaattgccatctccttctttcttttaactttgccaaacacactggtggccaacagcactcactcactcactcattcattcattaaataagcatttgcctatgtcaggctctgttctggtgttgatgcaaaaaataaaaacaaaagaaaactgaatacagacccagtccttgagaaatcacacttcagagggaatcagaggcacattattatgataataagtactattactgagttggtattgctaggaatgggcacttttcaactaattttcacggtagtgtgaaaagtgatgtaacagaaacatacttggagaacccagggaggtcctaaatttgccctagggatcaggaatactttcagaaattagttattatttcatctgagtctaaagggatgcgtagaaatatcctaggtagctcaaaggtggtaatattgagtactggattccaaagaagagtattttatagaggaaaaaacagcaaaggttaagagacaaattgtaaaccccaggaggggtggggttttagtctgttttattaagtatctcctgtatctctagtgctttgaacagtgcctagttcattcaaaaagtaatcattgaatgaatttaagggcatcatatatctaagggatgccatggcctgcagttcactgtcgctggaaaagtagacaaacgtccagtttcaaagagaccggtaaactacattaaatgtaagagacgaggggtgaaaggttgatgatatatatcgctagtattaaaaaaattccaggaagtccaggaatgcctggcatccgtcctgccaattacccttttccccagagtatgtacaagggggaggaggcacccaagggccaggagagtggaggggcacagctccacaatctccaaagtagggttctctggccaaagcaggattgaagcacatggtttggacttgaaatgtacgtggagcctcccactctcctccttccactccatcctcccctcactctccgcccgactccaccactggctcctgaaggaaaccggacaatttccaggccctccccaaatcccacgggaggaatcgccgagcgcgctcctgcccgccggccccgcccccttaccctctggaacgcagcgagagcgcacgcgcgcctaacggagcagcgcgcgcgcccgcaagctccccgcatccccgtgctcatccgggtctcagcgagcctcggccaatggtggccgctcatggcccttgggggcggggctaagccttccctcacaaggggcctgtggtcaacgcgatttgcttccaagggacggccaccagtcggcacaggaaaggggcagaggcagtgagttcagcgtgtggacgagggtcaacaagtttgggatcaagcggctgccgctcctccaaaagcgaccgaagcgcgagcagattacccctccgagccagtgtagtaaacacacttcagaaacgtgagg

SEQ ID NO: 10395 - DNA, 2300 bp, Homo sapien
cattctactttttgttactatgagttcaacttttttttaaagagtcgacgtataaatgagatcatgcagtacttgtctttctgtgtctggcctatttcacttaggataatattctccaagttcatgatgttactgcaaatgacaggatttccttcttttttagagctgaataatattccattgcagatatatacacaccacattgtctttacccatttatctgtggatggacacttagatatgtttccacatcttggttattgtgaataaactgcaatgaacatggaagtgcatctctcccttcaagacagagatgttcttttccttttttttttctttcttttgagatggagtctcactctgtcacccaggctgaggtgcagtggtgcaatcttggctcactgcaacctctgcctcctgggttcaagcaattcttgtgcttcagcctcccgagtagctgggactacaggtgtgcaccaccatgcctggcaaatttttgtatttttagtaaagatggggtttcaccatgttggtctggctggtctccaactcctgacctcaagtgatctgcccgcctcaacctcccaaagtgctggcattacaggcgagagccactgcactcgactgagattttattttctttgggtgtatactcagaagtgggattgctggatcacatggtagttctatttttatttttgggaacctccatgctgttttccataatggctgtactcatttacaccccaccatcagtgtacaaaggttctcttttttccacatccttgccaacacttgttatcttttgactttttgataatagccatccttacaggtgtgaagtgatatttcattgtggttttgatttgcatctcccgaatgattagtgatgttgagcatatttgcatatacctgttggccattgttgaacattcaaagcaacaatttaaaagcatatccttacgtccttcatcaatttacaacaaatatttactgagcacttatactgtgccaggactatgcatgggaacccctagcccagtgtagaatccagacaagtaaccaggcttttgcaacctagtgttgcaagggcccagaaatcagcaaccacagaaggggatagaggcagtggaagcaccgaagccagtcttgaaacatctgggccagcttcctataggaggggattctaagctgagagacacagtgtgcggagctaggaatccccatgtgtgtaagatatggtttctgcctgggtgggtggggacagacaagtagatgacacgatgctatttgacacaggaatgcagctaagccatgcatatatatattatatctttctttagtcaggaaagaagattctcctttgagcaaatttactccttttaagaaggccgagctatttggaaagatgcccaccaggatggcaaagtggtgcttgagccctccctgcagcacacgcccaggactttgaagcagggacagggtcctcctggctactgaaaggaatcgagttaacgcgccctagtggcaggtggcgaatggccggagatccggcctcccagtggtgtccaccgccacgggcctccgctcgacaggcttatttccctccatgctggagcaaaccccggctgaaagagggccgcactaattggtttgcgtacccgaagtgggaatagagagggaggaaaaccatgtttcaggtgttacggggggaaaaaagtgaaatgcgaaccgcaggggagagagcgaccgtcaggcagacaccttgtgaaccgcggtggagagcacacctaggtggggaggtcaccggcccaacccaccaccctccgggagaatgcgggcagggacagcagcagggggcagcatccacgtctctacgcttgcaagggttccccaagtccctggccactgctccccacttcctgcagcctcggtgtccgccgggggcgtgtgtgaggggcggggccgcatggggaggagggatttaaaaaaaaaaaaaaaaagcgaggtaattagcattctccgattccactggctctccgccgcccctgctttgcatacgcccgtcccactggctgcccggggtttgctggggttcggcaaggtttgcagccgccacggccgctgctgcgctccggtgcagggcaggctggcgccgagcgaaccagggccgggaactgggagccgggagccgggagccagctgcccgcggagctgcggcggcggcggcatctggggtggtctcagtcccacgaacaccgtggccggcgcccggtggctactgcgcccagcggggctca

SEQ ID NO: 10396 - DNA, 2300 bp, Homo sapien
aggaatcgagttaacgcgccctagtggcaggtggcgaatggccggagatccggcctcccagtggtgtccaccgccacgggcctccgctcgacaggcttatttccctccatgctggagcaaaccccggctgaaagagggccgcactaattggtttgcgtacccgaagtgggaatagagagggaggaaaaccatgtttcaggtgttacggggggaaaaaagtgaaatgcgaaccgcaggggagagagcgaccgtcaggcagacaccttgtgaaccgcggtggagagcacacctaggtggggaggtcaccggcccaacccaccaccctccgggagaatgcgggcagggacagcagcagggggcagcatccacgtctctacgcttgcaagggttccccaagtccctggccactgctccccacttcctgcagcctcggtgtccgccgggggcgtgtgtgaggggcggggccgcatggggaggagggatttaaaaaaaaaaaaaaaaagcgaggtaattagcattctccgattccactggctctccgccgcccctgctttgcatacgcccgtcccactggctgcccggggtttgctggggttcggcaaggtttgcagccgccacggccgctgctgcgctccggtgcagggcaggctggcgccgagcgaaccagggccgggaactgggagccgggagccgggagccagctgcccgcggagctgcggcggcggcggcatctggggtggtctcagtcccacgaacaccgtggccggcgcccggtggctactgcgcccagcggggctcagggaagagcggtctagacactttttattttggaagaaaggggcaagccccggcgggagcttccttcccggcctggctcgctccccattgcgcccagctccggcccggactctggaagatgactccagggtctgctctgtatattccagcggcggcagttccgggaggcagccgaaagtactaacagttggtagcagcggctagtggaaaagtgagccaaggcggcgcggactcggctctccccgcgccccgcggcactcgctgctcctcgccgctccttccctttggctcccaggcggctgcagcatgaagtggcgcagcgatggccaggagaggtaagaagcccgtggtgagaacgctggaggatctgacgctggactcgggttatggtggcgcggcggactcggtgcgctcctccaacttgtctttgtgctgttccgactcgcacccggcgtccccgtatggcgggagctgctggccgcctctagctgactccatgcacagccggcacaacagctttgacactgtcaacactgccctggtggaagactccgaggggctggactgcgccggccagcactgctcgcggctgctgccggacctagacgaggtcccctggactctccaggagctggaggcgctgctgctgcgttcgcgggatccccgggcaggcccggcggtccccggcggcctgcccaaggacgcgctggccaagctgtcgacgctggtgagccgggcgctggtgcgcatagccaaagaggcgcagcgcctgagcctgcgcttcgccaagtgcaccaagtacgagatccagagcgccatggagatcgtgctgtcctggggcctggccgcgcactgtacggcggctgcgctggccgcactgtccctctacaacatgagcagcgccggcggcgaccgcctgggccgcggcaagtcggcccgctgcggcctcaccttctccgtgggccgcgtgtatcgctggatggtggacagccgcgtggcgctgcgcatccacgagcacgccgccatctacctgacagcctgcatggagagcctcttccgggacatctactcgcgggtcgtggcctccggggtgccccggagctgcagtggccctgggtcaggctcgggctccggcccaggcccgagctcgggccctggtgcggcccccgcggcggataaagagcgggaggcgcccgggggaggagcggcgagcggcggcgcctgcagcgcagccagcagcgccagcgggggcagcagctgttgcgccccgccggccgccgcggccgccgcagtcccgccggcagccgccgccaaccaccaccatcaccaccaccatgcgctccacgaggcgcccaagttcaccgtggagaccctggagcacacggtcaacaacgactcggagatctggggtctcctgcagccctaccagcacctgatctgcgggaagaacgccagcggtaagtgtctgcgcgggtgccactccctctcacctaacctggcca

SEQ ID NO: 10397 - DNA, 2300 bp, Homo sapien
agaatgggagaatgagggagacagcctaagaagcaggctgattcaggcagaaaatccttgggactctgccccacagataggtccacaggtccagaaactcaattttatcagtttcacccagtaagaaattggtaaatcttagtctgtgtcatgagcaaatatttattaagtgcctacagtgtgccaggcaccatcctggagctgcggcgggagccgtgatccaagaagtccccattccctgccctggtggagtttacattctaatggggcatttgcagaggcagcgggtaaggccagaggagtcctctggggtgaggcccacaatgcgagggattcaagtgaggtaaagtcaggaggaacgtctagggagaaatgggatttagcctgtggtttgaaggttaagagggatgtggatttttaaagggcttgaagccttacagacaggaggctcagctgcatgaacaggaatcagcccattgcatgccagcaagagtccatgacctgatcagctcccctggggtgacaggtgcatgctgggtaacagagtgcatgctacgaagttggacaagagaatgtcaatatcacatggggtttctctacacatgctatatagtcaagtaacttgggtctgactcccagctcttgctagtcttgtggtccagggcatgatacctaacctggatcaacatcattctcctgatcaatgaaatgggcataatcataactagcacagaggttggtcctaggcattcagatgagaccatgaatcaatgtaaatggctgagctgctgaatattattaacattggataaatagatctgactataggaaaactggcacctgccaccaaaaactttctgggaagctcatgacatctgcatttctcaagggggctggctgacttataaccccatctacctgtcatcctcttctcaatgccatggtggccatgctggactgaatggcagccccagggccgggggaggcaagagacatgccaagaacatatttgcatgacctagcctccttcagttttgcacccagggaaccccactggcttcatgctagtctgacccctgctgaatggcaggaaaccttttgcatctacgtagtgcatttctcaaagtgtggtacttggcccacctaaatcagaatcccaggggctgcctatcagaattatcttcttggactctaacacaatcaccatctctggatatagagccagatgattcccaggccctctcatgatgactttagagcagaggttctttgagaatgtcgtccgcagaccagtagcatccgtatcaggaactggttaggaatgcatttcctgggtacctcccctgatctatggaatcagaaactctgggaatgagacccagcagtccgtattttaacaaaccctccagataattctgatgcacattaaattcacatggggaggttttgaaaactgcctgtatccagctgcaccctataccaattaaatcagaatccctgggacaggactcaagtgtcattattttttccaaaatcttctccagtaatcctaatgtgaggacagagtttatcatcactggaagaaataggaagatggcacaaatgcgttgcacttagaaagttgcccttcagttgtaggcattgtctcaatgcgtgcaacaagcttgcaacagcctaccatgatcccattagcaggcagggaacttgaggctctcagagtttcaggggtgtgaccaaggtccaaagggcctcgaattgtgggcgccactgggtggctgcccagccagcctgggtctgggggaaggctgccggttaacctggctctctttagagagccttttctaggtgccaaagccttttggcagcatgttgcctgggcagagctgaagcctgaaagagctccagaaagacgacagggacgaggctgcagatgggaagggagtgctagcggacaccttaggcttgggtccacaatcagggagccccaaatagaaataacacggggcgctgattggttttccgccgctccagaccctgcgcttggtgcttcaagtgactcatccttatgttcacatgatcgccgagagggataatattcccagatcagttacctcctagcctttcctagtcacattatccccaggctacagatgaggaaactgaggcccaaggattccagagagcctgccccggggtcaccggtgcggtccggatgtctccaaaggctctcccactactctggaattcagaggcagggtctccagggaaagcggggtgtgggctggggagtcgggagatgg

SEQ ID NO: 10398 - DNA, 2300 bp, Homo sapien
ctcttccataacacacatctatacctctcccagcatgcatattctctaagacattcatattggttaactgcaattcaatatagtatattcatatcatgtgaatacaaatattatatgtaatgatctatatggccaggctttaaccaatatgaaatgatcacatatccacacacagcctcacacacagagtgacagacccatgaagttcttcctggttgctctggggtggggcttcagctatttttgtggatttgttcattttgcttgtcgcaacatgaacatgagatttggttgctattgataccttagaaccttcccttaggtgtgacccctggtgtttgtgtagaatccattggtttccagccagtgggaagaagcatccaagacatcaagggagtgtttccaaaagacacttgcttggatcccacttcttgagaatcaggtccaggaggtctagagtagggccttggccatgtgtcttctgaaacagctccaagcacagtgacatgtcctcattggaggtcctttgggcatataaatatgtattgcttgtactttttctggctgttgtagagttggtgttcagtgaacagccatacggtacattctaaatcataagcttgatctttacttcatcagaaaagagagatcagcatccaagttcatgactgcacctggtcctgtagtgagtgctgaggttgggcacatcaggaactcacctccttttgtgtggtccatgcctcttgattccatgcagagcagggacagctctgcaatgctggaatttcatgggaatcctttgttgtttcctgggtcatgagaatccttagaacagatcccaagtcatgtttcaggaggctcacagtgtgacatgtcacactgagagctggcttctgcctatagaacagtatgcccagtccactcctggtagaggaaactaagaaagaaggggtcggttggtggtctggtggacacagatgtcattccttaacatgcaaggacattcccgacctttaaatcaggaatgggaacagtaagcagccaagcaaagccacacagaagtcaggcaaccaccctgccgcagggccagcgatcacggagtgccaagtaggtggctcccccatggccgtgccctcagggagccctaggtaggcagtaaagatagcagatttttcccccattttccatcagcagtgctgacagcacattcactgtgaatgagaccaggcatggacagcatccctacctctttaggaagcccagctatctcaggggatgcacagaatgaagtcttatgaagcaaaacttctggaagctcactctgccactttattaactgatcttgctgtccagaaaccttagcatttgctaaactgtcctcagggccatccaggtggggccccgggagacccccaaagtccttcagaactcttgagagtctgtggttctacgaggctaccctagtgccctctgaggctttgtgtaaccagcccaggaggggagtcttccagcattcctgtgccaagaacctttagcccagtgcttctagaaatgtttatatatgtatacatctcctggagatcttgttaaaatgcagactctcattcagtagacctgggtggggcctgagagtcaccatttcccacaagctcccaggtggtgctgatgctgttatgcatggaacacattccgagtagcctagcagcaatgagagactctcagttcatcctccagggtacagttgccctccagcctgtgcacgctgtcaccaacctagagggagggaaggagtgctggcatctcacccatcccagcagtctttcctgacacctgtgcacagtgtatctcctctcaccgtctcaatggccgctcttcctctgcagctcctcctggatgctggggccaaggtggaaggctcagtggagcatggcgaggagaactactcggaaacacccctccagctggcagctgctgtaggtaagagctgctggttctcaccctggccagggagctccagtgcaccctggcccttgaagtgcctgtgactatatttttgctttattctcttataaaacccccttctctgggcttgcaggaaattttgagctggttagtttgctgttggagcgtggtgccgatcccctgataggaaccatgtacaggaatggaatttctacaaccccccagggtgatatgaactctttcagccaggctgcagcccacggacacaggtaggctaggatgggccaaagccagaggtcccgagtggtgtttgttaaaaatgcagattcccaggccta

SEQ ID NO: 10399 - DNA, 2300 bp, Homo sapien
tgtgttcctttctgggggctttggggaagaattgcttccaagctctttcagagatttttgggtagagttcagttccttgtggctgtaggactgaggtcctacttccttgctgactgttggtgtcacacttaactcctagtgtggttacctgagtcccctcacgagcttgccatgtggcccctccatcttcaagccagcaacagagcatcaagtccttctcagactgggatctctttgtcatcttgttctcccccctcccgtctgaagtccttttctgcttctacttttaagggctcatgtgattactttgggctcgcccagataatccaggataatctctctatttgaaggtcaactcatgaggaactgctatgctcttgaatgtttgtccccccagaatttaaatgttgaagtcctaacccccaaggtggtgatattgggaggtggtgtctttgggaggtgagtaggtctacaaaagacaccccagaggagcctcagcaccccttctaccacgtgaggacatagctagaaggcaccatctatgagaaagtgggccctcaccaaacaccgagtctgcgggcacgctgatcttagacttcgtagcctccagaacagtgagaaataaatttctgcactttataagccacccagtttagagtattttgttagcagccctaatggactaaagcactaaccttaattactcctgcaaagtcgcttttgccatgtaaagtaacgtgttcatggtcccagtcccaggggttattagggcatgcaatcttctaggaggccataattattcttaccacacagtgcttctcaagcatgaatgtgcatgggagtcacctgcagagtgtgttaaaaatgcagattctgattcagtgggcctgaatgagagtgtgcatttcttacaggatcccagaggatgctactgcttgtggtctatggagcacgttttgggtggcagggctttaggccagaggaaacaaatttatagcccacagcccaggtcgaacccatgacagaatttcagtgcatggaacctgtggttctcaaacttaagggaatgtcagtatcaccagaaaatttgttaatacgcagatgcctgggcctcactcccagggtttttaagtcagaaggtctggggcgaggcccaagcatttacatttctaataagctcccaggtgatgctggtccagggaccacactttgagaagaactgcattaagccgataggcaggcagttatttttatgagtattaagtgaggggagcaccgaatgccctttggttataaagcctctcgtcattgaaagttgagtctctttgtccttcaactatgattatgcctctgtgaatcacatctgaggtgacactgttccttctgtgatctacccactttaattgaagggtttggattttcttttgtatgccaagctgtatgcttctgcctcgggaacacaatgaagtaggtagatttaagaacagcttgaaccactcacatcactagtggccccaaacccatcttttaaaattcaaaagaatatttattgtttttatcacaaaagcaatgcttgtttcttgtagaaaatataaataaaagaaaaaacatcctcatctcacccaaaggtaactactctatttttttagatctttttctatacatatctgtcaatccaaatatatttgtagagggttttattgccaaaaagacatggtacaaactgtgttgtaacctacttttcttccttaatctattgtaaacatttttcaatgtaacccctttgagcccctagtttcaacaccctttgtccaacaaaaagaaacaaaatgctctgtttcgtttttcctccgatacacctgaagctggagggagattaatgaacggaaatggctgcaaagtgggaagaggtcaacgtgaacgatgagggtcaaggacaagcaggcgcgtgtgtccccagcactgaagggcagctgtagttttgggttgcagaaccagttccctcccaccttttgtttggagccagtgattcagctgagcacttctgggtccggaaatgcctcagcaccagaatcaagttcacaagaaagctgaatcaggagcgtttgtctcgttaatggagaacacagtcacaggatcaaaagggctaatttcaggataattctcctgaaatcctgctaatttcaggataattcactgcttccagaattttagagtactggtaaaggtgggtttggggtaaaaacttattttccattctctatgaactacaaaaacctgctttccagtaggtagcgaat

SEQ ID NO: 10400 - DNA, 2300 bp, Homo sapien
gcgatttcggcttactgcaacctccgcctcctgggttcaggtgattctcctgcctcagcctcccaagtagctgagactacaggtatgcaccaccatgcccggctaagttttatatttttagtagagacggggtttcactacgttggccaggcttgtctagaactcctgaccttgtaatccaactgcctcggcctcccaaagtgctgggattacaggcatgagccactgcacccagctgagatctgatagttttataaaggggagttcccctgcacatgctctcttcttgcctgctgccatgtaagacatgcctttcttctcttttgccttctgcagtgattgtgaggcttccccagccaactgaaactgtgagtccattaaacctctttttctttataaattatcatgtcttgggtatgtctttattagcagtgtgagaacagactaccacagtagccaaactttatatggtggctcagggctccaaacattagtgttctactggtgggcagtgggggagtgggtggggggtgtggaagtggagaagtgggtgtggtggtggggaagcaaaacctgcatcctatttatgacttaaccttggaaacatcatttctgtcatactttattggccaaagcagacctacaactacccagattcaagttggtgggggcgggggggggtgctttgatggaggaatatcaagatcacgttgcagacaaacatgtgtgaaggactctattgttgcagccatccttgaaaaatattatctgccatatggtctttctaaaatgggttaaaagcaaagaaaccacagaagaatcatcttacagaaacagagcagggggagaagtcttaatggacaaataatctgcctacacaaacaatgagcaatttacttctgggaggatctctcctcaggcagggagattgccaagcgcattaggctgagtagagttggtgacagaactcatagttgtatcagctcctctgtgtgtgatctgagtaggaaagtatttgactactggggactctagcttcatctttaaaacaaagtgttgtgagaaccaagtaaaatactgtatagaaagataaatgtgttgcaaaaaggtccccgaatagagcccacaggtggacaccccccgtttgacaatgccactgggaaagaccatgtgtactgccagtttatccttgccactgtttccccatagcagccaccttcctgtttcttttgcttgcctctctcagaggtagatgcattgagggtaaatgaccaggacagggccacacagccaagagatcaaaacccagatttttctgggatgctagtttgagattttccattctacaaacgtccagccactcacgagttctaacagatgactgatcttagctgagaagcatgacatagatacaagggagtcacactgcccgggttcatatcccagctgcaccgcttactagcagtgtgacctttggaaggatcgctgttttcccaggtgtaaaacggaaataagacctcccacaaaggggtaagtaatcacgtgatacggcactcaaaacagcgccttcaacataagtaagccctttgtgtttgccaagactaaatcactactgcatagttagtatataattggtgctaaatgtttttttctcacttttttttttggtgctaaatgttttaaggtgagaaagtaacatttagggatgtaatgagatgtaatggtgggatctccgtgaaacgacaaattcattttggagaaagctttttaaaaaacgcaaaccacaaacctctgccatttgtcagcttgaagtctacggaactgcaagcaaaataaagattggtgaaactttgcttctgactgacccctacagtcccaaatattttcttggcctttacaaagcccgcaggcatcgtcacatgcagtcctgaaaagccttttctctatacttcacacagcccagaccagcccacgtggattcctcgcccggctgcttccgcttccattttgtcccctcctatttctcattcggcgcctcagaatgacgtctgaaatgagcgccgacgctgcccaaacaggagcctgcgcatgcgctctgccctggcagcggccctgtgcagatccctgagcgtgtggcagcagtgcggtcgtggtccctccctatgcagcctggtttctagcgtgacacgcccttgacttgaggaccatgaaccgcagccgccaggtgacgtgcgtggcctgggtccgctgcggcgtggccaaagagacaccagacaaggtgaggcctggtcgctgggaga

SEQ ID NO: 10401 - DNA, 2300 bp, Homo sapien
cttatcacacttgggacacttgatctggcgttctctaagaggaacacaagaaaaaacatttgatttggggttacaaataacaactgaggcaacacttattcttcatagccgcaggcctttgtcagagcagctctatccttctgaatcaggcttttgcataggtgatatacagaagactcataaaacatgtatagtttaaaacagtgtaggctcatttttcctgttttagaatactatgtaaattctcaaattctatgtaaattctatatgtatttcttttgtcttgctgcattctctcagtatgatgctcataaaattcattcaagctgctgtatcagttgtttgttcccttccactgctgtatactatttacaaatatacaaatacaccacaacttatctatggtactggatttgtctctagctaatgaatgttttggtggtttccagttttttattatcacaagcaaaagtgctagaacgtttttaaatttttttaaatttttattattattttttagagacagggtcccaccatgttgcccagactggagtgcaatggctattcacaggtgtgatcatcatgcactacagccttgaactcctgggctcaagtgatctgtccgcctcagcctcccaagtacctgggactacaggtgcatgccactgtacctggcatttgaacatttttatacttgtatggtgctctgcaatacatgtttctctagggcacatacccaagaactatatagctaaatcaaaggatatgcacatcttcaactttacaagataatgacaaacggttttccaatgtagttgtttcaatatacacatccatcattgacggttctggttgtcccatattctcaactggaagactcaaatttgaaaatgtctgccaattagccagtacataatggtatctcattacaccgttatttgtattccctggatgccacttttatggaattaccatttttctgtccttttcttagactagtggttctcaagtaggggcgactgcctctatggggacatttggcaatgtctggagtcctttctgattgttatactggggaggggtggtataattagtatctagtaggaaaaggccaaggatgctgctaaccattctacaatgcacagggcagccccacaacaaaaaattaacccggtcaaaatgtcaataatgtcaaggtttgagtaaccctggcctagacatttcagagctgaaaagaaccttagagatcacacagaccaggaattttttagctttttttttttttttgagtagctgaaccccatgtctttatgaaagcccaatatgaaacagttaaagcaggttattaataaaatcctggaaggagtgagagggtgcagtcgggcgttctgaagcctggcttccttagcatttctctcatcctcttctagcaacagatggcactgaagaacccttagaattccctggagcagttttaaaaccaccaatctaatccaacctcttaattctgcagatgggaaacatcatgtgcataaaaactactaaggaacttgcccaaggccacaacaaaacccctaccaaaagtctgacttttcatcttctactctgatggtttttagatgtttattcaacacatatttactgtgtctaattatgccaggcactgttctagatgctagggctataggatgtgggtaaactaagtccctgctttcatgaagcttacattctaagtggacagattatagcataaacaaatgtgtaacgtggtatcatatagcaataaagactacgaaaacacacgaagccaggtaaaagtgaaggggtcctattttagataagatagtcaaggaaggccctcctgaggagataacatttgagcagaaacctgaatggagggaagaagacatgcaggcatctggagggagaagtttctaaggcagaggccctgagactggatgtgcttagtatgctcaaggagtagcaaggggagggtcagagtggccaaagcagaatatgaaaagtaagaaaaggtgaagggagaggtagccaagtactattacatcataaagggccttctgactgctgtaaaaagcttttaacacaaatacgatggaaagccaccagagatgtatgagtggagacaggcacaatctgacttatatttgaaatggattgctctggcactgcggacagaaaactgtgtgtatgtgtgttcatctgtgttgcggagtagatgaggagaaacagcaagtagtggcagggagatcaactgggaggctactgaagccatccataga

SEQ ID NO: 10402 - DNA, 2300 bp, Homo sapien
caaatcctttgtcagatatttgttttgaaaatattttctcccagtctctcacttgactcattttgttgacagtatcttttcaagatcaaccattttaattttgatgaagttcgatttgtcatttttttttttgagatagggtctctctctgtcacctgagctggagtgcagtggcacaatcttagctcattgcaacctcatactcctgggcacaagctatcctcctgtctcagcctcccaagtagctggggctacacgtgcataccaccatgcccagctaattttttttattttttgtagagacagggtctcactttgttgcccaggatggtctcaaactcctgggctcaagcgatcctcctacctcagcttcccaaagtgctgaggagagagccactgcacttgctccaattttttaatagtttgtgatttttttgtcctatcaaggtcacaaagatttttgcctttattttcctctgtaagtattatggttttagctcttacatttatgtgacctgatttttatgttcacctctcaacttaataaaattgttccaaaagaacagacatccaaacccaaacctagtgaaagcattcggccggtaataagatacatcatcattctctaggctccagatttgaagtggcatttcagggaatactgtctctcagttgagatgatgaccttcttgatttagatttctatttgttgtcaacagagagcaaaaccaatgtgacctgcctgccaatgttcagtgaagtttcctcatctggaatgtgctttccccccatgagaagtaaacgaagggaaacattatgggggttgacacccctcccagctctcgtccaaaaggttgcatgtgcctctaccctttcacattagactgaattttcaaaattcatcagttcccactagactgcaggcaggtgaaggtcagggcttgtgccttgctctgtatccctaggtttgagatgtaattcaacagacgctttgtgaatgacaggaagaattcctgggtctgctgttctgctggtgtaagggagccaccaggcagtgtggtgtaatttcaacgtctactgctcaggagcttgggaccaccttcctttaaagccatctcggtactcctagcgttaggcacagtgcctggcgcgcagtagagaactgagggcagagaaaaggggaaggaaattttgtttaaaatcccaaaccccagcatttacgacgggaagcagggaaactgggcagccttcaggtgtagcagacggccgaaaatattcaggatagaatcccaattcctcctgggcagcagaggcaaccctcggggccaaatcccatacttcgaattttgggggctttgtgtggacccatgcttctctagtaggggaatgtcatgaagacgaaatcctgagtctgcgggatttaggggattcaaaactcaatccctgcaggaacagcagccctggtcgcctagcaaccatgggccgatcgctcggcgctcgattctacccggccggatggagacgcggaactcccggccgagcctctcgcggccagtgcctctgccgtgcgcacgcgcggaggggcctgggctgggagaagggcgacgcggtgcgcgggcgccgcttgcgggccgcggcggggagggcgcacgcacgaggggcggagcggcgggcgctgagagtggctgaggatccggaaacgcgccgcagagggtgcggcccagaggaggccgcgggccgggaagggccgggcgggacgggaaacgttagggcagcggcccccggggtgagggggccgagcggacgggcagggccccgaggcgaactctgcccggatgaggaacaaagcagtggggcaggcgcgtgcgcccccagcgcagctggcaggtgggctgcgcgcgggcccggccggagcggggcggggcgcggcggcccggcctgcgggccgcgggcgggctaatccacagcccttgggtggcggtgtcggcagcgcctggggctttcgggtagctgggatgggggctgcgaccttgttgtggttttggtgaccgctcttgtccccactcccccaggttgggcagcccccttcccgaagcttctggacggaaggccccaggtgttccccgagatgccccaacccgtggcggggtgcacggccaccggccctcgggagaagttgggcggccccgggcgaccccggggacgagtggccgcgtcggtgcagcggttgtgagcaagatgtggtagcacgtgaccctggaacgcaaaccctgatgcctgttccccaccacccgagcgct

SEQ ID NO: 10403 - DNA, 2300 bp, Homo sapien
aaaagttcgccaggcatgctggtgagcacctgtaatcccagctactggggaagctgaggcaggagaatcacttgaacccagcaggcagaggctgcagtgagctgagaccacagcacagcactccagcctgggtgacagtgaaactctgtctaaaaaaaaaaagagagaaagaaaaaagaaagaaattctaaaatggctgtggcattttttttgcattcccaccaacaaaatgtgagggtgccagttgctccatatctgtgccaacacttgttatagttggtctttttaattgaagccattctagtaagtgtgtaatatcacttcattgtgctttgatttgcatttctttgatacctaatgatgctgcacatctttttgtgtgcttaatcgccatccatatagcttctttggtgaaatggctgttgaaatttttgcctaagtttttaaatttaattgtcttcttattattgtgtttaaagggttctttatatagtcaagatacaaatcctttgtcagatatttgttttgaaaatattttctcccagtctctcacttgactcattttgttgacagtatcttttcaagatcaaccattttaattttgatgaagttcgatttgtcatttttttttttgagatagggtctctctctgtcacctgagctggagtgcagtggcacaatcttagctcattgcaacctcatactcctgggcacaagctatcctcctgtctcagcctcccaagtagctggggctacacgtgcataccaccatgcccagctaattttttttattttttgtagagacagggtctcactttgttgcccaggatggtctcaaactcctgggctcaagcgatcctcctacctcagcttcccaaagtgctgaggagagagccactgcacttgctccaattttttaatagtttgtgatttttttgtcctatcaaggtcacaaagatttttgcctttattttcctctgtaagtattatggttttagctcttacatttatgtgacctgatttttatgttcacctctcaacttaataaaattgttccaaaagaacagacatccaaacccaaacctagtgaaagcattcggccggtaataagatacatcatcattctctaggctccagatttgaagtggcatttcagggaatactgtctctcagttgagatgatgaccttcttgatttagatttctatttgttgtcaacagagagcaaaaccaatgtgacctgcctgccaatgttcagtgaagtttcctcatctggaatgtgctttccccccatgagaagtaaacgaagggaaacattatgggggttgacacccctcccagctctcgtccaaaaggttgcatgtgcctctaccctttcacattagactgaattttcaaaattcatcagttcccactagactgcaggcaggtgaaggtcagggcttgtgccttgctctgtatccctaggtttgagatgtaattcaacagacgctttgtgaatgacaggaagaattcctgggtctgctgttctgctggtgtaagggagccaccaggcagtgtggtgtaatttcaacgtctactgctcaggagcttgggaccaccttcctttaaagccatctcggtactcctagcgttaggcacagtgcctggcgcgcagtagagaactgagggcagagaaaaggggaaggaaattttgtttaaaatcccaaaccccagcatttacgacgggaagcagggaaactgggcagccttcaggtgtagcagacggccgaaaatattcaggatagaatcccaattcctcctgggcagcagaggcaaccctcggggccaaatcccatacttcgaattttgggggctttgtgtggacccatgcttctctagtaggggaatgtcatgaagacgaaatcctgagtctgcgggatttaggggattcaaaactcaatccctgcaggaacagcagccctggtcgcctagcaaccatgggccgatcgctcggcgctcgattctacccggccggatggagacgcggaactcccggccgagcctctcgcggccagtgcctctgccgtgcgcacgcgcggaggggcctgggctgggagaagggcgacgcggtgcgcgggcgccgcttgcgggccgcggcggggagggcgcacgcacgaggggcggagcggcgggcgctgagagtggctgaggatccggaaacgcgccgcagagggtgcggcccagaggaggccgcgggccgggaagggccgggcgggacgggaaacgttagggcagcggcccccggggtgagggggccga

SEQ ID NO: 10404 - DNA, 2300 bp, Homo sapien
aggcatgtgccaccatgcccagctaatttttttgatttttagtagagatggggtttcatcatgctggtcaggcaggtcttgaactcctggcctcatgatcctcccacctcggcttcccaaagtgctgagattacaggcgtgagctactgtgcccagcctcgcctttttttttttttttttgagactgggtcttgctctgtcacccaggctggagtgcagtggcgtgatcttggctcagtacaacctccgcctccaggattcaagtgattctcctgtctcagcctcccaagtagctgggattacaggcacctgctacaacgcctgactaattttttgtatttttagtagagacagggtttcgccacgttggctaggctggtctcgaactcctgacctcaagtgatccacccactttggcctcccaaagtgctgggattacaggcataagccaccttgcctggagtcttcgtttttttaaattgctacaaatgttgcaataaagattattgtacacataaataggtattgctacatttattttggtaggacaaaacggcacagatatctgaatcaaaggatgtgatgtgcactattaattttaacagtttgtttagctgggatgtggaggcacaagcctgtagtcctagctactcaggaggctgagataggaggatcccttgagcctgggaggcggaggttgcagtgagccgagatcgcatcactgcaccccagcctgggtgacagtgagacctgtctcaaaataataataataataataataataataataataataattttaatagtttcttgaagcaatttatgctcccaccctttcctcaaatccttgcctcccctgaatcttagcaatcttttaaacttttgccaatctgagaaggagaaatggcatctcaactgttcttccttttgctctcttccaatctagtcctcaatctgcagacacagttatcttttttgaaacacaaatcttcaaatgtcacctccctgcttaaaatatttcattatcttcctgtcactcttaaaagttaaaatctttgacatggccaaaaagcaccttgtggtataacagcctacctgcctgagtggtggacttttctcctaatagaaagggctttctcaattctactgagaaattgtgatgatatattaggctatttgccagtacaaacctcatcaggagctacaacttttaatttttctttcttctttttaaaagatgggggtcttgctatgttggccaggttggtcttgaactcttggcctcaagcaatccacccgccttggcctcccaaagtgctgggaatacaaccttgagccactgcacccagccaagctacacctttaaaaatgtgactaacttatacccgaaaggaataattatttctattttatttgccttgttttttgagttgcttcaggcggatcatttagaacaaacagggaagaacaggacttgccaaactaaaaagaaaaacatgttagggcagcaccttgtctgctgaggaataggcaaaagctctcatcataaatgtagggggtttttgcttctcttgtttttaagtaggacttttaaagtagaagacacctttaatgtactggtttgcagaagaggaaatctgattttcagtgtgataacatattctttgacgttaaccagtacagttggatttttaatgacactttaatcttcaaaggtttaccaacacggatggattaattattcattttggaggggttgtgtcttaaaaagacaagtcttcaaagacatcatcctttctccttggaacttggagtctccacctttcaaatgttgctttcctgcccccaagagagaaaataaatgacattttttaaagaagaagaatccaatggaaaaacactctttgcgctatggaaagatgatgtccttatatcctgggtgagattagaagaggaggctgggaagcagtatttaagctgtgtttacagtaagcactgtgagaaataaccggctaagcgcgtttgttattgttcagtcttttgatgtgcttttaaaaagtcgcatctccataaaacaccctcaacaaccataaaacaacatatgttggaacataatatgcagacccttatattctttgctacagtctgtatttttcctatacccttcaaacatgcctcattgagtttttaaaagattcggtttggaagaagaaaaacctcaagcctcgccccgggtcttccttgacttgacacattttataaccgcaagagagcagtttttcctttgatgaggctaagac

SEQ ID NO: 10405 - DNA, 2300 bp, Homo sapien
gactagaaaaaacagacttcatcccttcttagcaaaattgattgtgtgtgtgttttagatgaaaatcctaactttactgcttatttttttatggctaattataatctgctagttttgaaggccagcaagagggctaaacaatgcttgtgcagagccctggcaacctcaagacaggtagggataaagaggaagaaccgaagaggagggagggagatgattgacaggaagtgtacggaacaaatgtggagggcttaacatgtgctgctgggaacacccacccactttaatcagtttcattctcttgtcaacattagaagaaatctttagtcctattttaccgattgggcaaccaaggccagagaggctaagtcatttactttaggacatacagctggtaattatggagttaggattgcaagatgcagcaaaataaaataaaggacatccaattatatttgggttctgagtaaacaatgtaaaaaaaatagtgaaagtatatcccatgtaaaatttcagacttatactaaaaatttaactgggcatcctgtattttacctggcaactgttgaggagattcaaattcagttctctttgttatttcccagacaccccttactatgggacatatataatactgtagaatatgtgatcagtaccagcagatactggttgagttcaggcctcaagctttatatctgccattttgcttgaaaccctttaatccttatatcacctatccagtaggtattatcattgttcccattttatggatgaggaaactgaggctccttaagatgaaataacttggtcacggtgacacaaccagaaagtactagagcccatgcttgaacccagttctgttttgctcaagaatggtctctcaaaaaaaaaaaaaaaaaagaaacacaaaaaaacaaaaaacagttaagatttaacccatgtacagaaaagcacttgatatgtaaatgtacagtacaacgacttgtcacaaacacctgtgcagccaccagccagatcaagaaagaaaagatgtccagctcccgttagatgccctgccccgtcatgagaagggctcttctgccagagcttctctgggaattctttgactacgggcattactgtccccattttacagatggggacacaaaggttcagagaggtgctgtgacttgcccaaggtcacagagattggaaagcaacaggctcagagagggcgagtgatcacccagaggttacacagctaaaacttaccacctgttaaaactacaaactaaataccaaaaaccgaaactgcgctttattgggtgtttactatttgtgaggcaccgtgctaagcttcttggtcgacaacagtagcagcagcagcaagcactctgccatttggggtgcatactccccatgtcaggcagcttggcactttgcgtaatccgctcagtgaatttttccagcgaccctatggtttgggcttgggtctcgaacccattttacagaagaggacactgaggccggaaggctgaggcccctgcccgatatgctcagccggcctggcaccggctatgcccggctccccgggaggctgcgggagggccaggtggcatgcaaggagttaagcggtaggcagtgctgtggctccgtgcgaggagcgcgccgggctgaggcgcgctgctggtggcggcggcggcagcggcgcgggagctagggctggagacgtgaagtccaggggagcgagcaaggcagccaaggaggcagcggcgaggcagcgagagagagccaggcggccggagctccgcgccgagccgcagccggtgccctgcgcgcaccgggcccgggcatctccatccccggggcgggtgcccgcgcggggcctcgccgcggctcggggcacccgcagtgccgcccgcccgagcgccaggctcacaggagcccggctttcacttcctctcgcttccgcccgcctccctggctcgccggctggcgtcgccaccgcctcctcgtccccggccaccgctgtcgccgctgctgcaattcaaggcgcacactatcccactttcccgctggaggcgcagaggatgccccttgagccagacctggagaaatagccccagggcccggcaggaggagccttggtggcgagaaaggaaatccaggctcccctttccttaaagccactgcagcagctgggaaggcgcccacagagcgggcgcgccaagcgggacgcgggagtcgcagagagggaccccgggcgcctgctgagctcagctggcagagtttgcaagtggcggagacccttcaggtaagga

SEQ ID NO: 10406 - DNA, 2300 bp, Homo sapien
ctttcccgctggaggcgcagaggatgccccttgagccagacctggagaaatagccccagggcccggcaggaggagccttggtggcgagaaaggaaatccaggctcccctttccttaaagccactgcagcagctgggaaggcgcccacagagcgggcgcgccaagcgggacgcgggagtcgcagagagggaccccgggcgcctgctgagctcagctggcagagtttgcaagtggcggagacccttcaggtaaggactcaggtgcctggacctgggaagagggctccaggagggagccgggcgcggagctggtgcgaaatgtcttctgcccctagatctgggcttcgctttccagacgcttccccgcaggttgggggctcgtcgtccagagcccggcgagtgaggaacccagagtggtgacagcccagctctgcgtagatgacaaactttctctcctctggcagagggtgggacattccggctcatccaggcatccttcctctgggcattcctgtgccccctacaggcatgcattcaagggcttctcccgcggaggtgggccagcggggaggcagtgggccccgtaaatttgatttatgaatcaccctctttctggccagtgcagagttccaagggagagggagctagtcatatttccaagttggctgtagaagatgtttcttgggggtgatactctggtgaataaggctgcctgtcatctgatgccaacagccagagctgcccaggcaatgggctttgtgtagggtgccttgcagatttgcttatgtccattctggggtgtgtgtgtgtgtgtgtgtgtgtgtgtgtgtgtgtgtgtgtgtgtaaagagagagagggaactagagactaggggaccaactcagccaaatcgcctccttgcaagcctttccagcagccccaggtatcttggaaagagccaactcacctccttggcagaaccactaggaagggtggaggtcacttcctaattcttacagcttcaaaggggctgctccttaggtgagcaaaaaaataggggaagtttcctggctgctcaatgagaccattcctattggagcctggggaggtgcaaactttttgcagaaaaggggctggaagggccacgtggagagggcctcctgacattctcatccccacactctaggcccctagaggctctgctgagccccatgcacagctcataagtttggctagatgattttttctattagtaaaaagcatgctccaaggagatcacctggtctctgaggatcattttagagccgcccctgtggtcacagccccatagatggcatggtgctacctacttgggctgggcatctgcctctgcggagtagcattgctgtgttgtttttaagacagttcttggggtgtgaggtgggattccgatctcaggccaagttagagctgcgtccctaggctgccaaaacccaagaattcctccagggcgtcagaatctggtgcttgatgtcctggaaaaagccctgggtctgggtcaggagattgagcttcaagttggctctcatttgctgtgtgactttgggcaaatcactagacctctctgggcttcagttgctgcttctcaaaaatgaagagatttcatgtatcctcagaggtcccagttcagttgagacactctatggccctgagtgattgtcactgatgagatttttgtaatcccaggaggggatcttaatttagaatttaagagacctaggtctcagatcagatctaagtttgaccagtgacttccctctccacgcttcggctcctccactgtaggatgggaagttcacagttcctactttacagggctgagaggactaactgagatggtgcctggagggtgctgagtgtagagtttagcaaagagtgaagctcaacggtgccaaggctacctgcttttgggtcttgtgtggggcatctatctgggtgctgttttccccagggaggctggccctgtcccaccaagcaccaggtgatccttgactacatggcagggcccttgttctctccaatcacctgacactgcagtccccgccctctctctgctttctcataaaatctctgctggaccagccactcctagtggggagcccagggtggtctgggagtgctgcatgcacccagctgctgtatcaccaggacatcaggaggtggaggtaggcagtctccatggcttcaacttcgcagctgtctagggaccagggcagagaagttcagaatgtctgcgtgtagggcactcagctgacgcttgagaactaccccatgctgggcagac

SEQ ID NO: 10407 - DNA, 2300 bp, Homo sapien
cctcctgccttggcttcactttttttgtctttattacataaaaatacatattcattgtagaaaaaagttagaaaagagttttacaaagagatggaaataaaaattacctatattcctacttgattggtcagagttctctagggaaacagaaccaacaggattaaaaccaataggatatgtggatagatatattaagagatttattttaaggaaattggcttacgcaattgcgggagctggcaagtccgaaattcatatggcaggccagcagactggaaactcaggcagcagttaatgctgcgatcttgagatggaattccttcttctccaggaagccttaggtttgcttttaagtccctcaactgattgcatgaggctcacccacattatcaagggtcatttcctctacttaaggtcaactaacggtagatgtcaatcacatacataaaataccttcatagcaacatctagaccaatgtttcaccaaacaactgggcaccatggcctagctaagttgacacataaaatttatccttcacacctactgtccagggacatcacagttattaaaatgttggtatatgtctctctagagattaattttttacaaaattgatattttataacctgtagaattttacattctcagtttttatttaactttgtatcttaaacacatcttcacctggctaaaataacctttaacaccattcttttcaatggaattccactttcagtagaattccattgtgtgttgtcattccagacattattggcacaattatctcattgctagacacctaggttgtttctactccttcacttgttaatttttaaaatgctgcaatgaacatccctattgataaatctttgtgcacatctgtactggatgctataggcacccacccaagtcccctttcctgtggtgactgttggtggtgatcaatggctcacaactgcccccttctctgaaaaatagccttgggcccaacaggagcaagcagcccctcccaggaagttacgccccagcctgggggacagcccatagccaaaaactgactgacattggaagctaggatagacaaggccaaggcaagccagccccctttccttaaggtggggccaactctgtagtgcaatttctcatccagagccccctcctgatccctgccgtgagaccaggatggaggtggcacccagctgagatcacatcctcacttagttctgtctggtcctgcctcccgctttctttctctgagagcacaccttcaatgaaacatttgtctcaggctctgcttcagtagccccaacctaagacaacatctctgaatattttcttaagggatgacttctattgaagatttgacaatgggctccaaattttttattgtgtagctgcacgatttctgggttaaattttcttaaagggattgcctctgacatgtcagtcccttgcagcttgtcggtgcccaatactgggtaggtagagacttctgaggcccaggacttttcccgtaaagcccagggcaatgagagggagaggagaaccctggtagtagtgagtaaggacaggacagccccagaatccttgcttccctcagtcctcaaacactcagccctgatgagatcacaaaaatcctccgtgtacttgatcatttccctgaatggggcattgccatggttgggaatgaggaagtgaggcatgggaatctgacaaagaaagggggatagcatggcccagaaagaatctcatctcagcgacctgggttgttgacaaaggggccagggttgaggagaacattctttgatgtatcgagctcattgactgtgaacaggcatgttcaagaacagaaaacatggccactctttccatctctgctttggcttgctctgtgaccttgggcaagactcttgccttctctgagctttcttcagaatgtggttttcccaaccagatctgactccttgtatatctgactagtcctcttctctctggctcttcagatggaagtgcagtgttccggggctgcttccgcaggcccgacaacctttccctggccttacccgtgacagctgccatgctgaacatgtctgtggacaaatgcgtggacttctgcactgagaaggtgagcacaaggtggggcccatggaactcagggggagggaaccatgcagcagagctgcaggaaccacatgcttggctggagaagcaacagctcagtcgggatagatgtagtcgttgactgggatctatgacgtgggagagggatgtgaccatttcacgtggatctaaggggctg

SEQ ID NO: 10408 - DNA, 2300 bp, Homo sapien
tctcctccaattctgtcagcctccaaaaggagctgggaggcccctcggaggaccatctcttgtagcaggggaaactaaggcccagagagtgcatgaccctctctaaatcatagaaaagagggacttggtctctcttgtttatggtgtatccccagagcctagaactgtgcctgggacttccataacttctgcctcagtgtgatccacatagaccgttccatagatttgcaaatagggactcagagaggtgaagtgactagtccagattcacacagcctttaagcatcagctcgggatttgaaccaaggactttttgaccccaaagcacaagatcacagcctcaaccagcagctgaaatgtaatgaggcgggccagtcaccactcttgccctcaaaaatgtctctcctgagcagcataccagcctccccctggcctggacgactgtaggtgctgatgtctttgcctgctgccttctgggccagtccattcaccagatctcctaccctccagggcagagagaaggggcctctcatctcccaaggatggctccagagacacctccagatccctgtatccccaggctctgacagactcgggaacctggaaaccacacagtgtctgcagatgttccagccacaggcctggctgccagccccaggacagaattagctccgtgtcaggagagaatttcctccctggtcccacgcccacatgtgggagctcgcactgagtcactgcagcagagcagagcggcacgggctgcctaacagactgtcccattttctttcgggtttggaaggggccacgacggagcttaggactccataagaatgggcaaaaacaaggagcttatgcccctgaacccagacagcccacctgcttagaggccaggaaaagcagctgatgagctcaccgactcagggagacccccccacccaaaatattcacgccactgcctggcatcctcccattagaacactactccttgagccttaaaagcgtttccttcctctccggggatctctgtctccagatccctgtctgttctgtgccctacaggctgacctgcttgaaaatctcaataggctgtttgccctctgacctctggtttgatccacaactgcaggcgtggagcgtgcggttgggtacaaaccctccagctccctccttgtcagaggtgtgcgggttggccacagccacactccttgggtgccttaactacttcctgctctagcccctcagtctaggaacagtgagttctcgccttcactggacccggagcgtggtagggatcccttgtactgtctacccttttgtcagtcctcccctgactaagttctcgttaatcacctcatttgagtgggttgtccatctcctgccaacactctgactcagaaaccagactctccacactttcccctccctccctacccacacatctatcaacaagttcttcccattttgtcctcccaacaactcacagctgtgagcatcacctctgcttacctatgtggctaccaggggctcctaactggttagaaacctatctacctagtacacagaccattttattcctagtagacaaatcttttcaagaagcaaaccacatcatgtcactccttgctgaaaacctcttagcacctccttgttcttagaatcaagaccaatgccttactatggcctgagcaatctagaccctgcctacctgaggactgagctgaggctcgagcccagacccagacggaaccaagttccatgagaacacgcccttgcaaactcagcctcattactttattggacacctagctgcccttgtaaccatctccccagcagccattcctagtcacagaaggtccccagcaagagcatttgatggacatctgtccttccaggccaggaagcccctgtagcccccaataatgggtcccgtacacaagccctaagtatcttcccagccatccagcttgtgcctctccccataaacaccgccccagcccctggagctggcctgtaaacaaattttctcccctgcgcatatcccactggactgggaggtccagcaccatatttagttaatcccctgacgtcagccttgggtccactcttgcaaataatccccaagctatgaacacattgtagccaaagggtggctggtgctggggatgcttacagcttgctcaggatgtggtcaagaaggcagctggggtgagtgacttctgcccatgctgggagccagcctgtggcacgcacttggtgtgctgttctgggtgtgggcttggaatctcgactctgggaggcag

SEQ ID NO: 10409 - DNA, 2300 bp, Homo sapien
atccctgccacgttatggaaatatcctctcctttcaccaggagaacctggggaatgacatgatttggctttgtgtcccgacccaaatctcatcttgaattggaattccataatcctcacgagtcatgggagggaccaggtgggaggtaattgaacatgggggtggttttccccccatcctgttctcatgatagtgagtgagttctcatgaaatctgatggttttataagaggcttccccctttgcctggcactcattgtctctcctgccaccctgtgaagaggtaccttccatcatgattgtaagtttcctgaggcctcccctgctatgcgaaaatgtgagtcaattaaaccttttttctttataaattacccagtcttgggtatttcttcacagcagtgtgagaacggaccaatacaattactaacttctgggtgaccttgggtgagtcccttgcctcctctgggttcagtgttctcatctgtacagtaagtgtttcgatatgatgttttgttccctagataagcccaaagaagaagagagcaaggaagacagttgggtagactgggcctgacttctgactatagagacctgtgtgacctcaggcaagagactcaatctctctgggcttcaagttatctgtgaaatggaagaatgaaattagatggtttctaagtgtaaagctcactgaattaaaggattgaggatggtggggagaggtcggtggggttctaaggctgatcagacgatgaggacatagtcctccacctgcccaagactttgaggcccaaaacacaggtttctctccttctctccctccctccccatctccctctcccttcaccttcccctcctccccattaccttcctccctgccctcccttttcttcctttctttcttctcctcccttcccctctcttcccctcccctgcccttcccttttctttttctttctaaaaatattattttaggcagtcgtaggcagtcttggctttggaatcagacagactcagatccagccatggctcggtcagcatgagcttggcgccctgggcaaaacgacttctgctctgtggccctagcatcctcatgtgtagaatgggcaagtgatgcccccccgacgtgggtggtggttcacacggcttactccatggaagcacttggcacaggggcccacatgggcacttctgttatttcttcagtctggaggccaagggtgggcctccgagccagacaacatagttggaatcccagctctgtcagctgctggcggtgtggtcttgagcaagtgacttaatctctctgtaccccagtttccttattggtaagactggagtagtaataattcctgttatctagggttgccgtgaagagtaagtacgcatcgcctagcacgctgcctggctgtcggttgttttgattattccactaatgatggtgaccacacagccgatgaaccaggcacttagcgcctggttagggcagggaacagaatacagttctttccctacagagttcctggtgcaaggagttctcggtgcaaggagagagacatcttaacaggcaaggacagcactgcatcagtgaggtgatggggtgaccctgaggggcacagcagcccccgagggttggggaaggcttccctgggaggtgaccttcaacctgagacctgaagaggcagtaggagaccatcgggccacgaattagggcaggaatagcatccaggtgggaggaacagcgttgcaaaggcccagggtgagaggcagccaatctctcggtcagtgtggagcttgagcccctcaccgggagcagaggcgcttgcacttcccccagcagccgggtgctcagatgtgctccctgtttgcgctcagtgggcacggctccccggctgcaagaggctgccagaggggcgggtcgtccccagcgggcccccgccgccacccacaagcccagtccccggctggtaggggcaccctcccctcgcagccccctctccacgcagctagccgcccccgccctaggtcagcccagtttcctgcccctccctcctgctctcctccctccagctgtttctctggctgagttctgtcccagtcccattcagggaagcagccccggcggccagcagggagctcaggacagagcaggctccctgggaagcctccgggtgataggggtgttccagctgcggcgctctgggggttcagagggggatcttgaatgaacaaatgaatgaactgctttctgggcaaacagccacagccagaggagcctgtgattggcagaaagaagccagggtg

SEQ ID NO: 10410 - DNA, 2300 bp, Homo sapien
agtgagccaagatcacaccactgcactccagcctgggtgacagagcaagactctgtctcaaaaacaaacaaacaaacaaaaaaacaattagcctgtgtgtgcctgtagtcccagctactagggaagctgagatgggaggatcacttaaacccaggacatggaggttgcagtgagccaagatcatgccactgcactccagcctgggcaacagagtgagatcctatttcaaaaaagatagataggtgatagatagatagatagatagatagatagatagatagatagatagtttgctctgtgccagatgtatagaatctcatttcaccctcacataaaaccttgtgaagtggtaatatcatcacactgtgcacagtttacagaaaagcctagacagatgatcaacaagatcaagtcacttgctgaatgtgattcagtttgcaaggggcagaactgggatttgaacccaggtctgtgtgactcccaacagtgacaccccacaaccaccacctagccctgcctccaagagcaatacacgtcacagaggaggtcagatcttgaagcatcaagccttctgcaaatcctgaactggatgccaaaagcaaggtaggctgtttgtccccattttacaagtggggaaagtgaggctaggagtaacgtgcccaaggtgacacggagagtaaatggcaaagtctgaatttgagctcaggtctctttgactccccagaatctgaactgctaacttctaaatgcttagcgtttctggggcacctccctagatgtttaatttcagtatttgtggattaagatggaggtttccattctctgcttcaaggaaaaaatttctctctgggaagccaaaagaactagccaggtccttctggagaggatacaaattaaaaagtcagggagaaccgagggggtggcttgcgcctgtaatcttagcgctttgggaagccgagatggagggagagcttaaggtcaagagttcgagaccagcccgggcgacatagtgagacccggtctctaaagaaaataaaaaatcagaaataggtcgggcgcgatggctcacgcctgtaatcccagcactttgggaggccgaggcaggcgaatcttctgaggtcaggagttcgagaccagcctggccaacgtggtgaaaccccatctctactaaaaatacacaaattaggcgggcgtggtgatgcgcgcctgtaatcccagctactcgggaggctgaggcaggagaatcgcttcaacctgggaggcggaggttgcagtgggccaagatcgtgccacttccctccagcctgggcaacagagtgcgattccgtctcaaaaaaaaagaaagaaagcaagacagagagagagaaaaaaaaagaaagaaagaaagaaaagaaaagaaaagaaaattcgccgggcatggtggcatgcacctgtagtcccagctactcgggaggctgagatgggaggattgcttgagcccaggaggtggaggctgcagtgagctgcaattgctccaccgcactccagcctgggcgacacaacgagaccctgtattttataagaaaaaaaaaagttgtttaagtcagggaggaaaagacacagagaggaaaagagtaaagaagaagaaggcggcaaactcagcagcatggggtggaggctaagaacaggggctgcgcagtcaagcaggctaaccgggtgaaggggtgaaaagcatcagcatcttcatttcacaaccgggaaaaatgaggcacacgacagcggctccgggacgaagagacccgaggaaaagaccgccgtggaacttccagtttccgggcccgccacctagtgtgccccaaatccgcacgcccatcgggtttccagcacctgctcctcctgcctgtggcctaggccccgcccctcccgctgcttattggctgctacgtgaacgagacaaacgcaagcaacaaccaatgggagtggcccacggcgcgtctttcccggggaagccgacgcggacgcgggaacccggaaatgcgagggaaggacaagtggggaaagccaatccgccgcgacgagggctgcgggcggttcaatggcaagtcgccgggggcggggccagaggccggcggagaaggaggacccgggagccggcggcccggagctgggagcgcggggaaggcggttggggttctgacagctgcgcgcggtgagaaggggaaaagccctaggggctcgagaggatgaagccgggaagggtgcgacggggccgcgagccctgggcggggttcgggaagggaggctctgcagtcttggagggg

SEQ ID NO: 10411 - DNA, 2300 bp, Homo sapien
cctgggccctctctgctgggcctttcctgtgggccacagctcccagtgtaggccgtctcctacatctccagctcatcttgtgctggtgacacaggttcctgccccgggaggcccaaaggcgttaacaactccccactcttcctagaccctgggggcgtcaaccatcccgggactgttctttaactcttttaacccagtggtttgattgtgcgccccaggggacatttggtgacgtctggagacctggttagttgtcataactgaggaggtggagggagtgctacaggcatctcatggggagaggccagggatgccaccaccatctaacaatgcactttcagtccccaccacagagaactggtggaggtggggagcctgctctagccctagccctcctgtcctggcccctcttggccacctgaggatcagccccacacattcaacttcctttagttcctcgaatgcccccaggctctcttacgacagttatgtcagttatgacaactaacctctggtctctgcctggagtccttttccttggatgcccttcaccctggatgactcctacttaacaactgggtcccagctcaggtgtcacttcctccagggagccttcctggtatgctcctacagccctttatgcttccccatcaccacacttgtgacactgtctcagtcacatcaccttgtctatactaggagctcagggctgacttgttcacaataccccgatgccccacatacaggacatgacacattctatgtctgtctatccagttaacaagcattgaggaagacggccagtctgtcttacctggagaggccttggtcttggccaccagcagcgtcgcgcccctggaggtgatgctgagctccgtggacgggctggtgcacttggtggcggcatgctgcgccctgtccggtttgctcctgagcaggtagaggcctttgagcacagccaagcactgctcctccacagcccccagcggcagcagcagggccagcagggaccccagcaccatgctcagcagcgtcacccagaggaagcggctccagaccgagacccatttcggttcagtcaccgccatcactgaagccattggtatgagcatcatctggactcaggagagggccctttgcgcatgtccacaggcggctgagagagagcaggatctgcaaggagccaagagtcgcaggagaaacagacacgttcaggacatagtgtgacttcagctgggaagatgggtttggagacttctgctcttttagctcactagagagatggggtgggggcaagtcaaggactggatctcactagaggaggggccagcctagaaggactggtgccacctcctgggcagtatgaatgtgaaaacactgctgtggtccaacaattaatgagcacttgccataatccaggccgtgtgctaagcaccaaatgcctcacatgggtcacctcctgcaatcttcaacgacttgagctgatgttttcacccttctccaggtgagggaactgaggttcagagaggtgaagtcccttgccgaaagtctcgccgggagcaagtgacagccttaggacttgaactcaggaaccccacggctctaaagtgtccccccttcccatatatccctgtggcttctgaccacaaacactggatttgtggacatatgtcaaacatttgggacataaatgactgacagacacccaggcagatcagccacagcagttctgacgcccaatctttgataagcacaattgttgggtggcctcatttattgccctcaccctgatattcagccacagctcccacagtgcccttcccctctctggccttccatttctggcctgtccagaagggaccccatcaagaagatgagcagttcgagcatctcgaaaggaactcaggctgtgggccacagtgcttggcctcagtgacaacatggcttgtatgtgcttggggctggcagtgggagtggaggtggggccaggcatgcaaacactatgctaacaataagcacttattaagcaactatggtgtcctaggtgctgagcagtgtactggccacgcattgcctcgtttcaccctcatgccaccctatgaaggaagagctaccgctagctccattttacagacaagggaaaccaagacacagagagcataagttaaattccagaaggcccacaggaggtaaacagaggcatccggaaggaaaccccagggcctctgaacccggtccccaggtctcgatttctaccttattactaagcagggcctgtgcacctgctctgggctggtcct

SEQ ID NO: 10412 - DNA, 2300 bp, Homo sapien
catctgtaaaaagagaatgcgggccgggcgtagcggctcacacctgtaatctcagcactacgggaggccaaggtgggtggatcacctgaggtcaggaattcaagagcagcctgaccaacatggtgaaaccccgtctctactaaaaatacagaaatcagccgggcgcaatggtgcgtgcctggatcccagctactggggaggctgaggcaggagaatcgcttgaaccagggcggcagaggttgcagtgacacgagatggtgccattgcactccagtctgggtgacagggcgagactctgtctcaaaaaaaaaaaaaaaaaaaaaaagagagaatgtgctccatctcttctgtttgccccctccaaaaaacaccctaccctctcctccctgccctgtgtccccgagtatagacctcatgcacaggtttcctggctctccagcttccagatgggtctgcccagcaggaggcaccagcagaagtttggtgggaggaagaaagagaggtcagggtatttcttcccccacctcaatccttgacaggaaactggggctgcttcccttgaacaaagttatcagcaggtctcaggtgccctctccacacaattcagatcacacccttcaccccttccggcccaaagatggacaccaggttctggagttaccagctatgggatactaaaccttcactcccgatttccctacccacacctttattgagtttctctcagatcatcctaatttaaatgtgccacctatttcctgctgagatcctggattatacagtagatatcaccacctcataaggttacaagtgagagaccatgttatgactagatgctaggcactgagctatagttactgttacaacaattatattatgcagaaattgttgctcccaatctgcagataaggaagtcgagagggtgagagaaattaagaaattcttacaagcacatacaagagttgaacagctagaactgaggccttaacctccagaaccagaaacctttccatttctattatcaccatcgcggtcaatatttttcttaccacaagtttcatcatcgccgtcattcctacataacaaaataacactctcttgcgaatgagtttatttctactgttggacgtgtggttaagagtgggagttctggaatgggatcaaagtacaaggcctgacttgcaggaagtgttatcttgagcaagaaactttcctccacgagcctcagtttcctccagtaaaatggggatagataacagggcttccttcacagggtcgtggcgaggattcaatgagataacgtttgcaaggcaatgggcaggcagtaagcactcaaatccgacaggagctactgtcacgaaaagcgggtttgcagccttggcggctttatcgccgccgaggactagggaggcgggccaggacatggggacccgaggacctgaaagactggaagatgcccgctgcccacccccgggcccacctgctcctccagtctctcaatctccagctggtttttctcctcctcttcgtcatattcccactcgtactccccgggggagctctccgcggaggaagccatggcgtactcatccccatcgctctcgctcacgccttcctcctgctgatcccacgctggccccatggtcttgtatgtcgcagcggccacagcccgcgataacaccttcctccttgtcctagccgccttaacctcatcctcctctccgtcagccttgggcccagccttggactcagcctcgggttctgaagccgaggtttcggccgcagtcgccatcttgcgcttctaatgactctcgggtcttcccgcggccgccgaagacccgctgaggcagaagctgcccgcggcgcgcgccttatcaaaaacccgttttcttgccattgaaagagaaactgggaacttagataacaggaaaatctccacatacactaaattcacattattttataccctgtaaaagctcccaccagatataaaaactcattataatggcatgcgttccgtcacaacttcggacagaagttgggtctttgggcaggaagtggaagccatagaggaagtcatggagcgagagtgatgtctgtagtgaagaatttggcgccatcttgagaaggtcaaagtgattcttcgattaaatgccttacttatcgcctagtgtgacctggcgcttgggtttactctccccagcaactgcgcctcaaacgcaaagaaaactgcaggtcctcggggaaggatcgatttcaccattcaagagaaaaatccatttcccagattcctccccttt

SEQ ID NO: 10413 - DNA, 2300 bp, Homo sapien
ctgttggacgtgtggttaagagtgggagttctggaatgggatcaaagtacaaggcctgacttgcaggaagtgttatcttgagcaagaaactttcctccacgagcctcagtttcctccagtaaaatggggatagataacagggcttccttcacagggtcgtggcgaggattcaatgagataacgtttgcaaggcaatgggcaggcagtaagcactcaaatccgacaggagctactgtcacgaaaagcgggtttgcagccttggcggctttatcgccgccgaggactagggaggcgggccaggacatggggacccgaggacctgaaagactggaagatgcccgctgcccacccccgggcccacctgctcctccagtctctcaatctccagctggtttttctcctcctcttcgtcatattcccactcgtactccccgggggagctctccgcggaggaagccatggcgtactcatccccatcgctctcgctcacgccttcctcctgctgatcccacgctggccccatggtcttgtatgtcgcagcggccacagcccgcgataacaccttcctccttgtcctagccgccttaacctcatcctcctctccgtcagccttgggcccagccttggactcagcctcgggttctgaagccgaggtttcggccgcagtcgccatcttgcgcttctaatgactctcgggtcttcccgcggccgccgaagacccgctgaggcagaagctgcccgcggcgcgcgccttatcaaaaacccgttttcttgccattgaaagagaaactgggaacttagataacaggaaaatctccacatacactaaattcacattattttataccctgtaaaagctcccaccagatataaaaactcattataatggcatgcgttccgtcacaacttcggacagaagttgggtctttgggcaggaagtggaagccatagaggaagtcatggagcgagagtgatgtctgtagtgaagaatttggcgccatcttgagaaggtcaaagtgattcttcgattaaatgccttacttatcgcctagtgtgacctggcgcttgggtttactctccccagcaactgcgcctcaaacgcaaagaaaactgcaggtcctcggggaaggatcgatttcaccattcaagagaaaaatccatttcccagattcctcccctttatgtaaacgtctggtacctagtagacgttaaatacacgtgagttttccggttttataagatcacatactgcaaaccaacagtaaattacattaatacgcatttctttagaaattcttaattgctaggcactgacatataaattgagtttgctgttgttttagagagaaaaatagacatattcattttttttcaatcaggacatggtattcgtttccttcttaagcttcccatttttgaggtaggaaagtattggtgtgtgtctctatctctaccttgctccctcattagcaggcttaatgggcaggaattatgtctgttttgctttccgttggatccccgggtctagtagagcgccttgacacatagtaggtactcgacacagatgctggcttcatgatgaagcaattgtcctcgaattaatacaaaagggaagattcagactcagcgagccggtaccattcgtctagggacacacagccaggaaggaaccgaaccaggattctaacccaggattacccaagttcgaattctaattgaacataagtccttagcgaccttggacggacttactaaactgccctgaatctcggcttccttagctgcaaaatagggttaggaaaagtggactcggtgctcctctgcgccgcattcccgcagcgggatttgtgaaagcgaacttgagccccacactgcagaagccctgaggtcctgtctcaaccagaatccagcacccaggacaagccctccagcgacttcagaccttcccgctcccgaccccgcccgcccccgagaggcgtggtcaaggcggggccagaaggcggacgcgtgcacggagcggtaaagcgcaggcgcaaagcttcggtgacgtcagagaggcgcgctcccagctcggagccgactcgcagacgcgccccgcccctcggcgtcgctctggactggcgcaggcgcaagccggcaagatggcggcggctggggctttccgtctgaggcgggcggcatcggctctgctgctgcggagcccccgcctgcccgcccggagctgtcggccccggcccgactctatcacaagaaggtagggacaaaagagggacgcgcggaatgccgactcagcggaggcc

SEQ ID NO: 10414 - DNA, 2300 bp, Homo sapien
aaggattttgactccaagtaaaagggacctcaggatagtatctaatgtaggggccttttgtgccacgttgatttatggcattctttagttgtttctcgagtgggagtctcacgtctgggggactttgtgccaccagacagcaaggggctgcagactatgaatctatccctccttccccgccaaaaaaccccccaaacaaaacaaaaacattacgcatgttggttacaagcctgactcccctatgcactcctaaagcagtaacagaaacggtctcctcgtgctggggcctatgtgccaggaaccatgccaggactccacgcacagtatcctttgtaagggacagctgagagccccccatttacacctggggaaacaggttcagagaggcgcagtgactagcccaaggtcatctggccagggcagcggagtggctgaagccggagcccgctccgggggtgtgtctgtccctggactcagaaagacaagtcccaacaggaccctgcctcctgggctgttggcgaatttaaaattgggacgcacgaagtcgcggccagcggcggggccccctggaagtcgccgcccgatgagcggtaactgttgtttatcagttgcagtgagcctcactgcgcagcaagggaaagcgagtcagggcaaagacgtgggaggggacagctcccagtcctagctgcgcagaaccccgcggccgcccctccagcccaggcctccgctgagtcggcattccgcgcgtccctcttttgtccctaccttcttgtgatagagtcgggccggggccgacagctccgggcgggcaggcgggggctccgcagcagcagagccgatgccgcccgcctcagacggaaagccccagccgccgccatcttgccggcttgcgcctgcgccagtccagagcgacgccgaggggcggggcgcgtctgcgagtcggctccgagctgggagcgcgcctctctgacgtcaccgaagctttgcgcctgcgctttaccgctccgtgcacgcgtccgccttctggccccgccttgaccacgcctctcgggggcgggcggggtcgggagcgggaaggtctgaagtcgctggagggcttgtcctgggtgctggattctggttgagacaggacctcagggcttctgcagtgtggggctcaagttcgctttcacaaatcccgctgcgggaatgcggcgcagaggagcaccgagtccacttttcctaaccctattttgcagctaaggaagccgagattcagggcagtttagtaagtccgtccaaggtcgctaaggacttatgttcaattagaattcgaacttgggtaatcctgggttagaatcctggttcggttccttcctggctgtgtgtccctagacgaatggtaccggctcgctgagtctgaatcttcccttttgtattaattcgaggacaattgcttcatcatgaagccagcatctgtgtcgagtacctactatgtgtcaaggcgctctactagacccggggatccaacggaaagcaaaacagacataattcctgcccattaagcctgctaatgagggagcaaggtagagatagagacacacaccaatactttcctacctcaaaaatgggaagcttaagaaggaaacgaataccatgtcctgattgaaaaaaaatgaatatgtctatttttctctctaaaacaacagcaaactcaatttatatgtcagtgcctagcaattaagaatttctaaagaaatgcgtattaatgtaatttactgttggtttgcagtatgtgatcttataaaaccggaaaactcacgtgtatttaacgtctactaggtaccagacgtttacataaaggggaggaatctgggaaatggatttttctcttgaatggtgaaatcgatccttccccgaggacctgcagttttctttgcgtttgaggcgcagttgctggggagagtaaacccaagcgccaggtcacactaggcgataagtaaggcatttaatcgaagaatcactttgaccttctcaagatggcgccaaattcttcactacagacatcactctcgctccatgacttcctctatggcttccacttcctgcccaaagacccaacttctgtccgaagttgtgacggaacgcatgccattataatgagtttttatatctggtgggagcttttacagggtataaaataatgtgaatttagtgtatgtggagattttcctgttatctaagttcccagtttctctttcaatggcaagaaaacgggtttttgataaggcgcgcgccgcgggcagcttctgcctcagcgg

SEQ ID NO: 10415 - DNA, 2300 bp, Homo sapien
ttcgaattctaattgaacataagtccttagcgaccttggacggacttactaaactgccctgaatctcggcttccttagctgcaaaatagggttaggaaaagtggactcggtgctcctctgcgccgcattcccgcagcgggatttgtgaaagcgaacttgagccccacactgcagaagccctgaggtcctgtctcaaccagaatccagcacccaggacaagccctccagcgacttcagaccttcccgctcccgaccccgcccgcccccgagaggcgtggtcaaggcggggccagaaggcggacgcgtgcacggagcggtaaagcgcaggcgcaaagcttcggtgacgtcagagaggcgcgctcccagctcggagccgactcgcagacgcgccccgcccctcggcgtcgctctggactggcgcaggcgcaagccggcaagatggcggcggctggggctttccgtctgaggcgggcggcatcggctctgctgctgcggagcccccgcctgcccgcccggagctgtcggccccggcccgactctatcacaagaaggtagggacaaaagagggacgcgcggaatgccgactcagcggaggcctgggctggaggggcggccgcggggttctgcgcagctaggactgggagctgtcccctcccacgtctttgccctgactcgctttcccttgctgcgcagtgaggctcactgcaactgataaacaacagttaccgctcatcgggcggcgacttccagggggccccgccgctggccgcgacttcgtgcgtcccaattttaaattcgccaacagcccaggaggcagggtcctgttgggacttgtctttctgagtccagggacagacacacccccggagcgggctccggcttcagccactccgctgccctggccagatgaccttgggctagtcactgcgcctctctgaacctgtttccccaggtgtaaatggggggctctcagctgtcccttacaaaggatactgtgcgtggagtcctggcatggttcctggcacataggccccagcacgaggagaccgtttctgttactgctttaggagtgcataggggagtcaggcttgtaaccaacatgcgtaatgtttttgttttgtttggggggttttttggcggggaaggagggatagattcatagtctgcagccccttgctgtctggtggcacaaagtcccccagacgtgagactcccactcgagaaacaactaaagaatgccataaatcaacgtggcacaaaaggcccctacattagatactatcctgaggtcccttttacttggagtcaaaatccttagtcagatggggggaaaaggggactggaagatcggcgtgcttactactaaccagtaaccaaacctcaaggttattaaggccttctgtgtgccagttcgaatggatgtttattgtgatctggcttctgccctttctccaagggcttcttcactcctccccctcccgggggtgtgttttgttgagggtacaccctgaagaaacttggactagcagcctttcagcagccagggtgcgctgctgcaccagggtgatgacaggctgtgaaatacggtaatggcactgtttttattttaaaagacacataaacgtacacattccatagcattgttccctgtgtaacagtcaccttaaggcttctaagaaagctttccctccctgggccatggttatttttagaatttttaaatagtaatcatcctttgaggatggattttatttgaaaataacaaaactgctgtttgagcccaagtctggtgatgtaggtgggtgaaagtcaagtatttttgtaaaaatcctatggaactaagacatgatttcactgatttttttttcttctaggtatctcaaatctgtgaagtattgtagaggagacacaaaaggaattgggggtcacaaatggttctcattgacatgagtgtagacctttctactcaggtgaaatttggtatttagtgattgcctgccaggttcaagatgctgaccgaggagcttaccatcaaaccagagaccagtaccaatagagagtgaacatgatttatcttaaccctctcattttaggttgttgatcattatgaaaatcctagaaacgtggggtcccttgacaagacatctaaaaatgttggaactggactggtgggggctccagcatgtggtgacgtaatgaaattacaggtatggctagtcttttttaatagtgataacaataatccctttaagtttacaaagcacttgcgcatttcacttggtctccatctttattcctgt

SEQ ID NO: 10416 - DNA, 2300 bp, Homo sapien
ctaatccacgggactcctcaggtcagccagatgtcctggttccagggcctgccactaactcacctcagatccctgcttgaaccattagaactcacctgcctcactttccccctctgtgaaatggggctccaacgcctattcaagctactatcattgggggcattgtgaggccacagatcccagaacaaaccctccaaaccctcattgactccctactgcctcctaggtgaccttccaatactttagcccagctcctgccaatgtctccaacacttactacccctccttcagggggatgctctgcccaggagggagaagcaaagaacgaggggaaggggactccgagagcttccctcaggctgggcctctggggccacctgtgcagggagcaggctctatttgggttggttgtgtccctgctcctcgacatcccaaggtccccagactgcagccctcagaatgttgggtaaggtcttcttcccctgctggtgggccctgggggaggtttggctgcccctgaccacccgatgtctggtctaagacaggtcaggtaggcctggaacacccctggccaccttaaagcgggcacagctgctacaacatgtctgtgggtggccacttgcccctgggacatgtgtgtgcatgaatgtgtctgtgcgagtattggtggatggtcccctgttccctcgaagatgcagggtttggggtgatttccagagaagatgggaaagtctctgattttatttcccaagcaaatgactgtcccagttttctgggggtgagcgagggctgctgggaccattgcagggaacaatgataatctaggcttggttcctacccagagagcacgcactcatccttcatgcactcccctgttccaaaccctcactggctccgtactgcctccgaccttccgagactttagcctggctcctgtcaacatctctgacccttactacatgatcctctctttggtccatgctccagcctaatctaattgcggtggcttgtgcgtggtggcattcccagccaccatacctttacccacgctggtccttccatgcggaatgcctttccagggcctgctttgcccgcttctgctcatacacaggcatgccctccaggatggcttcctacctctttcccttgggggattgatctctctgtcttggggttctcggagcccttgacctgacccctttctgtttggcaaaaaagtaatttacctcggtgtccttctccctggtagtctgtgagctccccaaggctgggctgtgcctgattcacctctggaacttgcttagcacagtgcgtggcctgctgcaggtgttcattgagcacttgccgaatgaatgcatgaatgaatgaatgaatgaatgaatgcaaggggctgctaatccacaggactcctcaggtcagccagacgtcccggttccaaggcctgccactgactcacctcaggaccctgcttgaaccattagaactcaccctgcctcactttccccctctgtgaaatggggctccaactcctattcaagctactatcatttgggggcattgtgaggccacagatcccagaacatcagagtcagaggtagcccagaaagcttcccacccatccctacaaatgggaaactgaggtctggagagggaagggcagagttgggctccctgtctcaggctcggacccaccatcaggcctgtctctaaaacgaatcccagctcccacgctgcaccctgagcctggaagcctgagccacacaaggacggggaattttccttcccacttccagaggcctctgaacctccctgagcttgtcccctttggagggtattgggcagcagcgtgggcagaaccccagctcactgtctgggggagcgctgcaggacagccttgtctgtctgtctcagcctgccctggggacccgaggtcagggaggaagtgccgcatctggtcttccccagagcgagagtgtgagcaagggtgggattgcgtgtggcccgagagtagcccctcccctccccctgtccccaccccaaaccctcttaatgaaatcaagctggccctgcggcccagccggggagggaggaaggaggagggacgggaggagggacgggaggagggagggcgggcaggcgccagcccagagcagccccgggcaccagcacggactctctcttccagcccaggtgccccccactctcgctccattcggcgggagcacccagtcctgtacgccaaggaactggtgagtcctggggtcccctcctctgtcctgagagcctggagctatcttgga

SEQ ID NO: 10417 - DNA, 2300 bp, Homo sapien
gagctcaccgttcagcctgcaccatcccaggctaggggttaagatcaagaacattatttcatgtgcctggacttgagtcctggctctgccattactctgtgtgcccttgagcaaggcacattctccctctcagcttcagtttcctcatttctaaaggcagcttcgaggattatatgagctgatgtatgcaaagcacctaccacagggtctggcattgaccacaggctcaggaaacgttaagcgtttgtgttgtgaggctttgcaggtgatgaaactattcaactctgccgctgcaacgtgaaagcagccagagacaatatgtttacaccaattagtgtggctgtgtcccaagaaaactttatgaaaacggaatctcgaatttcgcacagtttttatgcatcacaaaacattttccaaccacttaaaaatgtaaccaccattcttagctcacaagctgcacaaaaccacgtggcaggctggatgtgacagacagcttgcaaccactcacctccgctaatcagagagtgacctgcaggcagtcttgggtgtgtttagagtttctcagtcccctgtccctgaaggatggctatttccaaacctgctggggaagggtgaggggcctgggttctaggggtctcacttcccctcttgtggcttcagtttccctgtccgtgccggcagggtgagcttttggctgtttccagctgcagcttcttaaggtggctgagactgtgtcatggcgaacacctgctgggtctctggttttcattttaaaacaacctgtgtgcggctgggcacggtggctcacgcctgtaatcccagcactttgggaggccgaggcaggtggatcacctgaggtcgagagttcaagaccaaccagcctgacaaacgtggagaaaccccatctctactataaatacaaaattagccggggtggtggcacatgcctgtaatcccagatactcgggaggctgaggcagaagaatagcttgaacccgggaggcggaggttgcggtgagccgagattgtgccattgcactccagcctgggcaaaaagagtgaaactccatctcaaaaaaaaaaaaaaaaaacaactttgtgcaaggcaagatatgagtatctttctgtgcatgtcctgagcccttgcctggtgcaaagccgcagggcagatcctgggagacccccctattccctcccttctggaagtgtctgggtattcttaggcctcccagcctttgcctctgctgtgctctctgcctgggatgcccacctggcttgtcatctcaagtgccacttcttggaagctcctcctgttaacctccctcccccacccaggatggaaggagaggcccctcccttgctcaccgcaggatggcactcactgcgctgtgtcattgtggcatgatgttccaccgaattgtttactcgctggcctccccattggatggagggctaccagagggccacagcccagaattgctggcctttagacctcagggcatgcagtctggagtgccagagttggtcaaatgaacaaatttaggatgaagaaataagataagcaggacttgcccttgtggtatctgtagtccagctccctagagaggctcttggttgcagctgaaagggcctgtgctgtgcatctacagagagtgttttgagtcctgcgagaagaaatacaccatatttgcaaaccctttgaaggttcatattttgtgttttttgctccctgaccacctcccacccctccccacgccccaccaatcttgggcaagaagcgagaccattctcctttttctctggtcactcctgtccttcagggggctccctctggccccgactgtccattgctgctgaagtaatgctgtggcctttctcagtttgggccccacccaaaaccgaagaacttctccccagaaagcttctacttggttctcagtgttttcacagttatgggaacccaagaacagtgtcagacctaggaggtgccccactaccaccctgtctttatcaatgttgtcaccaaagctgtcacaaacaatggggtgtgggctgtcacatggccctgcctaagtaaccacattctcgcttcctccttccacacacagccattgggggttgctcggatccgggactgccgcagggggtgccacagcagtgcctggcagcgtgggctgggaccttgtcactaaagcagagaagccacttcttctgggcccacgaggcagctgtcccatgctctgctgagcacggtggtaagtgctggcttgcaaaaccacagggagtggctggaggtcccc

SEQ ID NO: 10418 - DNA, 2300 bp, Homo sapien
ttctaagtatattactattatcctggtgcaaaagtaatcgcggtttttgccattccttttaatggcaaaaagtaatgccacgatcatggctgctaatatgatctcatggaaccctgtgagggaggggctgttatccccattttacagataaagaaactgacccttagagaggataaataatttgctgtgatagctgtcttagttcaggtcaagcttgatttaaataacacacgtttctgaggctgacgcttaaaataaaaaatccccctgtgaatggcaaagatgccttgctttgggaagtaaatagccctaccccacagtcggttcggttccccaggctctgtttcctcaaatctcggtatttcagagcttggtgtttcagaaagggactttagctattaacaggacaacttcttcatgctgaagattaggggactcaggcccaaagaggtaagagaactgtcccaggtcacacagtctgacggccgcagagctgaggctcaaattcccgtgctccgactttcaggcctgggccgccgagttattaagggactctggccagggaaaggaagggaggaaccctgaagtttccattccctcacctgcgaaatggggtcaatcacgggccctctttggggttacgtgggtgtggcccagcccaggggcggccactctgcactaggaatgtgacaatggacggttcagggagggctggaacgtcggcagtcctcaagggaggtggtggtagggtgtgacggagccagggcggagcctcgggagccagaggcgtggattcgcgaattcggggcggggcttggggtttaaacgttgagatggggtagtgggcggggcttgagatgctaggaatagggttgcggtccttgggcggggcttctggaagacggggcggggctttgtgaggccgctgggcgagttctgaagcagtgggaggggagccgggcttagggaagcaggaggctggtttaaggactcggataggcagtgcgcggggctcagaggagctaatgttcctgtattgaggggctctgggggaatctttgaggagccaggggacgtggccttgcagagcctagcgggtcagtgggcggggctctaagaaccccgctccggggtctaaggagcagtgggcgttgctcggaggcgcctgtgggcgtggccctctaccactcagatgactggagagcggggcgtgcgcttgggcaccgcctgcatccctcggtgcgaccagagggggcgtagcgaggcgtggaacgtggggtgggaagcgggcttcccctccggaagtgggcgtggcgcacagcggcccggcagccctggttgggtcccgcgcggcgcgggggcggggcctacgcgcggtggcgggggcggtggcggctgcccgcgcccctcccccgcacggcgctcagtgccaggctggaggcggcagcggttggaggcttcgcccggctttgcagcggggacttcggcggcggcgcctcaggcacctcggcccgggtgagcggctcgcgcccggcgggggcagcctgagagcgagtcgggcgggcggacctgtcctctgagcatgtgcctgcgccgcctgacaggagccggcggggcgaggggcagggctaggtggaggggacagtgctgggtgggcgcgcggggcgcgggttcacgggctgggttgcaaggggttagggccgggggctgctgtcgggggctcggggaaagggagttggggaccgaaccaggtggcgtggggagcgtgaagcagggtccctgtggggaggaggctttcgaggtccggaacgctcctggccgggtgcggagccgcgggccgaggtgggacgaggctgcccagggaaggcttttaggggtcagggatcgcctgcttgggcgaggtgctgggagggaagggctgcttcgggcgaggcgtagagcccgggggctccaggcctggggactgggtttgggccgccccagggaacgagtgggtgggggcgggtaggggccgggctcacgtggggccggggcgagctgggccctgcgtcgggaggggcgagggcggccgcctggcctgcgggtttcctggctttgggtgcgagaccagctctgggccctgcagatctcggttgggggtcaggcggggcggggcagagctggagctggagtaatgtgggtgggggcggcttgggaagaggctgagcccggccaagggagcagagggctgggactggctgggggttgggaggggaggaacgaagcaggaaggctgtcggatcgggggcccagggtgtccg

SEQ ID NO: 10419 - DNA, 2300 bp, Homo sapien
cgtctcaaaaaaaaaggaactcaaagcactttaccaatcttcattttccccaaagcactcagaactcactgctatcaatgcccctgtttaatttattaactagtggattttaaaaaaacaacttttattgttcaaaactattgaattgtgggcacagtggctcatacctgtaatcccaacactttgggaggccgaggtgggaggatctcttgagctcaggagtttgaggccagcctgggcaacatagcaggacttcatctctacagaaaaatgttaagaatttagctgggcatggtggcgcgtgcctgtagtctcagctacgtgggaggctgaggtgggaggattacttgagcccgggaggtccatgctgcagtgagccgtggactgccccactgcactccagcctgagcgacagagcaagactgtgtctcaaacaaacaaaaacaagtgaattgtttttgagcctcaccatatggcaggcactgcagtaggcgtttcatcacgtttatctcatttaaataaagtgagtggcaaatcttactgcaggaagggtgctgaattcctcctattaggagtggctgcttgaaggcaaaataaaacccatcctttcattttgttgagtcccagcagtagcagcaacaggtactgtcgagcgtttatcacaagccaggaactcttctaagtatattactattatcctggtgcaaaagtaatcgcggtttttgccattccttttaatggcaaaaagtaatgccacgatcatggctgctaatatgatctcatggaaccctgtgagggaggggctgttatccccattttacagataaagaaactgacccttagagaggataaataatttgctgtgatagctgtcttagttcaggtcaagcttgatttaaataacacacgtttctgaggctgacgcttaaaataaaaaatccccctgtgaatggcaaagatgccttgctttgggaagtaaatagccctaccccacagtcggttcggttccccaggctctgtttcctcaaatctcggtatttcagagcttggtgtttcagaaagggactttagctattaacaggacaacttcttcatgctgaagattaggggactcaggcccaaagaggtaagagaactgtcccaggtcacacagtctgacggccgcagagctgaggctcaaattcccgtgctccgactttcaggcctgggccgccgagttattaagggactctggccagggaaaggaagggaggaaccctgaagtttccattccctcacctgcgaaatggggtcaatcacgggccctctttggggttacgtgggtgtggcccagcccaggggcggccactctgcactaggaatgtgacaatggacggttcagggagggctggaacgtcggcagtcctcaagggaggtggtggtagggtgtgacggagccagggcggagcctcgggagccagaggcgtggattcgcgaattcggggcggggcttggggtttaaacgttgagatggggtagtgggcggggcttgagatgctaggaatagggttgcggtccttgggcggggcttctggaagacggggcggggctttgtgaggccgctgggcgagttctgaagcagtgggaggggagccgggcttagggaagcaggaggctggtttaaggactcggataggcagtgcgcggggctcagaggagctaatgttcctgtattgaggggctctgggggaatctttgaggagccaggggacgtggccttgcagagcctagcgggtcagtgggcggggctctaagaaccccgctccggggtctaaggagcagtgggcgttgctcggaggcgcctgtgggcgtggccctctaccactcagatgactggagagcggggcgtgcgcttgggcaccgcctgcatccctcggtgcgaccagagggggcgtagcgaggcgtggaacgtggggtgggaagcgggcttcccctccggaagtgggcgtggcgcacagcggcccggcagccctggttgggtcccgcgcggcgcgggggcggggcctacgcgcggtggcgggggcggtggcggctgcccgcgcccctcccccgcacggcgctcagtgccaggctggaggcggcagcggttggaggcttcgcccggctttgcagcggggacttcggcggcggcgcctcaggcacctcggcccgggtgagcggctcgcgcccggcgggggcagcctgagagcgagtcgggcgggcggacctgtcctctgagcatgtgcctgcgccgcctgacaggagccggcggggcgaggggc

SEQ ID NO: 10420 - DNA, 2300 bp, Homo sapien
gaaatgatagttcctcctggaactagtctgttttctttctaattttgtcagtaagcaagaacaggcccacctgtgggtggtcctttgtgtaccaaaaaaaaaaagttacccaccaggaaaggatttggactttgggtgggttctcttcccgtacaagtaggaaatgtaaagccagaggtgtgcactaaagaacatctaacctgctcccaccagccctggtgggagagggaggaccctggaggctaagtactgctggtttccaaggtgcatgctcatgtcccagtccacttcaccccaggcagcttttggtggctcttctcccttggacactcaggaggcagagctgcttccatttttttttttttaatttttttttttttttttttgagactgggtctggctctcttgctcaggctggagttcagtggtgccatcatagctcactgcaacctcgacttcctaggctaaagtgatcctcctgcctcaagcaatcctcccacctcagcctccccagtagctgggactacaggcgtgcaccaccttgccccgctaatttttacaatttattatagacatgaagtctcgctttgctgcccaggctggtctttaattcctgtcttcaagtgatcctcccaccttggcctcccaaagtgctgggattacaggtgtgagccacctcaacttccatcttaaaattctgcctccttagagttctttgctttctgctgtgtagtcagggaggagtcacattcactcagtctcctctgtctggatgcgatacatcatttctacttgctttccagtgggcagggcccagtcacagggtcccaatgcaacagccagggagactgggaaatgtatggggcacatgtatttggtgagcactaactgtcacaagtacctgggcgtgacccctaaattccagtgcctgcagagccaggaagtattttgttcagttcatctggacttgctctgtctctcaactggactcaaaagactgatgaataaaccagaatgcaagtttattactttaccaaaagaattataatcatcaagcagaccagattgctcacatgctgattagcacatttagtcctgctaggtaagtctttctttttttgagacagcctggagtgcagtggcagtcatggctcactgaagtgttgatctcctgggctccagcaatcctgcctcagcctcccaagtagctgggaccagagccacacactgctgcacccagctaaatttatttatttatttatttaaaagatagggtctcactatgttgcccagactggtcttgaactcctggtttctgatgatcctcctgcctcagcctcccaaagtgttgagattataggcatgagccactgtgcccagccccttctaggtaaatctctatggggtgccaaattttggttaagaattgcttattgaatattaaaagtttagtgggatgcttcttttttttttttcttttgagatggagtttagctcttgttgcccagactggagtgcaatggtgtgatctcagctcaccgcaacctctgcctcctgggttcaagtgattttcctgcctcagcctcccgagtagctgggaatacaggcatgtgccaccacgcctggctaattttgtatttttaatcgaaatggggtttctccatgttggtcaggctgttctcaaactcccaacctcaggtaatccacccgccttggcctcccaaagtgctgggattataggcatgagccaccgcgccaagccacaggatgcttctaatagtgttatcaagctataatgcagccctctctgtaaaatgttttaaaaacaaatcactgagggtcatggttcaagacactgttctctggcaaggttgaagatagctaacaaattctctttgggttccagccatgaatggggtgggatgggccccagcaatctgtatgtttctgagattccctgggaattctgatggccaagtttagaaaccatcaaaataagaatatgatgcaactgagtaggctcacgctttgctaattacattgcacacatgctttttggagacaacacccacactaccctaacaatgtgtgttcataaaactcatccgatacttatttgttcaaggccctaggacaatattcctgtaatgggctgcttttgccctgatttcctcctcagagtaactgtctcgcggttgggcacgatcccagatcacatctacagtggaggtggttttgctggggaggatccgcatgcttgtttgtgtttatgcctggggaaccccctcttggcaagatgt

SEQ ID NO: 10421 - DNA, 2300 bp, Homo sapien
tgtttctatacctactatttttgttcttcaagaaatgctgtttctatgcagcagggcagacacccagatcaccagcacatatacccattccttaaagaggatggctgtctttgcccttatcagagcttgggctggcttggcttaccctgtgctccatgctctgcaaatgtttgcctgtttggatgaatgaacagaaccctgtaaggaattctaggggttaattctaggggttaatcagagtatatatggtagaatgtaaattggaacccagaaatatgaattcccagaccattgtttttacttttgttccccaccgcccctgcccaagacagtgtctcactttgtcgcccaggctggagtacagtggtgcgatcttggctcactgcaacctccgcctcctgggttcaagtgattctctgcctcagcctcctgagtagctgggattacaggcatgcaccaccacacctggctaatttttgtatttttagtagagacagggttttgccatgttgaccatgctagtctcgaactcctgacctcaaatgatccacccatctcagcctcccaaagtgctgggattacaggaatgagtcatcacccccagtttttacttttcttaaaccttaaagcgcggcagtcaccatgggcgttgtccatgctatccctggtgattctattttggaattgttgacgggcttccttcgtttgtcatatggagaaaataccttaccctgcagaactgccagagttcaatgacgtggcgtagctaagtacctcctacagccttggccacatgggagatcctcagtaaataatagtcctgttgatgagaaacttaccttgaaagcgacttcttggtcagcgtggctgtgtggtttacagaactccttagcctctatgcagtgcagaagggccaaaggatgtgtcctgtcccccaactatgacggcagtggtgggtaggataaggctgtgggtcccctgcccttctgatttctacttgggcagatggaagaaccccggcacagtctcgtcttcctggagttctgtttgcttgaatggttccttctctctctttcccacgcatgatgcattcacacactgggaagaaggacggaagatgtgatccacattctgacttctcagtgccttagtggctttgccattaggcacctgggcaggcatgagcggatgtgaccgcagcataatggctctgattttcattctggatgagtagaacagctgcttaacaggggttaagcaggtgggcgtggggcagatagatgtgagtccagccccatcttgtagagatatgtgctcctaggcaagctggggtttcctcacctgcaaaaccagaatcatggtaatgtgtgtttcacttaatccgtagggaggatcgcttggtcacttgtgagccgagggaagagaagcccctactcagtgctgcttccttcaggaattgttccagaagtcaccagttaaatgctccctcctccctcttgtaaaccctagccgagcccctttcttagggtacttattccattctctcctgcgtcatggttattcacatcctgaacttatttctctcactgaaagaaacgctaaaaacacagctcttggctggcttgtgcctggagggtttgggatcacacctccaacctttaggacctttgcagcctgacctgccttgggcaccgtgcgtatcccagagctcctcataggtgtgcatgtggtcccctctacctggcgtgtcccctcagatagctgttagcatgactgaagaattttcaggatgtaaccgtgctttgagtacgcagaataactaactgcggcagctgcccacgtcaccgtcaccgttgggtaaatggatgctgatttgaaagaaagagtcatccttcagaatgttgatttgaatcggaagggggtcttgttgcttggggttggttccttggggccagttgtttgccctcacaatgtcgaatgcacaccccggtgcttgtttctccggcctacagaaaagcccgtaggagtgcagtgattagaggaacctcagctgttttgctgaatggccctctttcatcaggatgtgctgggacaagggcctttttcagccaaaatatcagaggaagacaagagttccacaagagccatttgcttttcgggtaggactctgaggaggagttggctccccagccctcgtggaagcactcggcagcctcctggcttttcctgatctccatagggagcagatggccagagctcggagggcagttgtagggagcgttagagatgtgagcactgca

SEQ ID NO: 10422 - DNA, 2300 bp, Homo sapien
ggctcacgcagtcacccaatcaagggtcccagttgcacatccagtcacccctggaccctggtcacactgcagagtcactcacaaatgggagtcccgacagacgcacagtcctccccagacagaggtcaacccaagatgggggtcacacctgaaatcacagtccccacacaatcacgaggtcacatctgcacacacagtctctgcacagtcacccttaggggtcacaacgcacacagtctccgcctaacaggggtcaccccaagatgggggtaaccccctgatgtgggtcacagcgcacacacagtatcctgcagacactcccagaggggtcgcactgcatacacagtccctgcaaagtcgccccccgataggggtcacaccgcacacaaagtccccgcacagctccccaagacagggtcacatcgcacacagtcctcgcacggtcaccccggtccggctgcccggctctgttcctacggcggggccccgaggagcccgcgcagccgcccccctgccccgcacgcgcggccccagctccggcggcctcggcgcggcgtccggcggcccaggccgggcgcggcgagcccggggctcacctcgctgttgctggccgaggaggaggcggcgctgggcgtgggcgagcgctgcagggtcaccagggccatggctgcggcgcggtgcgagggcgccacagacgtctcgagctagagccgccaccgccaccgccgcccgggccgggcccggggcctcctggagccgcgcgcgggcggccgggccgagccgggccgggcccgcccctccccctcggcgtcgccaccgcccccgcccccagctcccgcctcccgcgccggcgcgcgcaggcctcagtgcgcggagtgggcggggaagcgggcagggcgggacgaggaggcgcgcgtgcgcgggggccctgagggctgcccgaggcctcggctggtcgatcacgtccctcgcgcgcccgacacacgcgcccccgcccgcgcgccccgctatcaggcctgggactcgggggcgcgcgcgccgcccggagcccgtacgccccaggggccctgcccgctgctctgcctggggaaactgaggcccggcgaccgtgcagacaggactgtacagcgaccaggaaataaaagacgtcctggggccgggcgcggtggctcacgcctgtaatcccagcactttgggaggctgaggcgggcggattacgaggtcaagagatcgagaccatcctggccaacatggtgaaaccccgtctctactaaaaagacaaaaattagctgggcgcagtggtgcgcgcctgtagtcccagctactcgggaggctgaggcaagagaatcgcttgaatctgggaggcggaggttgcaatgagctgagatcgcgccactgcactccagcctgggcgacagagcgagactcggtctcaaaaaaacaaaaaacaaaaaacaaaaacagtaagcaaaatagattcgcctgattttgcagaggttaatcaagttattaggcacgtttttaaaaaagtattttgctaatctttttcaatgaattctttctgggtgttctgaaacccagccaactccttggaggtcagggaaggcttcccagaagagctttattctgaggcttgggcttgagcataagcaggattaacaggtgaaagaacagagagacagctctccaagcaggggggatcagcgtgccctgaagcaggaagaagtttgtcaaccggaggccagcactcagggaagggaagaggggaggaatggctggagtctccatcctctctggaaagatcgctccggctgctgcgtggatgagggaccacggggcagagggctgagggagaccagggaggaggctgctgctgttgtcccggggagaggtgaccagttatggggatggagaggggaacatggaataagataccaagaaggcaattctggcttgacttagtagtaggaaacttttcttttagccaaaatctcatctcccggctcccacccccaacctctgcatgttgcacaagcactcgcaaacgcagtggtcccagcctgccccgcagcttagcaaatttgtcttactgcccaacaggaaacccacgcagcctcctggattcttccccgtccctccctctgtcctggggctgtgacctcctccatgttattcacagggtctcagcacgattcatctcaaaggtgattctagtggggggcactgtagcttctacggagcgtttctaagaggggatttgtgggaatgtttgtggttgtcttgctgatggagggggagag

SEQ ID NO: 10423 - DNA, 2300 bp, Homo sapien
aattttttgtatttttaggagagacagggtttcaacatagtcacctttctgaaaattcagtaaaaaataccaggctagccatggtggcttctgtctgtaatcccagcactttggaaggcggaagcaggaggattgcctgggcaacatagttaaactttttttttaaaggagctgggtgtggtggtgtgtacccgttgtactcaggagactgaagcaggaggatgatttgagcctgggagatggaggctgcagtgagctatgattgtgacattgcacttcagcctgggtgacgggagtgagaccctgtttcagaaaaaaagtgagagaaagagaggaaggaaggaaggaaggcaggaaggaaggaaggaaggaaggaaggaaggaaggaagactagtgttgatgcatgaaatggagttaggttctggcttcaaattactataaatgggtttttcacccaggaaacattttgtgggaatggagcaattcttgttggggagactgtccagtgcattggaagacatttagcatccaaggctcttgcactctaaatgccaggagctctccccctccatcagcaagacaaccacaaacattcccacaaatcccctcttagaaacgctccgtagaagctacagtgccccccactagaatcacctttgagatgaatcgtgctgagaccctgtgaataacatggaggaggtcacagccccaggacagagggagggacggggaagaatccaggaggctgcgtgggtttcctgttgggcagtaagacaaatttgctaagctgcggggcaggctgggaccactgcgtttgcgagtgcttgtgcaacatgcagaggttgggggtgggagccgggagatgagattttggctaaaagaaaagtttcctactactaagtcaagccagaattgccttcttggtatcttattccatgttcccctctccatccccataactggtcacctctccccgggacaacagcagcagcctcctccctggtctccctcagccctctgccccgtggtccctcatccacgcagcagccggagcgatctttccagagaggatggagactccagccattcctcccctcttcccttccctgagtgctggcctccggttgacaaacttcttcctgcttcagggcacgctgatcccccctgcttggagagctgtctctctgttctttcacctgttaatcctgcttatgctcaagcccaagcctcagaataaagctcttctgggaagccttccctgacctccaaggagttggctgggtttcagaacacccagaaagaattcattgaaaaagattagcaaaatacttttttaaaaacgtgcctaataacttgattaacctctgcaaaatcaggcgaatctattttgcttactgtttttgttttttgttttttgtttttttgagaccgagtctcgctctgtcgcccaggctggagtgcagtggcgcgatctcagctcattgcaacctccgcctcccagattcaagcgattctcttgcctcagcctcccgagtagctgggactacaggcgcgcaccactgcgcccagctaatttttgtctttttagtagagacggggtttcaccatgttggccaggatggtctcgatctcttgacctcgtaatccgcccgcctcagcctcccaaagtgctgggattacaggcgtgagccaccgcgcccggccccaggacgtcttttatttcctggtcgctgtacagtcctgtctgcacggtcgccgggcctcagtttccccaggcagagcagcgggcagggcccctggggcgtacgggctccgggcggcgcgcgcgcccccgagtcccaggcctgatagcggggcgcgcgggcgggggcgcgtgtgtcgggcgcgcgagggacgtgatcgaccagccgaggcctcgggcagccctcagggcccccgcgcacgcgcgcctcctcgtcccgccctgcccgcttccccgcccactccgcgcactgaggcctgcgcgcgccggcgcgggaggcgggagctgggggcgggggcggtggcgacgccgagggggaggggcgggcccggcccggctcggcccggccgcccgcgcgcggctccaggaggccccgggcccggcccgggcggcggtggcggtggcggctctagctcgagacgtctgtggcgccctcgcaccgcgccgcagccatggccctggtgaccctgcagcgctcgcccacgcccagcgccgcctcctcctcggccagcaacagcgaggtgagccccgggctcgccgcgcccggcctgggccgcc

SEQ ID NO: 10424 - DNA, 2300 bp, Homo sapien
gggagtctgaggcaggagaattgcttgaatctgggaggcagatgttgcagtgagttgagatggcaccactgcactccagcctgggcgacagagtgagactctgtctcagaaaaaaataaaaaagaaaaaaagaaaatccaggtatttagaattggtacaccgcaatttacaaaacgtaaattattgctgtgatggcagtggggagcatgaagatattggactaacttttatgaatgttcaagtgctcccatgatgaattaaacacacagggaactttataagggccatatgttatataagtgatacatgactattgtattaaaattcaaactagttagatataaagtaaaaagtgggtttcaccctatccattttttattattgaagaaaaaaaaatatgtcatagcgtggtggcttatgcctgtaatcccaaccctttgggaggtcggggtgggatgattgcttgaggccaggagtttgagaccagcttgggcaaaatagcaagaccctgtctttacaaaaagtaagtaatttggctgggtgttatggcatgcatctgtagtcctggctaggctgaagcagaaggattgcttgagcgcaggagttcaaggcgccactgcactctggcctgggtgacagagtgagatcctctctctctctctctctcttttttttttttttttttttgttttttgagactgggtctcactctgtcacccaggctagagtgcagtggcttgatcttggttcactgcaagctccgcctcccagttcaagtgattctcttgcctcagcctcccgagtagctgagattacggacatgtgccaccacggccggctaatttttgtatttttagtagagatagggtttcaccaacatgttagccaggctggtctcaaacgcctaacctcaagtgatccatccacctcggcctcccaaagtgctgcgattacaggcaagagccactgcgcctggcctgaccctgtctgttatcttttctttttctttttttttgttttcttttttttttttagacagagtatcgctctgtagcccaggctggagtgtgcagtggtgccatcttggctcactgctacctccacccaccaggttcaagcaattctcctgcctcagcctcctgtgtagccaggattacaggcacaccccaccactcctggctgattttttgtaattttagtagagacggggtttcgccatgttggccaggctggtctcgaactcctgacctcaggtgatccacccaccatggcctcccaaagtgtcagaattacaggtgtgaggcactgtgcccagccgaccctcttttaaaaaaggaaaaaatactatgcagtgagtattttgcatgcattttcttatttcatcttcgtctttttatttgatgatactaaaggcaggtgttagaggctggattgctaaagctgacccaaagaatgcctccctcagggctggttggtccctctctctcaggcctcagtcttcccatctgtacagtgaggtgcctgcagatctctgggctctaaaaatcacagctccatgtttatccctggcagaggaagggcctggagtcctgctgcttgcgtctctgggatacgggagcaaagagccacgcatcctcatggcccacacaggcgtcacctccagtctctccttggcctcatctccccagcgtcctggaatggcatcgggctggcccagggagcccctgtcctgtgcctctcctttcccctcaggggctgccaggctgaccacccccaccgcaggccaggcctacagtgccccatggaacgtcctgaccctcccccagggtggcagcaggaagaaggaagaaaggggatcctctccagctggccagagagacagaccttcttgtgctcatcaaccctccaagaatgcctgccctccctccttcccccaaggcctgtccacaggggcttgagatcagccagaaaagtcaggcaacttttcagggactgggagcgaggtctcccggccgggcctgggtccagtctctgtgggcagtgcagtgccgagccccacccctcaagccgtgccctgtccatagctccagactttgaccctgcactccagtccgggctggcggacagagggctggaaacaagacgctccagaatcaggagcttcccctcaggaaatagcatcctgtgtccccgcactgcagttgtctggtctctccagcagtttggtacttccggtgagtggcagatgcacctttgagctggggacaggggttgggagaggggagaggcaaaggatttca

SEQ ID NO: 10425 - DNA, 2300 bp, Homo sapien
cactcacagccccaggctttcttctttgaaattgcaggcgatctaggtgtggtctgagcagctatttcctggcaggggccccccggtttgcctccctagagcctgaccagtggattctctggcagatggacatggtgcattcaaactggagccacatgcccccacccagccccctctggagttgccgttgttggcaccaagagatccagatgtgtccctggggacagctggtcttgcaccaggtgacaacctcagaacgccgttaccccctgggaactgaggactgaggccaaagtgaatcaagctgaagtcagagcacgggcctccccttctgaagcagcgaaggccacggttccgacttctttcctggccccctccttggtcaggctgaatggtgacttttattgttttttgagacggagtcttgatctgtcgcccaggctggagtgcagtagcgtgatctcggctcactgcaactctgcctcccgggttcaagcaattctcctgtctcagcctcccgagtagctgggattacaggtgcccacctgtactttttagtagagacagggtttcaccatgttggccaggctggtctcgaactcctgacctcaagtgatccacccgcctcggcctcccacagtgctgagattacaggtgggagccactgcacccggcctgaatgatgactcttgaggggaaaaagtttactcaggtttgcaggtacaaaatccaaaatccagggctttgggttttgtgcatgggtagacagctgaatgggcagagaaaccagaaggatgctacacccaccatctcatcccatggggatcaggggaccaggattccctgatgcgaagctgctcctctgtccagggacgtcttgatcattacacaaaggcagcccctggagttccattcatggagcctgccgtggagtggagaggggtgggaggactcaggtgtgtgaaatgtatatgttttcaaaggaagcagtgggaggccagttggttttgagttggtctccgcaggcaacatcacttctgggatttggtttactggagccttttttcccatggtgaaggcaggggacatagacaaggagggaggaagctggcagatcccatcaaaggccagagcagacagacctactgcttgaagtaaacattgcaaggaagccaatttgtgcgttcaactcttattaaaacatgtcagtgatggacattgcaagagcctaagtttattcattgtcatcatgtcctagtgacagtccagcctaacggtctgactacctttgttcatcggaattcatctcaatgctttagtgtgataatctcctttccaatgagtggggaaagacataccgttggcagccaacattgtggctgagcttgttggagacaacactttcttctaatggtgtgcaggtcatgatgggggacttcttccagctcaagttctaaatcaactgcaaacaatactgtgtctctaaaatgtgggctgcagccccctccgcccaggcagttgaagaggagatggcttggcagatctctgtctctctctgacaaccacatttccttgaaccacgtgtggctgtagctctaattatttctggacagctgagctctcctgggtaacacagaacttttgcttgtctcttttgccttccggctggtcagacgctactggatgatcatgtccgctccctcaccctagaataacccagtggagctgggggctgggggggatagagtgcttggtgggcaggaatatttcccagagactagggtaaaggggtttacagttgagggccttctctacttgagaaagtgaaagttaaaaactcctgctgggtatggtggctcatgcctataatcccagcacttttggaggccgaggcgggcggatcacaaggtcaggagatcgagaccatcctggctaacatggtgaaaccccgtctctactaaaaatacaaaaaaaaattagccaggtgtggtggcgggtgcctgtagtcccagctactcaggaggctgaggccggagaatggcgtgaacccaggaggcagagcttgcagtgagccgagatcgcgccactgcactccagcctgggcgacagagcaagactccatctcaaaaacaaaacaaaacaaaacaaaaactctttgccttgtaaatagcctgcctttttcaaaaaaatcaatattatcaaatgatacaagagctatcacaaaaggcacccaaacttctgaatatgtgagacctttagctgagaacatttgtatctaattttgaacaatcctattcaaa

SEQ ID NO: 10426 - DNA, 1214 bp, Homo sapien
aattctgggcccagtttttgtccagctggtggctctgccatcctctagggctttgaagtcttctacatacagacaacagacttgcaaaaggcaagtggagactgcacagtcacttcttaaataccttggccaggaatagtctgctcatatgccattggtgaacacaagtcacttggtcccacctagatgcaaagggagctgggaaatgtagtccctgtctgggcagccacatctaaggacaactttgcgctatgaaaaaggaaacagaatgttggtgggcatttgcactctctgctatatcctctttttattgatgagaaaactgaagcccagaggggctaattgacttgttaaagggcctacagcaagtagacaaaagaactctaaatcagatcttctaactcctagtcttttctccagtatacctgctgtttcaaacagctgttgctccatttttacagaaatgtatgtatgtagtcatttggggttgggacttccattggcctaaaaatctttctgatttctttctttctcttgaactgagtttgcaagatgatgctgaatacaggtgaggtgtaattccttgaacaatgggggtgagatttctgacagtgatcttaatttaattcagccctcacctggaactctgaaaacagccccaaataatagtaatagcaaccgtgacaataataataactgcattaacccataccaggcactgcactaggcaccttgcctgtattatcctgtttaatcctcttaagagccctaagaggtaggatctcttatcattcacattttatggagaaggaaatgaaagcacagagaagtcaagtaattgtacagggtcacacaaccaacataataaatggtggggccaggatttgaagtcagctctctggctccagagcccccactcttaaagaccccacatgcaacactgtgtggctagaagcgagtgctctgttccaccctaaccagccacgcctgggtttcctgtctcccccatcccagtggctgcctgaaagtgcaaggtatgatgtgctgtcagggaaccaggaaaaggcaatcgccaccttaaagaggatagcaactgaaaacggagctcccatgccgctggggaaactcatcatctccagacaggtcagtgcctggaccaatagactctgcaatgtgcgtatcggggtgcatgcaggggagtgtgtgcatatgga

SEQ ID NO: 10427 - DNA, 2300 bp, Homo sapien
cagcagctgttcggggagggagccgctggggaccagcccacgagacaaagcctccgccgccaagagaccgcggcgagagtgggcggagaagaggaggcggagggcagagcgagctgcgcggggagagggggcagggagagcccttctgcttggaggagttcacaggctctctggctgatggtgtatcactgggatgcctatagggcacaccagtctgtgaaatggttgtccgggtaccagtgagcaccctttgattgacgatgcgtgtctaaatgtttatttgcgtggattcattaatgttatccgtataacactcttgaaacccaggctgctgtaacaaatacaggcatgcatttaagtacggtttactgagcacctatgtgccaggcactgtaataggcactgggggtatgacagaacaaattcgacctgtcattgtcatcgtggagctaagggtctagtgaaatgaatcaagaaaagaaaaatgtaaattaggtatgagaaggccaaagatcactcattctttcaacaagcgttattgggtgaattctacagccctgaccctggggaataaaaacatgagtaaaataaagtctctgccttcaagatcctagatagtttaatggttcccctaagccacctctcactagaatttctgacccctttagaacttaagctccatgaggtttcactgatgtgtcccaagtactagaacagtgtctggcacatagaaggtaccccataaatatttgttgaataaatggttctcagttcaggctgcatataagaattgcctggctccatttcaaaccaattgaactcaactctcgggaggtggaggccaagcctgggtattttttattttttcaatatttatttatttatttttgagacaagttcttgctctgttgcccaggctggagttgcagtggcatgatcatggctcattacagccccaaccacctgggctaaagcaatcctcccacctcaacctccctagtagctgggatcacaggctcatcccagcatacccagctaatttatttattgtagagatggggtcttgctttgttgcccaggctgatctagaactcctggcctcaagcaatcctcccatctcggcctcccaaaatgctgggattatagatgtgagccattgcgcccggcctcagggtattttttaaaagctccccagcaccatgaagtggaaacccctgatcaagtgtgaacaaatgaaaagaaaagctggaaaattatacaacagaaaactactaagatgatccatgatggcaactggcaaaagctatgagaatgaccgttgaatggacacttacaaggaactaaaggaagaaggaaacatttttttctttttttctttaattgttgacaaagggtgggggaagttggaagagggaacaagaaaaccaatctgagaactgaaaacaatctcacatcgaatccataaaaggacttgaaaatccaaaattgaatgtgtgccaggcacccggatatgtacttcaccatggtccccttgatctttgcaacaatcctatgagcaggtgtgatttttatccttattttgtaagatgaggaaacaaggctcagagaagggtagatttgcttgcacaaggtcatgaggacaggaaagagttgatctggacttaaaaccccggcagtctatctccacaacctgcgcccttaaatgctaggctttctctgagtgtctcaaaagaaaccatccattgcgggtatagtaggagaaattggaactattgaaacattggataactttaaacaaatctaatgttgggaaaaccaattatacagtggtactcaagctccaatgtattatttatctagtaaatattaatgagcaacaactatgtgtctgtcacaatgatagtttgaacttattcatggctccttctcacctcatactggagtcaatcacaagttgtcccacccacacttatttctaaaggaatctctcccccatccctgctgtgcactacatttggtatcacatgattcctggccacagctgattggctaagagggtggacacttatctaaagacatccaatccaaacacttgtcagtatccccattgttgcatagctgggaaagggagctggacaacctggtaccttttcgattatggattcaaatgtctctgaaggtttttgctttaattaccccttttccctcaatcctggtgtcaggtggggctctctagggctctatgaatattcattatgctcactctaaacagccctcttaggggtcgggtaccatggctc

SEQ ID NO: 10428 - DNA, 2300 bp, Homo sapien
tttgttttgtttctgtagttggggctacaggtatgcgacaccacccccagcatgaatgcaattactcagtctggagtcggagaaagcgattgaaagggagggaaaaatcttgctggctctaatgctttataaactgtgctgtccaatacggtagctgctggccacttggggctattgagcacatgaaaagtgggtactccaaactgagaggtacttagtaccaaaaaacaaaaaaataatgggccgggcgcggtggctcacacctgtaatcccaacactttgggagcccgaggcggatggatcacgaggtcaggagttcaagcagcctgaccaacatggtgaaaccccgtctctactaaaaatacaaaaaaattagccgggcgtggtggtgtgcacctgtaatcccagctactcaggaggctgaggcaggataatcgcttgaacctgagaggcgagatcgtgccattgcactgcagcctgggcggcagagcaagactccatctcaaaaaaaaaagaatgtaaattatctcatcaataattttcacatagaaatgacatattttgtttttcttttctttgtttttcggtagccatgggttcttgctatgttgcccaggtggccttggactctgggcctgaagccatcctctcacctggcctcccaaagtgctgggattataggcataagccactgcacctgccccaatattttgaacatattgggtcaaggaaaaaatatggttaaaattaattttacctcttgctttttttttttttttttttttttttgatgctgaatctctctctgttgcccaggctggagtgcagtggtgtgatctcagctcactgcagcctccgcctcccaggttctagcgattctcccgcctcagcctcccgagtagctgggattacaggcacgcgccaccacacctggctgatttttgtattttttagtagagacggggtttcaccatattggccatgctggtctcgaactcctgacctcaagcaatccgtgccccccacccccaccccccggcctcccaaagtgctgggattacaagtatgagccatcgcacctgacctctttttttttttttttgagatggagtctggttctgtcacccaggctggaatgcagtggcatgatcttggctcagtgcaacctccaccaccacggttcaagcaattctcctgcctcagcctcctgagtagctggaattacaggagcctgccaccacgcccggctaatttttgtatttttagtagagatggggtttcaccatgttggccaagctggtctcgaactcttgacctcaggtgatccaccagcctcgttctcccaaagtgctgggattacaggcgtgagccacggcgtctggcctacctcctgcttttcactttaatgtggctactggaaaatgtaaaattacctatgtggctcctgtatatttctgttggagagtgccattctggagacagacagaccgaactgccaatctctgtttcaccacttacaagctgcgtcaaaaaacttactatttcttcaaatttcctgggttccctgggatgtaaaatgtgggtaatgttagagttggtgtgaatattaaatgtaaataatgaatgtaacatacttagctctatacctggcacccaagtaaacaataagtttgttggctattaaagacgttgatttctctactgatatcgtcagagatgggcctcatgctcattaaagttccttcctctgcgacctatttccactctggccacaataataactaattatagcagaggcctgacccgactttcggctgttggcctcccttccccacatcgaaaaattcaaatcatgacccagggtccatcctagaagtgtgccatctgtatttatgaatggagcctaagcaaatctgaaaaccaagcagccccaggcaactgagcccagcgtagcaaccgacgccggggcctgttgctaagggaaaagaaagaaaggacgtggtccgtcagctattgctctccgggggcagctacttccggtccccctgggagctgtcctgcggtctacgttcccccgaggtgctgggactgcggccgcaggttccgctgtctcgggaaccgtcgtatccctcggtccggcggcggcggcggcggtagcggaggagacggtttcaggcctccggtgcggctgcaatgctgagctcccgggccgaggcggcgatgaccgcggccgacagggccatccagcgcttcctgcggaccggggcggccgtcaggtgagattttggggggcggggctg

SEQ ID NO: 10429 - DNA, 2300 bp, Homo sapien
aggagtgagccaagcagtgatctgggggaagagcattctgagcagagggaacagcagtgcaaacgccttgaggtcagagcattggctggtaacgttccatgtggaagtggagtgagaggcagaaaaggaaaataacttcagtttttcctcagagtgagaagtagcctttggaatgtgatgatttgacttagtttttgttgttgttgttgttgttgttgttgttttttatgagactgagtctttctctgtcacctgggctggagtgcaatggcacgatctcagctctgtgcaaactctgcctcccagattcaagtgattctcctgcctcagcctcccgagtagctgggattacaggtgcacatcaccacggccagctaatttttgtgtttttagtagagacagggtttccacatgttgcccaggctgatctcaaactctggggttcaaaggatcctcctgccttgacttcccaaagtgctgggattacagggatgagccaccgtgcccagctgacttagattttaaatcctaatgtctaaacatcctgattttcaagatgtaatcctatgactatatgttactttaacttgcaattaggtatttggtgggttattttgacaaaatgttattctgtctatatctgtatatttgccttttgtgtttgtgtgagggaagacagtaaacttgttttcttttttagatataaagtcatgaagaactggggagttataggtggaattgctgctgctcttgcagcaggaatatatgttatttggggtcccattacagaaagaaagaagcgtagaaaaggtaagaatgagaacactgcatcatggtctgtagacttgacccagatccctgttatctgaaaacagtacaaagaaggtggggaggttggtcatatttgttctctgtatctttaaaattaggatttcaggttttcaaacagtacttttaccgttagtcattattttataccatgtagtaaaaagatttctatttcagcccctctccagactggagttggaggcatgctttgtaatgaaaaatgtcaagcggcataattgtctaagaagtgttctcattagtacggcaattgtagttttcagtggtacagactgaccaattacatcatacatttgtgttctctcagactagcttgctagtaactggtaaaaatttcaagttagtgccttcattactaaaaaattattttctttttttttttaatgctcccttttgaaagtgtggctctatgtaacattgattaaaattcagcaaagaaagaaagaagaatgtggtgaaatttgatcattgttaaatctggggacagttataattgaggtttattttacattctccctcctttttttgtgtctttgagaactttgataataaaaagtttttttaaaagattgctagcagaagagagaagtatattagatttcattgatctctgcagaaagactgatcagaattggtatagtggtgtctttcccagtgattgttaagataagaacagaatcattgtcctggggaagtaacaacagaacaattgttttcttctgttctgagaaacattgctttctgattaaagaagaaagagagcatgtaggggagaatgaggaagagaaaaagacaggagatggttactaagtgtttttgtacatttaggaagaaccaagctgtgctggataccatgataggtttcaaaaataacacacaaaggggacctgtccttctgtgcttacagtctgcggagcagtactagaaccaagccttggcacagatagaaggcctggccccagatctctgtggataaggatcttcttggatcgggattccaaatttaaggccacagcgcaggaactctgggtcccacatgggagagaaattgatcaaatgtgatatactgttctcttcttccccctgctttttttttagggcttgtgcctggccttgttaatttagggaacacctgcttcatgaactccctgctacaaggcctgtctgcctgtcctgctttcatcaggtggctggaagagttcacctcccagtactccagggatcagaaggagcccccctcacaccagtatttatccttaacactcttgcaccttctgaaaggtatctagatgggaatttcaagggaattatgtaccttttcaaagaagtccagatgacagagactcttataacaaagagttaataccttattgtaggaaaagatcatacagatcattatgaataaacaacaccaagagcccaatagatacaaacaagtattttttaaaaatcaa

SEQ ID NO: 10430 - DNA, 2300 bp, Homo sapien
tgctggtgtgtcccagtgcctaggacaagaagctgaagtctaagggagagaggctcaaagctgaaaatcatttgcccttagagccactatgacccagcactcccacacctaggcattatttacccaagggaaatgaaaaactatattcacaaagcttgtatgtgaatgtttatagtgattttactcatagtaacctaaaatcagagaaacaaccctatgtggggcctactcctgtggggcatcccttctataccagtaataaaaaggaacaaataagtaatacaaatgtgcatatacgactgggcacagcggctcatgactgcaattccagcactttgggaggccaaggcaggcggatttcttcagctcaccagctgaagactatggagaccagcctgggcaacatggcaaaaacccatctctacaaaaaatacaaaaattagccgggtgtagtggtgcatgcctgtagtcccagctacttgggaggctgaggtgggagtggagcctgggaagtggaggttgcagtgagccgagatcatgcaactgcactccagcttaggcagtagagccagaccttgtctcacaaaaaaaagcggggaggtgggggggcgcataaatgaatcttaaaagcaatatgcttaagtgaaagaagtcccacaaaggcatttctcatagaggctgagaggtccgaggttgaggggctgcatctggtgaaaaccctcttgctggtggggactctgttgagtcctgaagccgtgtagggcatcacatcgcgaggggcctgagtgtgctagctcaggtctctcttcttccttttataaagccaccagtcccactcccacggtaacccattaacccattaacccctgagcccattaatctattaattcatttatgaggacattatgacagagctctcatgtcccaatcacctcttcaaggccccacctctcaatactgccacactgaggattaaatttcaacgcggattttggaggaacagatattcaaaccacggcaattccctgtatatgaaattctggaaaaggcaaaactatagggagagaagacagatcagtggttgctgatgctgggtgatgggcgaagttgattaagaggctggagcagttttatggagggacggaactgtcttagatcttgattgtggtggtgatcatacaatattgtacatttgttgaaatctgtcaaaacaaagcctctgatctcatggagctttcgttccattgaggggagacagagtaaataaaaattaggagccggtcgtggtggctcacgcctgtaatcccaacaatttgggaggcccaggtgggaggatcacttgagcccaggagcttgagaccagcctgggcaacatagcaaggccctatctctactaaaaataataaaaaaattatttagggtggggtgggatgtgcctgtagtcccagctactccagaggctgagacgggaggatcgctctaacccaggagttcaaggctgcagtgagctatgatcatgccattgcattccagcttgggcaacagagtgagatcctgtctcaaaaaaacaaaacaaacaagaacaacatcaaaaaacaagaaaacaaagaaaaacgagcaataatggaaccaacatttatttagaggacagagcatttctcatgcatcctgtcatctcctcaggcgctctcatgacataggtgctgtagtccgcacttcacagatgaggcaacttaaccccagagaggttaagtgacctgtgggaggccacacagccagggcggaggagacagaaacagaatccacgatatccgactgcagaactcctgctcccactcgtgacaatatactggtggcccaacgccctttccggacaccaaagtaaccctcactgagaagtgacgccaagccacagttctcaccccagccgtgattctcgacagtggcccaacaggtgatcaacgggaaagcggcagtgcttgccacacacgggaggccagcaggtggcaccagggggccgcccggctgctctctttgcgccctagcctgccgtagttcccagcgtgctccggaagtgacgcgaccgattcgctggggcgcgtctttcccaccacgaggccaccagggtgactgcgggattccgatctgcgccggagctgcgatgctagagcactcttgccacccccaccccacggacgtgttgcagtgatatcagaattttgcgtgcggtttacccgtgtttaacctctttgcgtctcgcttctgaatcgtatccacttgagcatcactagactgatcta

SEQ ID NO: 10431 - DNA, 2300 bp, Homo sapien
caaatgattttcagctttgagcctctctcccttagacttcagcttcttgtcctaggcactgggacacaccagcaacaagaagcagcaagttcctttcttcactcaggttacatttcggggatggagacagaaacacacaaggaaagaataaataatatgctgtctctaaagaaattgtgtaaaaagaaaaaataaataagatgcttttgtatagtatagcagttatagagcaatgggctagaaagtggggcaggaggagaagtccttttcagggaaagatcctgagctgagacctgaggctttccaggcaaggggacggtgaatgcaagggtgtgcaggccacagggggacaagctgggtgtgtccagcaattgtgctgggagctggactcagtagtgggggcttccatcagagaggaggcagcactgagacctgggtaggaagctggggtttattctaagcctttttgaaaaccaaagaagggttttaacctaaggattgtcttttttttctttttcttttttttgtttgtagacagggtcttgctctgtcacccaggctggagtgcagtggcacaatctcagctcactgcaacctccgcctcccgggttcaagtgattctcctgcctcagcctcctgagtagctgggattgcaaatgcatgccaccacgcctggctaatttttgtatttttagtagagacggggtttcaccatgtttgccaggctggtctcgaactcctgtgctcaagcgatacgcccctccttggcctcccaaagtgttgggattacaggcgtgagccaccgagctgggccaggccccaggtattgtcatgatgtaaaaatctctctctagaaaagagaacaccagcttcccagctggtcttctgtagctaggagatgcaagagcagcagttgaatttgaggtttgctttggagaaagaaccaaaagcagatatggatggtttggatgtgagggagggaaagagaatcctaagtgtattagtagtggtgggaggaggttcggtacagtggtgtcatttggaagacaaatcgttggtgtttaacctctatgacccgaaagtctcccacaagcctgatacattaggcaaaatgtttgactgcactaagccttagtttatcgtcataaaataggccatgaaaattgcgtgagaaaatgtatataacagttcaacaaataatattggctgggtgtggtggctcatgcctgtaatcccagcactttgggaggccaaggtgggcagatcgcctgaggtcaggagttcgagaccagactggccaacatggtgagatcccccatctctactaaaaaaatacaaaacacacttgggcaaacatggtgaaaccccatttctactaaaaatagaaaaattagccaggcgtggtggcgcgcgcctataatcctagctgaggcacgagaatcgcttgaatccgggaggcggaggttgcagtgggctgagatcacaccactgcattccagcctgggcgacagagcaagactctgtctcaaaaacaaaatacacacacaaaatataatagtatttgtttgtttgtttgtttttgagatgcctcggattacagtgcggggattacagacgtgagccatcaagcccggacaatattattatattgttcattgcactcccacaacacccctaaggggcaggaacttttcttcccagccccctccccccgaccccaccgagagacagggtctcgctctgtcgcccaggcctggagtgcattggcgcgatcaaagctcactacagctcagaccctctggcctcaagcgatcctccagcctgggcctcccaaagcgctaggattacaggcgtgggccaccgcgcctgaccagtcttctcttcttgcagctgagccttaagagcctgtccaaagagcagaggtgggctgaaggcacaaagcgaatgaaagaataggcccccgggcaccgttgcacgccccacctcctcccaggggcgttgcactccagcccctcccgcacatgcgcactgggccttccaccgccccccgcccccagcaaagccccccgctcggagcatgcgcgggccgcttggcgccaattgctgaccgccacagccacagccagggctagcctcgccggttcccgggtggcgcgcgttcgctgcctcctcagctccaggatgatcggccagaagacgctctactcctttttctcccccagccccgccaggaagcgacacgcccccagccccgagccggccgtccaggggaccggcgtggctggggtgcctgaggaaag

SEQ ID NO: 10432 - DNA, 2300 bp, Homo sapien
cccgggttcaagtgattctcctgcctcagcctcctgagtagctgggattgcaaatgcatgccaccacgcctggctaatttttgtatttttagtagagacggggtttcaccatgtttgccaggctggtctcgaactcctgtgctcaagcgatacgcccctccttggcctcccaaagtgttgggattacaggcgtgagccaccgagctgggccaggccccaggtattgtcatgatgtaaaaatctctctctagaaaagagaacaccagcttcccagctggtcttctgtagctaggagatgcaagagcagcagttgaatttgaggtttgctttggagaaagaaccaaaagcagatatggatggtttggatgtgagggagggaaagagaatcctaagtgtattagtagtggtgggaggaggttcggtacagtggtgtcatttggaagacaaatcgttggtgtttaacctctatgacccgaaagtctcccacaagcctgatacattaggcaaaatgtttgactgcactaagccttagtttatcgtcataaaataggccatgaaaattgcgtgagaaaatgtatataacagttcaacaaataatattggctgggtgtggtggctcatgcctgtaatcccagcactttgggaggccaaggtgggcagatcgcctgaggtcaggagttcgagaccagactggccaacatggtgagatcccccatctctactaaaaaaatacaaaacacacttgggcaaacatggtgaaaccccatttctactaaaaatagaaaaattagccaggcgtggtggcgcgcgcctataatcctagctgaggcacgagaatcgcttgaatccgggaggcggaggttgcagtgggctgagatcacaccactgcattccagcctgggcgacagagcaagactctgtctcaaaaacaaaatacacacacaaaatataatagtatttgtttgtttgtttgtttttgagatgcctcggattacagtgcggggattacagacgtgagccatcaagcccggacaatattattatattgttcattgcactcccacaacacccctaaggggcaggaacttttcttcccagccccctccccccgaccccaccgagagacagggtctcgctctgtcgcccaggcctggagtgcattggcgcgatcaaagctcactacagctcagaccctctggcctcaagcgatcctccagcctgggcctcccaaagcgctaggattacaggcgtgggccaccgcgcctgaccagtcttctcttcttgcagctgagccttaagagcctgtccaaagagcagaggtgggctgaaggcacaaagcgaatgaaagaataggcccccgggcaccgttgcacgccccacctcctcccaggggcgttgcactccagcccctcccgcacatgcgcactgggccttccaccgccccccgcccccagcaaagccccccgctcggagcatgcgcgggccgcttggcgccaattgctgaccgccacagccacagccagggctagcctcgccggttcccgggtggcgcgcgttcgctgcctcctcagctccaggatgatcggccagaagacgctctactcctttttctcccccagccccgccaggaagcgacacgcccccagccccgagccggccgtccaggggaccggcgtggctggggtgcctgaggaaagcggagatgcggcggtgaggcgcggcttgggccggggctagggggtgaagggggaggaaggcggtgggccccgcctgacggagggcgtgcaggatcgcgcctctgactcggtaaacccgggctccgctttccaaatagcctccacgtgttcaaaatagccgccgctgtcccccatgggccgccatgctaaagggccagccaatgggaacgcgtctcggggcccatggcgccaatccgcgcgccgcaggccctcctggctcggtgcgctgtccaatcagaggggagagggggcgggacccagagggaggttttttgccgcgaaaagaccacgtggggacgcggtggggcgggtctggcgggggcggggcacctctgtgcagggttcccagtcaccgcgacgctcctcgggaagccatagggcgcctcccagcccgtctccccgctccagtttagaacctaattcccaattcccggaccgggcccagccctgggctcttactgtccgcttttgctgggacctgttccacaaatgggcgtcttctgccttgggccgtgggggttgggccggaagctgcggacgcctgggaaggggccgctgcagctc

SEQ ID NO: 10433 - DNA, 2300 bp, Homo sapien
aggactggtgatttctttccaggtgccttgttttgttagaccatgtggtcacttaataattttttttgggccaggtacagtggctcatacctgtaatcccagtgctttaggaggcaaggcaagaagatcgctttaggccaggagttcaagaccaacttgggcaacataatgagaccttgtctttaaaaaaaaaaaatttttttttttttaattagccaggggtggtgtgtgcctgtagttctagctacttgggaagctgaggcaggaggatcatttgagcccaggagttcgaggctgcagtgagctatgatcatgccactgcactccatccagcctgggcaacagagcaagatcctatttctaaaacaaaacaaaacaaaacaaaaaatgtaacttgatacctgtgactttctgaaactaacagctgtttgaagaaatatatttctattaccgttcttgtgtttgatggaaagagtttatgaataactttggtttcaagccttccaattatattctggaaaatacctgtgtcttaaagagatagtgtctagggagaactgaatcactgcagagttcttcacctgtatgtgtgggtatgtctagtctttttgcaagtaatgaatttcattagaaagatattaagtgcttgtcatgagcaagcccctgtgccagaaactcaatataaatcatttcattttctcacccatatggtgaagtagttgatgaggacactgaagctcagccatttgctcaaagtcatggctaatggagggaggattcaaacccacatcagcttgatttcaaagcctaatagtcctgccactgtcaacaccctgcctagatcatgattatttggaatcactgggaaagaatttttttttcatgaagttagaagcctaagaatttttttcaatggaattttataaaaatgtccttgaatcacagatggctctccctggaaacataggtttgtttgagagtcacctcttttattgtcttaataaatagactaagagccatcacaagggctactgtggctagagaacatatgactcgggccgggcattgtgcaggcatttgacctgcattccttcaccccggttcctgtaacatgtacctggtgctgtggggttacagctgataatgctgaggtttccagagcacatgcttccaagtccagtggagaaaatcccaagaagtccaatattcaatgactgttccttattgcaaaataagcccagaaacaaagtagctgtgaacaggctgcaccagccccagcagcaatttccatttaaaccattttgcacagatcccgtgctcagcgctctcgccagtttctccacttgctgtttagtaaggccatcattgttggcaggaagtgggttccaccttccctgttgcctgagcacaatgtgctcctatgtggtctccactttcctgctgcctagttggctgggcttctccagctgggccttggaggcgacctttgtcccacatgccagccctccccacgttgcagaacactatgtaactgcagcgtgtgctgaatttcctcttctgtgctcaaccctagcaagagccagtcaaccctgaatgagaatgtggcaatggagctgtttttttcttttatccccaagtcacaagaaattggaaacattccattaagtggcgtgatttgagagggtttcgccaaatcttttcaggggagagaagccaggtgacctgatagcgatcaccttcccattcacggttttcaatgggggcttgtttctcaaatgaccaacacctgtaggcagttaattttcagcatgtcacaggagggcccagatgactttctgcctactgcttacgacaacatggactttagatgcctcatggcttcaacagctaagaattatgaaataaagcgagttatgggattaaaaggcagatagcagaactctcccaggagtagccagggctgcacaagtggtttgacgtgggatctttctcatctttgccccgggttgttgctgctttgaaggttaagtgctccagggatatttttaaacagcaggggctgattaatctaaaagtgacatttgcagtccccagagtaagcagctagcaggcttagattcaggccctcagcaaacaaggaacctggaaaatgtaaccctgaatgcacggtggggaggacatggcaagagaaaagcggcaggaataaagtggtaagtcagctcgcccctccccggggtccggaccattctgccaacgtccaggtaaattcgaacccaatgtatagtgagagcagaccctgt

SEQ ID NO: 10434 - DNA, 2300 bp, Homo sapien
tccagcctgggcaaccaagtgagatcctgtctcaaaaaaacaaaacaaaacaaatgaaaaaaaaaaaacctgtgtgctgaaaaaatgaaaaaaaaaaaaaaaaaaatatatatatatatatatatatatatatgcacacacattgagcaccaaccaatgtcttgaaccaagctggaattttgatttttaaagttttcatttctgaaactgcattcaggaacaccaagagaatgagccaagtatctccatgacagttttgaaagaaagggctgaagagaacaactcatacaaatgcgaccaatcttaggcaaattttaaatgtgtgcatttgaaattgtgagatataagaaacagcaggtgcataaaattgatagggtgggcatccctctaccccagttaaaaaatacttgaattattgcttagaaaagtgcagcatcaaggccaggcacggtggctcatgcctgtaaccccagcactttcagaggccaaggtgggcagatctcttgagctcaggagtttacaacctgcctgggcaacatggcgaaaccccgtctccacaaaaaatataaaaattagccatgggcagtggtgtgtgcctgtagtcccaggtactcaggaggctgaggcaggagaattgcttgagctcaggagggggaggttgcagtgagccaagatcacgccactgcactccagcctgggcaacgagagagagagagagagagagagagaaagagaagtgcagcataaagacaaaagtgtgctacaatggttgtgaattatgaggtgtgagaatacattgtttacattgattcctgttggaaagccaatcaaattatgcaagttttacatgatataagttcttcaggaacttgcttagaaaatcctggctggctggacaaatggatggctgattaactacggatagaaggatgagtaggtggtgtgtggagagagaaggtgagtggatgagtcaatgggcaagatggttagacacacgcacggcaggtgatagagggatggcaggtaaagctgcaagttgtacagcggaggctctgacgaatgcagtggccagctcttctccccagttcagcccttctctcactctgcaaatcctttacaatctgttattctgttggatctaatcccccaaaccttccttgccagggttacctacatgaaaaacctcacagcctttcccttttctttgcggaataatgacgtgggacccaaaggtcaccccacacaagaacttttcccaagtgaatacacagagacaaatcggaggactgtttgagaaagctacagaagaaactctctgagcctcagtttcctcatctataaaatggggatacgaattctcaccccattcacctcactgctgctctctgcataacatctgtacctatatagcaaccacacatacaagccatcaaatttgtggagtgtcttcaagctcccaagaccctcaccaccacctccctccaatccttaaaacacctccatgggaccgggcgtgatggctcacacctgtaatcccagcactttgggaggctgaggcaggtggatcacctgaagtcagaagtttgagaccagcctggccaacaaggtgaaacctcattctactaaaaaatacaaaaattagctgggcgtggtggtgcacgcctgtaatcccagctacttgggaggctgaggcaggagaatcacctaaacccaggaggcagaggttgcagtgagctgagatcataccactgcactccagcctgggtgacagagtgagactccatctcaaaaaaaaaaaggaacaacccaatggatgttattattgtcattgtcactatttgacttccattttacagcttggtaaactgtggatcagtaactttcccttgctcataccttttccactgtcccaccactgcagtggagataagtaaattccataaggcagcaggtggtacaaggagtgcgtagatatgatcctaaaaacagacagacacctggctgtgtacctttaagacacagccgcagatcgacatgcaaactaacggtgccagacggtggcgtgggggggccgtggtcaagaatgagcaccgatcacgcagtttgattccatgagcagggaaggccagacgagcccttccagtgaacctctgtggacgctatcatgacaagctgctgcccttcgctgaaataacccagcggacccgaaaaccagatgccagacaaagctatttttatgtcttgcaaacctaacccaagcaacagctgcctgttgaaagagtgatcgtggccttcaccac

SEQ ID NO: 10435 - DNA, 2300 bp, Homo sapien
ctgggaaatattgagaacttttccacttcctttaaaaacattgtgttgaaatttaaaaagaaaaagctttatggcagggcacagtgtctcacgcctgtaatcctagcactttgggaggcagaggtgggcggatcacttgaggtcaggagttagacaccagcctagccaacatggtgaaaccccatctttacaaaaaatacaaaaattagccgggcatggtggggggcacctgtaatcccagctactagggaggctgaggctcaagaatctcttgaacccaggaggcagaggttgcagtgagctgagattacgccactatgctcccacctgggcgacagggtcagattctgactcaaaaaaaaaaaaaggatttttagataccaaattgacctgctgagctttgtggtccacttttgtaatgcttctagtatataattgtggcaaaattggttcagaaatttcaacacatagagagaggtcccatttaaaaattttttttgaaatagggtctcactctgttgtccaggctggagtgcagtggtgccatcttagctcatttcaacctctgcctcctgggcttttcttttctttttctttttttttttgtttttgagaccaagtctcactctgttgcccgggctggaatgcagttgcatgatctcagctcactgcaacctccacctccaggttcaagtgattctcatgcctcagactcccgagtagctggaattacaggcacccacctccatgcccagctaatttttgtatttttatttttagtacagacagggcttcaccatgttggccaggctggtctcaaactcccaacctcaggtgatctgcccgcctcagcctcccaaagtgctgggattacaggcatgagccaccgcactgggctcatttttaaaacaagatttccttcaaataacaatgatctactcattagtagggcagagttagggtgatagaaagaggtgtggcttagagattggaatacctgggttcattctttcaatacacacttgtaagccctcattgcataccaggcactggtctagaccctgcaacagaaaacagtctcccgaggcttgttgggcttctatgctagttgtaagcataccccacactggggatgatggcgcccttcctccctccagggccatgatggtgactgactatatgataataatactagaatgatgatgatgatgacagaagcaacaattccctttcatttataaagtggaatataattaagagtctttaaaaaaaaaaaataacagctttggctgggcgcggtgggtcacgtctgtaatcctagcactttgggaagccaaggtcaggagttagagagcaacctggtcaacatggtgaaattctgtctccacaaaaatacaaaaattagctaggcatggtggtgcatgcctgtagcccaagctactcaggaggctgaggcagaattgcttgaacccaggaggcggagtttgcagtgagcagagattgcggcactgcactccagcctgggcaacaaagggagactgcatctcaaaacaaaaaaacaaaaaaaccccagctttattgagagataattcacatggcatacaatccactcatgtaaaggacaagtcaatgttttttaactgtattcacagagctgtacaaccatcacctcaatctgctttagaacattttcatcatcccaaacagaaaccctacactctgtagccatcatccccatcccactaggtcctggcaaccactaatctgttttctgtctctcaagattggcctgttctgcacacttcatatacttggaatcgtataatatgtgaccttttgtgattggcttctttaacttagcagttttcaaggttcttccttgaaccttggcaggaaactaagatccagaggggtgaaggaatatgtccaagcctgtttcaggcagagcagggaggagaaccccatctctcccctcgtccagtatttcaggaatacacagcaccccaacagcctcctgccccactagcttctttaggagagaaatcacttgattatgtaaatcctaaaatgtctctccttttctccttacagattttctgaatggtcttgcttctttgtctatcttgtctgattttctcctgtctgaccttttcctggttaaaaatctgggggaaaatgacggactccaagccgatcaccaagagtaaatcagaagcaaacctcatcccgagccaggagccctttccagcctctgataactcaggggagacaccgcagagaaatggggagggccacactct

SEQ ID NO: 10436 - DNA, 2300 bp, Homo sapien
cctgggcaacaagaacaaaactccatctcaaaaaaaaaaaaaaaaaaaagaagaatgcagccacacccattcatttacatgttgtccacagctacgtccgtgctaacagcagaattgagtagttgcagccaagatgatatgtcccacaaagcctaaaatatttactacctatctcttacagaagtttatcaacccctgctctagagtttagagtggattttgtgtaactagtaacactctgaaatatgagcaaatttgctcttaactgctgcttagaaatctttttttttttttaattgaggaaggatttttctctgttgcccaggctgaagtgcagtggtgctatcatagctcattgcagcctcaacatcctgtgctcaagcaatcctcccacctcagcctcccgagtagctgggactacaggcgcctgccaccatgcctggctagtttttgtatttttagtagacatggggatttgccatgttgcccagactggtctcgaactcctgggttcgagtgacctacctgccctggccttccaaaatgctggattgcaggcctgagccactgcacccggcctgcttacagatagatattttagaggtcatttctggtacctgttccccgtgagtgccctcagcttttgagcacactctgcagtggcccctgagagaatgtccgtgtgtttctgccttgtcaggtttacgtgcggaggggctacatcgcctatgagttaaacagcctgcagcaccggcagctcccggacggcacctgcgtggtagaattccagttcatgctgccgtcctcccacccaaaccggtatggagtgggacacacccagggacggcctgtgtttctgttcttcctgacctctgtcgtcctgtctctggaaggacctggcaagtgtgtttgggcacgctgctggggagacatcagcgataagcacttcccctgtgggagctccctgcagcgccattttctcccctctaacatggtgataatgcagagcccacctcctacacctgcactgttcagtacagtagccatgtgtgcctatttacattaaaatgaatgcacatgggccaggcgcggtggctcatgcctgtaatcccagcactttggggggccgaggcgggcagatcacttgaggtcaggagttccagaccagcctggccaacatggtgaaaccccatctctactaaaaatacaaaaattagccgggcgtggtggcacatgcctgtaatcccagctactggggaggctgaggcaggaggatcacttgaacccgggaggcagagtgagtcagtgagctgagattgccccactgcactccagcctgggcgaagaagcgagactccgtctcaaaaaaaaaaaaaaaaagaggccaaacacagtagtggctcacacctgtaatctcagcactttgggaggctgaggtgggtggatcacaaggtcaggggttcgagaccagcctggccaacatggtgaaaccctatctctactaaaaaaaatacaaaaattagcctggcatggtggtgtgcactggtaatcccaggtacccgggaggctgagggagaactgctcgaacccgggaggcagaggttgcagtgagctgagattgcaccactacacgccagcctgggtgacagagcaagagtccatctcaaaaaaaaaaaagagaaaaaacaaagaatgcaaatgagccagccatggtggcccacacctgtaatcctagcacttcggagggctgaagggggcagatcaggaacttgaggcctggagtttgacaccagcccggccaacttggtgaaaccccatctctactaaaaatataaaaatttgccaggcgtggtggcacacccctgtaatcccaggttactcgggaggctgagggatgagaatctcttaaacctgggaggcagaggttgcagtgagccaagattgtgccactgcactccagcctgggtgacagagcgaaactctgtctcaaaaaaaaaaaaaaaaaaaattcagcttctcagtcatactgggtggctcatggctgccatattatttgacagtggagttctagaacattctgtcatggtagaaagttctagtagacaatgccacccaagccattgggaagagtcatgagataaggcacatgtagcattttagacagtgcctggcacaaaggaagttgttgactgtaagtgatcccggagatgatcatgactaacgctgttattaccatctagtggcatgccattggcctgggcactctgctcagtgctcccacactcttttatttatttatt

SEQ ID NO: 10437 - DNA, 2300 bp, Homo sapien
ggcaagaccatcctgcaggtcaactttgcttgattggaggtggctgcctaaaatcaggctagagcagtaagaatctgtgatagattagcaatgtctgtcacaagcccagcacaagatgggggaagtatgtctgccattctcatcctgtgtggagcagcagggcttggcaaaggggagaggaggcacaaaggtactttggacctaaacctagaggcactcgggagccatggcatgtttttgaggaaaagaaatgaaccgtgaattggtgttttagcttcatgaaggacataatcaattatcatttattattgactcatgtttattgagatattatcatgtgcccagcagtgtgctaagcacttgatagacattatctcatttaaccctcacagcagatttatagttaggggtatcagtagatcaagtacaaatgggaaaactgaggctgacctaaggttatacagctggtaagaacctacttttcactacacaccagggaagtgatttgccaagcacctactatgtgcctggtccgaggaaaggggctggctccgttctccggagacacctgggcactgggctgttcctggtggcagccaccattcctccagcccagcagcgtctctgtgcttctctccggcaggtgccttggctggggtggccgacctgcatgtgggagccactccaagtccccttctccatggcccagcaggcatggccccccgaggcatgccaggtctgggccccataactggccacagagacagcgtaagtggcactgcatggactgcggagggcgggtagtgccctccagactgggtgtctacccccaccgtgaccctctgtctcctcctcttcctgcccagcagatgagccagttccccgtggggggccagccctcatctggcctgcaggacccgccgcatctgtactcacctgccacccaaccacagttcccgctccccccgggtgcccagcaggtaccaagggctcaggggagccctggactgagcagcagacaccctgccttgggctggccggggacccctctgagcctcagtttactcacccagcacatggggataacattccctccatgctcatgtcatggggtcattcattccgttcccccaaaactcctgccctgagtggagacaagattgtttcctggacggttgtgaatccccacacaaggtgttttgaaactggggtggggacagtgttactgtgagtgacgtatgttatttctcaccttctctctttctctgccactttctccctgcccctgcctgtgggaagtgccctcctgtgggcctctatggccccccatttggggtgcggcccccctacccccagccccacgtggctgtgcattcatctcaagaactgcaccccaaacactaccccaagcccatctactcgtacaggtgaggtccagggtgggccgggtcagggccaagggcggctccgggagagagggatgaggctgccctcagggcatctcagacagctagtgtggcagcccagacttccaagggggaggttttggggagtggggaacccccaggtgggacttgttctcaggaaggcgcatcatagggtcccccaggtcaagagcccactgcagacctgagtccagtgccacagttcacttcattcataagccacgtggccttggggaagtgggatgacctctctgagcctcgatttccccaaatgtaaaaagtcatcaaaataatagtattgtatacctcgtgggagtttggggagggggaaacaacctaggtaaagtctgaaggctcatagccattaaaattatggggatgcaataaagaggggaaagggtaagatttctcaagtcagtaccaattgttgtgcccagatcaaggagaaagggcaaagggtgggaaagacatcgggccatgaaaagatattgagagctcactgtgtgtgagtgtttagggtcaagcagggcaggcttcctggcagaggcggcattgggctgtcagcctgagaccctttcatgcctggcctgccctgtcctgccctgccctgccctgccccacctcctgcccccagctgtctgatcgccatggccctgaagaacagcaagacaggcagcctgcctgtgagcgagatctacagcttcatgaaggagcacttcccctacttcaaggtgagtcccaagctagggtaggggtgctggagctgccctggtctcttcctggtgctgccagaatccagggctggccctgggccaaccctctttggttcccagttatgtctgtacatctggtggt

SEQ ID NO: 10438 - DNA, 2300 bp, Homo sapien
acttaggaacctgggttatttatagcccctccccccgactactcagggagctttggagggcagccaccttaccaaacctgccagcagggacccatctccacttctccttgttaccgcagtgccaagcagagcagccagggcagtggggagtcacagcaggttactgaacaggagcatggcttgcaccaccaggcgccgggaggttgtctggccagtgggtgaggaagggagggtgaggactggccagcacccccaacagcgggtggcatagcaggccctgcccctgcacctcaccccgtggtctcccagggcctgaggggacagatggtatcgcccaggcccggggccgtggctgtcacttggccagatgagttacgagcaggccggaggggtggcagccggaggggtggcggccggaggggtggcagccggggggctgcagaaacaattgcactgagaccctgggacaatgggggccacgtgccacaggggcaacagtcgtttgtcacacaatgggatgccgggggacagcagccggaccaactgctgccactgacacggccggccggccgcgttttcaaatcgtttccaggccctgtttccctatgaggcagccaatcgcgggggcagccaggcagtcacctgatgccagctttgtgggcccagggcccggccctgcgacaactgagcagtgtggccatggcaacgctaattgtggccctaaaacacaagaggggagagatggggaggagcagagagagagacagggaggaggagggagagggagaacgtgaggcagagctggccaagcagatggagggagggaaggggccgggctttgctggagcctccgagaggcgcagaaaaccagggcaggatgggtcggtgtcccgcctctctctgcccctcaatctatgaggctatttttgaaacatggaacttagaatttagactgtgggcctcttggtggtgacacagaaagcccctggctacaggggtggcagatgtggtggagtcgggcgtgtgctcctgggctggtctgcaccatcacgacagggcccggatggtggtgtaagacccgatgctctcggagtcgcgtggcaagtgtgacttgagggcactggggagtgacatggctatcccaaatcaccgacctgtctggcacctccatgggcagctatcctacatccactacaaccgatgttttgcccatgaatctgttgcggctggtgggtgtgggtcctaactggagcctcttgggaccaccaggggtcgagttgaagggctcaggcttcaggaggcactgactgggtctcagccccaccacctcctgttctgtgtcgccttgggcaggtgactcggtgctccaagcctcagttttctcatctgtacgaggggagtatgggcccaccctacatctcacagcagctgtggggattgtgcaggacagcgcttgttgaatgctgagtccagggcctggcaggtagcaggcactcagctgcctcagcacatggcaggatcatccacgcagaccgttcccaagttccatgttcctcacagctacagtacagcaggaaactgccctggacatggagtcaggtgactgatcttgtcatggcaggtgggaccctgaccacaggccctgagtgctctgtgctgtagtgtcccatagtaggtgagctccaactgtgcctcggtttccccatctgtaaaataggaataataacacctgcctcatagggtgactgggagtgtaaaaaggcttgatcggtgtctggcactggtcaagtcctcaacaaatattcgcgtgcattgtttatgtggtaggtgctaagtaggatgcgttaagtgggctaaggaaggaatgatgaggatgaaagatctggctgccgaaagggatctgggaccaggttcccgtgtccagtcctggggacgggcaggttggagggctggcgtggcttggggagatgaggcacattaagcgggtgcttccagaggtcgggacgcacccccaggagctggcctaagctccccctcccgcccgagttctctgttcctctttgcaggcttctagccaccaccagcgatgatgaccttcccggggacctgcagtcgctgtcgtggctcacggcggtggatgtgcctcggctgcagcagatggcaagtggccgcgtggacctgggtggcccctgcgtgccacatccacacccaggtaggctcagggacaaggtaggcagggaggagggtgatataggagaggggtgattcccagccctgccacccacccactgtgcagccat

SEQ ID NO: 10439 - DNA, 2300 bp, Homo sapien
cctccccaacaccctcaacctcccaccccactcctttttagtgggaggggctgtcttttagtgaaggattcttgcttttcttttccatatttcatgagtctacagaactcacagactggatgccttttattttaaaaactttactgaatccatcagctttcagaagagacaatttctttccaaaccattctgaagatataaaattacaccttaatgaaaatgactgtgacctcacaaggaggttgtcaagtcacccacgtttccttacaactccaagaaggattaacagaaataaacccaaatgctttgaatgcttacaactttactggtgaattaattatatgtcattcagggacattcaaagcaacataaactatgtaaaccactttcctaaccggtcaaaacacacattttaaatacatgctggtcgcgggagatgaaaactgagaaagtttcatgactgtgacctcaactaacatctgtaaactacatctttttcctccctagagaatgaaagctgatctatttactcctggcagagaagaaaggaggaaggacgtccaggtgctaccagaaaaccatttgtgaggacatggaccagtgccaaggtcacagcccacctgaatagaacttgaaatccaggcacacccagtccaggggagccctgagttcttcctgaacttaaacactgggtttaaaaaaaaaaaaacagtcacaggtgcggggacactggtcccctgcctgctgcgaagtagataacgcgaggacagcctcaaaacaactccagacgcttcgggtgcctgagcctcactcggtgggggcggcgcagaggtccacgtgcagtacgcgagctggggaggtgcgggagcccgcgctctgcccgtgcgccgccgacccactcactgccgctcggggctttgggttccccccatgcaaaaggaggaccatgctatgtcatcaagggctgatgcgaagaagaacccagaagcaggcgtcaataagtaacgaaagaatgggggtagccgtgcctaatatcgttgctgccgtggcaattactgcaacggaggcttgagagttagggcgccagaaacgcaaactttccaggggaccaaactcatccaagcctcctaaggggcctgtggagacctctgcccgctctgggccccgccgccgtccgcggtccgcgccacctttcccgcggctggctccaggcggggcggggcagcggcggcgcgggccgggcggcggggaagggagggagcgcggttgcacacgcgggccactgcccccaacggctgcgctgggctcgcggcgccgtaccccgaacgccgcagcctccgcctccgccgccgccgccaccgccaccgccaccgccgtcgccgtcgtcgcggctgccggggccgccgagccccgccgcactcgctccgggcgggctcaccctcctcgcgggacaggggggcgcagcgcgcagtcccggggagccctcctcgcctcgccgccgcgctgggcccgggccccccctcgcggccccagcaggtggaggcgccccgcgccccgctccgcagccccctcccgctgcgcgccagcccgcgcgggcgcaactttcttaaagggacaggtggaccgaatccgcgtccacctggggccccgtctctgcctcccggcccgtcctccactttgggggagagagggggttgcaacagatctctccgcccgcccacgtcctttgccccaggcgggattgcaagttttaatgcacccagcctccttttgcaacttaattcccttggccgaaatcaccctcccactgctcctcaacgcatgctctcgggcatgcagttgttgtcactgttggcaaagtttgaagaggggtccctacccctgcactcctccgccccgcccccctcacacacaccccccccccagaaccccggggcgtgcaaggctcgcggctgctgggaaacgcccgctgcaatccccttgaccctgccctgtaactgacccttggggaaaagccccccgcacggctactgcgcatgctctgagctggacagctccagagagggaaatttaaaaacggttcgagctgcgacggcggccaaattgcggaacgcgaggggcgagcgcgagggagcccccctccggaacccctgcccacccccggagcgccggcagcggcggccccgcgaggatcggctccaggtaccgccttgcagggtcggctttgctccctcctcccgggcaatgccgggcattgcatttccagggtagagacccgggcgcaggggctgcggggccgc

SEQ ID NO: 10440 - DNA, 2300 bp, Homo sapien
tctggaaaagccttctgtatttccatacgattgtgctcaccttctaatgccagcagtgaactctttcagccatcaaactggaagcccactggcgtggggccctggctcggaaggcaatccaaaggagaaagtgggccgtgcggattatcagaaagtaagttctcaggtacaacagagaggacaggtcactaaatgctggtaccctgcagggatggtcatggaggtagatgagttctttgtgattttttgatttgtgcagaaaggaaaaactcccttcagaatgccattaggaattcaggtccatccctttgctctgagctgaatttgatggtgatcacaactcaatgtatttggaatttctcttagcctggctcaaaagtcacaaagtcaaatgccttctgatgccaggcaggtaaagtgagtgagtctcatgggctgggataagacaacagggcatggtggagaccagcaaactggaacgctcagtctacctcaaggtggggcggtaactagcccattccagtttactgctgctgtggggaaatgtagccagatggcttgaattttcaaggaacgctgaaatctggcttttggggttttgttgttgttgtttgttttttttgtttgagatggagtctcactctgtcgcccaggctggagtacaatggtgtgatctcggctcactgcaacctccgccttctgggttcaagcgattctcctgcctcagccttccaagtagctgagattacaggcacacaccaccacacccggctaaattttttgtatttttagtagagagacagggtttcaccatgttggtcaggctagtctcgaattcttgacctcaaatgatccgcctgcctcagcctgccaaaatgctgggattacaggcatgagccaccatgcccagccttgaaatctggcttttatgccctgcttcctaactttttaaaattggcagctaattaaagctcctcaaaacaaaacaaaaggccgtgtgggtgaaatcgaacatatatgtggggcagatttggcctctggcctatgtggtcatctccacagcctctaccactttggccgcctctgaatcaaagaagggggaagagaatgtaaatctcggtgaagaaatggtccagaaaagtaagaaaacattttcctttttaggttcattaaaggattcatcagtcgcaacaaacccctctgtcctgacaacgaggaatttatcgtgtttgtgcggaagaattacatcttgaatctccggtatcaccttccaaagactgtcctggacaagagctggctgaggcctcctggcatcttggaaaatgtaaggactaatctgggatttccagtgttgtaagtagcacgggcactgacgaagcttaactcttgcatgtctttgtgctgcctccctttggcttgaaagggctgccctggcaaagcccttcttcccaaggatgctgcacaagaaattgaactcctcagaatttgcgatgtccttagtagcattataaagccactggagtgtccttagtagcattataaagccactggaggttgtttaaacagagcactttttttttttttttgagatggagtcttgctctgtcacccaggctagagtgcagtggcgcgatcttggctcactgcaacctccgcctcctaggctcaagtgattctggtgtgtcagcccccctgaataactgagattacaggcgcccgccaccatgcctggctaatttttgtatttttagtagagacggagttttgccatgttggccaggttagtctcgaactcctgacctcaaatgatctgtccgcctcagcctcccaaagtgctgggattacaggtgcgagtcaccgtgcccagccgacagagtactttcgaatcatttctattcctgacgtagccttcctagaatagcatccctcaagagatgatctgaggaccctctgtgtctggaacttagaggcggggctgttgtaagagtcccgggctccactttggacccactgagtcagaatctccaggaatctcattatagccagttctgcaggtgagtcataaacatattcaagtttgagaatcattcgttaagcaacagcaaaaagttgggagaggatcaggttagctgctgtgactataaaatataaaatattaacactgtgcttgaaatcaaactgaattcagcagtgtttttttaaagcttcattttgatcgccacagccccagacagggagtgagtgaggcaagtggaaagaagtgtgttctccacacaggcatcagatctgctcaggaaaat

SEQ ID NO: 10441 - DNA, 2300 bp, Homo sapien
tacttcagaagtgtacttttgggcctcaagagtcgggatgtctaacagagcctcagaccagggtcacctggggttatggttgtgtccagccagtagggcctggaggctgtgggggcttcctcagcccttagtgggcaggtaggcaggtgaggctgccattctccaggcagtcccgctctccgctgggaggtagagggagccgagagacaccccagctctgctcagggcctcccacaagaggagggcccatgtaaccagcccctgcctcctccctctgcaggctggatcctcattgaccgctgtgggaagcactttggtacgatactcaactaccttcgagacggggcggtgcctttacccgagagccgccgggagatcgaggagctgctagcagaagccaagtactacctagtccaaggcctggtggaagagtgccaggcggccctacaagtaggcatcaccctttcttcccatatgggtggagaggcaccaagcctacctgccttcctcattttccctctctgcaaaatgggggcagtttctgtctgactgagatgttgtgagagttaatgagtttgccctggagcccgattccttcggttggagtgacccctgagaggcctccctggaacagcaggccacctaactactgtgtcactccttgcagccccatgctgttggatcttctcatgtgtacatctcaacccttcagcagagaaccccgcggtgtgaaacttggtcggtgttcgggaccaatcttagggcttactctagtcccacaagtcattgttgggagctcagcataatctctacagacagacacccctcactccttagctagacagagcaggaccactggagtcaggtctggtgacagtaaaatcccacaaaaacaaaatgcttctagacatggccaacacccctttatttcaaacaaagttgcaacgtggcagagcatcagaagcatccctttgggttttcgtaggaatctggtctgtgtgcatgaggcccttgtttgggcctcccccacaccacatgtctgtgtctggccccgcaccggaccagtacccataatgctgcacaccacctctactctgagagtctgaactcactgcagacctaactgaatgttgcagcatttacttttttattattactacactgttgaaagtgatgcacatgcatccttcaagaagtcaaatagtgctgcaaggttaacatcaaaacaccaccatacccctcctactctccttcacccttgcagtaacctctgtgaattctttcagcagttttttctgttcacatttatgtttccacataattcgcctgtgctgctctttattgaattcccagtttttgacattatctactggcatgactatagaaactagaatttagctcacgcactgcccctacctctacccccaccaagcttaggcatacttttccttctcccattctcccagtacagttcatcacagttttggttaaattcagagtttacgtcatgacgtgtaaatacggctgacagttaagccacagagtgtacagtgattattttctttcttctataactttaagtttgccagagttagggattgcctcattgttttgttcacttggttttctaaatatatgttcctacttcagccccacgttctcagcggtctcatagtggtgtgttcagacacatcagaggttctgtttcatctttgtcttggagacatgcccctgggtctcgtttctgttagtctaaggttagacctccaggactgacctcctaattctttcctcttagtgtctctggctttatccttttgttctactttctcagaagttttatttttcaccttttcaacccttctatcaaaattttcatttctgcttcgtctttctaacttcaggagccttttcttgctgtccgaatgccctgctttccacagcgtgctcatcttgtttcctaggaggccgtatctgctctcaactgtctgatgattctgtttgttttctttcttctcccttcattatctgactcctcctcttttcctgtctttgttttggttttgttctcatgttaaagaggcttttcacatgtaatctgatgatgcttggctgtctgttgaaggaatgagagactctgaaagctgtttgtgcatggaaggtccttgttgtccactgggctgcattgtgggtgataaggcagactttttcagcgggacccccaactgtcagaatctgtaagccattttgggggaagcaggtggtgttcctgaagaggaatcctctactctcctcctgcc

SEQ ID NO: 10442 - DNA, 2300 bp, Homo sapien
tcaattaatcagtatctcagagatgcggaggggtggctgatcagtcactagtgtttaaaaagctctttgggggattcggatgtgggaccagggcttactgccacctagctaaggtatttaaccagctttatctaagagttgccagggatgtgaggcaaagcatcacctcaggggattcctacagcaaagaagtttaagaaacactgtattgaggcttgtataaaaccttcccaaactgagggcatttctacaactcagaaaagtctgctgttacatttcaactaaactaagtcacataattgcagcattttacatccaaaatttgcttataagacagctaccgccaattgcaacttccatcaaatgacattctctccctgtgtttaatacacaaactcttggtctatttctctcaatgttctagtgagaaagatgtttatcatcaaccccacttttttggggagaaaactaggaatcacacctataagagccctctgactcccaactcctttgcccctttcattacacagtccaaatcaagaaatcattagtctaatcccttgcagggcttgttaaaaccgatagatgggctccaccccaagaatgtctgattcagtagtctctgacagggcttgaaatttcagccattttgaataagttaccaggtgttgctgctggtgggaccagagtttgagaaccactggtttatgctgccttcttcccatccgctggtccttattttgcacaaaatggagcggactagtcaacgtcagctacaggataactgacttttcttcagcagcgtcactgggactgattttcccttaagactgcactttccagggacgtgacaaacaagcaagcaagtagaaagaagatctgggccaatctttggtcatctctacccagggacaatgagctactcagggaacagacccttgaggatcccaagcagacaaaccccacagctgagagacagatcttgaaacatcctccgctccttaggcgtggtcacctctggcctcaatggaagttacagataggtacccaggcgccagctgaggcactgaactccgtggcgcaggtatcctaacctcaggcccctggcatctctccccaggattccaagcactgaacgcacatcagcctgctgggctctctcgatttctttccctcactgggccgtgtgttcagacgcacctgggagccccttccccacttcctggaaactcagcgactccagccacaacctccaaaacgccaaacgctccgccccaaggaatcctacctcaccttctcataacctgcccattcattctccttcataatcctccaaatcctcattttccacccccaaatgtccgttttcaattgatatctctttgttctcctcgcaatcaccaactcccatctccaaccagcactcaggactcacttggagacaccccttcctcacgcacacacgtatctactccgcaagcccaaatgtgcttcccggattcctaaccgccagggagcctccctaccaccacccccgcccctaattctccacccaaagcccttcccccaccccgggcctttcccctaaccaatcccccaaatgcctctccactatcgtgactgcccctcatcacaccccctcctctcggtcccttcttatactctgctgctgcccagctccctcggccgccctcaacccctagtccatgggcaccgccctccctaccatgaaaagtcggaggacgcaggagtctccaaacccggactgagagaggcaggaaacacccagctcacgccagccgggggcggaggcggggccggagcgataacttccgctgtccgcaccccacttccgccccgcagagggcaacgtcttaagccgtccgttgtgcgcctaggggccagttttctttccagcctccccggccggagtgggttccagcttttctcggctggggagggcatttatcccacctccgctatttcagctgccagaggggaggcaaggtgtggggaagttttccttcccgggcgaagaagctctgcggaactgtcattttccggaactggatgcttgcttcctggcggggttctgaaagcgaacaccgcggggcaagatggcggtagtgcgtcggctgctgccccgggtctggcagaactcgggtgttttgggctgagacagtggcagctgcggccccgaccccaagtgcggggacctccggcgaataaaggtcggcctgcgggtaggccggtagggcctgcggtccggcctgcgggagaactgggtcgtcagtcctccg

SEQ ID NO: 10443 - DNA, 2300 bp, Homo sapien
agtttccttatgtgtaaatcgagggtaataatagtgtctatgtcctagggttgctgaaaggattaaatgcaacatttatccttcttgtacctcaatttagtcatcacaacattgtgattaggattaaatgggaaaatattaatataggatatctaaaagcatgtagcatgtaagtgagctttattgtattgtccttaagaagcttgcaatctagttagggaaacaagaatcatataggtagaaagattagaaaataagaggttggtgataaccaagatcatttaaaaaagtaaatgagtgcccattatgtgtcaagtcctttataagtgatctcatctaataaggagaggagtcctatgagaagatcattcatgatctcatctactccagtctagaccattagtatgtggcagagtcaaggctgtaataactaagaggcaggattcagactcttgtcttacctctatatttccaaagctgaagcatcataaataccaactgctgactaagccaagaggattgtccctgtgcagtaggaaaagctgggccaccaggtttaatgaccaccaccacttgttctgggcagacggtgtatcagacactgcacagattatttaaccaacttgtcttttcaacagctctatcagttctcgataatctttgtttttttgagacggagtctcactttgttgcccaggctggagtgcagcggcgcgaactctgctcactgcaacctccgcctcccaggttcaagtgattctcctgcttcagcctcccaagtcgctgggattaaaggcgcccgccaccacgcccggctaatttttgtatttttagtagagatgcggtttcaccatgttggccacgctggtcttgaacttctgacctcaggtgatccgcccgcctcggcctcccaaagtgctaggattacaggcgtgagccaccgtggccagcctcaataatctaatttttatttaaagaataggaaacacgacttaaagagactattcatattaacagctactatttattgaaagctacagcctatctaaggtggatgcttttgaatctgaatccatgtatatccaaaacagttatttatcactaagtaaaacaaacaagatccagggctcccccgttcacagaatggccaagcaaagagaagttgagagtgcaagattgcctgtgggggctaagctggagttaaattacgatcaagtttttctttattcagaactaggtgtcaggcacggtactaaaacgtattcacaccctctgtgaaacctgctaattactccatttacacagaaggaaactgaggctcagagaggtgagggaactcacccaaggtcacacagcgagcgaacagtattcgaactccagtttaggtgagtcctggggcccagagtctttcctcggcatcaacaaccacaggaacaaatcacccagcattagtccgtttataaaggcctaccgtccccaaagtgaaaagaggtggaaagggccgcggaaagagcccctggagcacacacgccagatcccagcacttgttcctccgacctggccaggcagggactgtgccctagagccaactccctcaaagtccccagccccaccactcggaggactgacgacccagttctcccgcaggccggaccgcaggccctaccggcctacccgcaggccgacctttattcgccggaggtccccgcacttggggtcggggccgcagctgccactgtctcagcccaaaacacccgagttctgccagacccggggcagcagccgacgcactaccgccatcttgccccgcggtgttcgctttcagaaccccgccaggaagcaagcatccagttccggaaaatgacagttccgcagagcttcttcgcccgggaaggaaaacttccccacaccttgcctcccctctggcagctgaaatagcggaggtgggataaatgccctccccagccgagaaaagctggaacccactccggccggggaggctggaaagaaaactggcccctaggcgcacaacggacggcttaagacgttgccctctgcggggcggaagtggggtgcggacagcggaagttatcgctccggccccgcctccgcccccggctggcgtgagctgggtgtttcctgcctctctcagtccgggtttggagactcctgcgtcctccgacttttcatggtagggagggcggtgcccatggactaggggttgagggcggccgagggagctgggcagcagcagagtataagaagggaccgagaggagggggtgtgatgaggggcagtca

SEQ ID NO: 10444 - DNA, 2300 bp, Homo sapien
acacttgattgtgtgttttattaattgacgaactatagtatacactgtgcaggtggagaaggtatataggaaaggatgagaaaaactgtaaagtgtaggctattatatgatatgaacagaaatcaaccaataacattgctgaagggataataatctcaaggaaggggataagagtaatttcttattctgggagggcccctgggagaagtgaaagttttaagatcgtcttacagtgcttaggtacagtttgcatgcaactttgtttttcttttgggaagaggctccctcttccccttctaattccatggaccctctgccattgaggcactgtctgcatgtcatggagggagcatatcattgtgcttgtggcttgggccctgctcttttgcagtcctgaggagcttgaatctgttactcactctaaacaacagggccaggagttcatagcccaagggacaggactggtgaatcttagtgcatttaagataggaaaaaagttaatgggtgagaaatgtcagactgccagcattatttcctacccagagaaccttagtaactgtccaggtgggagcctctgctgaagagtttttttttttttttaatccttgtgtctataaaaataatacaccagttagacttcctgactatacactctacaatgtgcactcaagtacctccataggtacctgataagcatcatcacatttagtcctcattatcaacctctaagccaattaatagatgaagatggaaagactcagggcccagtgtggtggctcatacctgtaatcctaacattttgggaggccaaggcaggaggatctcttgagcccaggagtttgagaccaccaacctgggcaatatagcgagaccccacctctacaaaaaatttaaaaactagccagatgtggtggtatgtacctgtggtcccagctacttgagaagctgaggtgggagaatcgcttgagcctgggaggtagaagctgcaatgaaccatgattgcaccactgcactccagcttggatgacagagcgagaccctgccttaaaaaaaaaaaaaagacttagacattctccctatagtatgtggcagagctagggactggctccaactctgtgtgactcccaaagcccgtgtgcccctcactgtgcagtgctgcttcaccatgtgcatgctgtggaaaatttagaaaatacagaccaattaagaaaaatttcccgcaatttcagtacctcaaaacagccactggtaacatgttggtatagttcatgctagttttgtatctgtgtgtgtgtacatttttctttaggtaattggggtcttattggtccacaggcagccctttattcacttctaaggcataaacgtttttccattatcattaaaaatgtcaaacacgctgaggcaggagaatggcatgaacccgggaggcggagcttgcagtgagccaatatcgcgccactgcactccagcctgggcgacagagcaagactccgtctcaaaaaaaaaaaaaaaaatgtcaaacatggccgggcacagtggctcacacctgtaaccccaactgagatagggtatggtggcacacacctgtaatcccagctacttgggaggctgaagcaggagaatcgcttgaacctgggagcagaagttatagtgagctgaaattatgccgctgcactccaacctcagcgacagagtgagactatctcaaaaaaaaaaaaaaggaaaatgtcaaatataattttcagtagctctttaacattccatgacctctaagttattttgcttcccatcacagctgtaattcaacaacaactttgggatttattttcaacatattccctttaaactgtgaggattgaagagatacagtataacatttagatgagacattaaataaagaggacccagtggtgtttttaaaaaaccattggcattgtagttactacttttactcagtgaggaagatgtatgataccacacctataaaatttaaccctaagtctggatttttttcttctgcttctgccagaaaaaataacaagcttttctgaagtgagaagctgttctcagccacgagtcctgtgcaagatcactaatgattacctggcatttctgcgacacaggcaggtcctcaggtgagatctccagactttactgctggggcaggaagcgtaaatgattcagaagatggctaccgtttctctccaagccttttataagttggtgcaaaagtaattacgacttagtgtttttttaaaaaagttgaaacccacaattacttttgtaccaacctaata
